(19) United States
(12) Patent Application Publication
(10) Pub. No.: US 2024/0398993 A1
(43) Pub. Date: Dec. 5, 2024

(54) SMALL MOLECULE-REGULATED GENE EXPRESSION SYSTEM

(71) Applicants: Glenna FOIGHT, Seattle, WA (US); TJ BRUNETTE, Seattle, WA (US); Outpace Bio, Inc., Seattle, WA (US)

(72) Inventors: Glenna FOIGHT, Seattle, WA (US); TJ BRUNETTE, Seattle, WA (US)

(21) Appl. No.: 18/261,554

(22) PCT Filed: Jan. 17, 2022
(86) PCT No.: PCT/US2022/012688

§ 371 Date: Jul. 14, 2023

Related U.S. Application Data
(60) Provisional application No. 63/164,866, filed on Mar. 23, 2021.
(60) Provisional application No. 63/143,735, filed on Jan. 29, 2021.
(60) Provisional application No. 63/143,026, filed on Jan. 28, 2021.
(60) Provisional application No. 63/137,803, filed on Jan. 15, 2021.

(51) Int. Cl. A61K 48/00; C07K 14/47; C07K 14/81; C12N 9/50; C12N 15/86

(52) U.S. Cl. CPC A61K 48/0066; C07K 14/4705; C07K 14/811; C12N 9/506; C12N 15/86; C07K 2319/50; C07K 2319/80; C12N 2740/15043; C12N 2830/002

(57) ABSTRACT

A fusion protein comprising a DNA binding domain operably-linked to a dimerization domain, wherein the DNA binding domain specifically binds to a response element.

### RELATED APPLICATIONS

[0001] This application is a 35 U.S.C. § 371 national stage entry of PCT/US2022/012688, filed Jan. 17, 2022, titled the same, which claims priority to U.S. Provisional Application Nos. 63/137,803, filed Jan. 15, 2021; 63/143,026, filed Jan. 28, 2021; 63/143,735, filed Jan. 29, 2021; and 63/164,866, filed Mar. 23, 2021. The entire contents of each of the prior applications are incorporated by reference herein.

### INCORPORATION OF THE SEQUENCE LISTING

[0002] This application contains a Sequence Listing that has been submitted ASCII format via U.S. Postal Service Express Mail and is hereby incorporated by reference in its entirety. The ACSII file, created on Mar. 9, 2024 is named “OTPC_022_04US_SeqList_ST25.txt” and is 360,410,705 bytes in size.

### FIELD OF THE DISCLOSURE

[0003] The disclosure relates to small molecule-regulated gene expression systems as well as the fields of small molecules, gene therapy, protein design, and cell signaling. The expression systems localize regulatory elements via dimerization of fusion proteins mediated by a small molecule, and thereby mediate expression of a gene of interest.

### BACKGROUND

[0004] Post-translational control systems have been designed to facilitate temporal modulation using small molecules as extrinsic inputs. Such systems are useful for a variety of in vitro, ex vivo and in vivo applications. Chemically induced dimerization (CID) is one mechanism by which a small molecule can be used to effect post translational control of expression of the gene of interest. These systems make use of a small molecule to induce dimerization of proteins and thereby localize components required for transcription. In designing such systems, it is desirable to reduce background expression of the gene of interest. The disclosure provides modified post-translational control systems with reduced background expression. The disclosure also provides a variety of other improvements including, inter alia, improvements in packaging, transduction, promoter design and vector design.

### SUMMARY

[0005] The disclosure provides a fusion protein comprising a DNA binding domain operably-linked to a dimerization domain, wherein the DNA binding domain specifically binds to a response element.

[0006] In some embodiments of the fusion proteins of the disclosure, including those in which the fusion protein comprising a DNA binding domain operably-linked to a dimerization domain, the DNA binding domain comprises one or more of a DNA sequence, an RNA sequence, and an amino acid sequence. In some embodiments, the DNA binding domain comprises an amino acid sequence. In some embodiments, the DNA binding domain comprises a sequence derived from one or more of a galactose-activated transcription factor 4 (Gal4) sequence, a zinc-finger 1 (ZF1) sequence, a zinc-finger 2 (ZF2) sequence, a zinc-finger 3 (ZF3) sequence, a zinc finger HIV2 (ZFHIV2) sequence, a zinc-finger homeodomain 1 (ZFHD1) sequence, a catalytically inactive Cas12a (dCas12a) sequence, a catalytically inactive Cas9 (dCas9) sequence, a catalytically inactive CasPhi (dCasPhi) sequence, and a TAL (transcription activator-like) effector (TALE) sequence. In some embodiments, the DNA binding domain comprises a sequence of one or more of Gal4 (SEQ ID NO: 56), ZF1 (SEQ ID NO: 57), ZF2 (SEQ ID NO: 58), ZF3 (SEQ ID NO: 59), ZFHIV2 (SEQ ID NO: 60), and ZFHD1 (SEQ ID NO: 165).

[0007] In some embodiments of the fusion proteins of the disclosure, including those in which the fusion protein comprising a DNA binding domain operably-linked to a dimerization domain, the DNA binding domain comprises one or more of a DNA sequence, an RNA sequence, and an amino acid sequence. In some embodiments, the DNA binding domain comprises an amino acid sequence. In some embodiments, the DNA binding domain comprises a sequence derived from a Cas12a sequence (SEQ ID NO: 166), wherein the DNA binding domain sequence comprises a substitution at one or more of the following positions compared to SEQ ID NO 166: 176, 192, 382, 548, 604, 607, 780, 783, 908, 951, 955, 958, 993, 1226, 1238 and 1263. In some embodiments, the DNA binding domain sequence comprises one or more of the following substitutions compared to SEQ ID NO 166: R176A, R192A, W382A, K548A, M604A, K607A, K780A, G783P, D908P, R951A, R955A, W958A, E993P, R1226A, D1238A and D1263A.

[0008] In some embodiments of the fusion proteins of the disclosure, including those in which the fusion protein comprising a DNA binding domain operably-linked to a dimerization domain, the DNA binding domain comprises one or more of a DNA sequence, an RNA sequence, and an amino acid sequence. In some embodiments, the DNA binding domain comprises an amino acid sequence. In some embodiments, the DNA binding domain comprises sequence derived from a Cas9 sequence (SEQ ID NO: 167), wherein the DNA binding domain sequence comprises a substitution at one or more of the following positions compared to SEQ ID NO 167: 10, 15, 66, 70, 74, 78, 165, 475-477, 762, 840, 854, 863, 982, 983, 986, 1125-1127, 1132, and 1333-1335. In some embodiments, the DNA binding domain sequence comprises one or more of the following substitutions compared to SEQ ID NO 167: D10A, S15A, R66A, R70A, R74A, R78A, R165A, 475-477 PWN-AAA, E762A, H840A, N854A, N863A, H982A, H983A, D986A, 1125-1127 DWD-AAA, G1132C, R1333A, R1335A, and 1333-1335 RKR-AKA. In some embodiments, the DNA binding domain sequence comprises the following substitutions compared to SEQ ID NO 167: D10A and H840A. In some embodiments, the DNA binding domain comprises sequence derived from a Cas9 sequence (SEQ ID NO: 167), wherein the DNA binding domain sequence comprises one or more of the following deletions compared to SEQ ID NO 167: 97-150, 175-307, 312-409, and 1099-1368. In some embodiments, the Cas9 sequence (SEQ ID NO: 167) is isolated or derived from Streptococcus pyogenes. In some embodiments, the Cas9 sequence (SEQ ID NO: 167) is isolated or derived from another species, with substitutions or deletions occurring in homologous locations in the Cas9 sequence.

[0009] In some embodiments of the fusion proteins of the disclosure, including those in which the fusion protein comprising a DNA binding domain operably-linked to a dimerization domain, the DNA binding domain comprises one or more of a DNA sequence, an RNA sequence, and an amino acid sequence. In some embodiments, the DNA binding domain comprises an amino acid sequence. In some embodiments, the DNA binding domain comprises sequence derived from a CasPhi sequence (SEQ ID NO: 168), and the DNA binding domain sequence comprises a substitution at one or more of the following positions compared to SEQ ID NO 168: 33, 126, 127, 130, 367, 371, 373, 394, and 606. In some embodiments, the DNA binding domain sequence comprises one or more of the following substitutions compared to SEQ ID NO 168: K33A, V126A, Q127A, N130A, V126A/Q127A/N130A, K367A, K371A, K373A, K367A/K371A/K373A, D394A, and E606Q. In some embodiments wherein the DNA binding domain comprises sequence derived from a CasPhi sequence (SEQ ID NO: 168), the DNA binding domain sequence comprises one or more of the following deletions compared to SEQ ID NO 168: 1-45.

[0010] In some embodiments of the fusion proteins of the disclosure, including those in which the fusion protein comprising a DNA binding domain operably-linked to a dimerization domain, the DNA binding domain comprises one or more of a DNA sequence, an RNA sequence, and an amino acid sequence. In some embodiments, the DNA binding domain comprises an amino acid sequence. In some embodiments, the DNA binding domain comprises a sequence derived from a TALE sequence (SEQ ID NO: 169).

[0011] In some embodiments of the fusion proteins of the disclosure, a cell comprises the response element. In some embodiments, the response element comprises an endogenous sequence. In some embodiments, the response element comprises an exogenous sequence. In some embodiments, the response element comprises at least one repeat of a sequence of the response element. In some embodiments, the response element comprises at least 2, 3, 4, 5, 6, 7, 8, 9, or 10 repeats of a sequence of the response element.

[0012] In some embodiments of the fusion proteins of the disclosure, a cell nucleus comprises the response element. In some embodiments, the response element comprises an endogenous sequence. In some embodiments, the response element comprises an exogenous sequence. In some embodiments, the response element comprises at least one repeat of a sequence of the response element. In some embodiments, the response element comprises at least 2, 3, 4, 5, 6, 7, 8, 9, or 10 repeats of a sequence of the response element.

[0013] In some embodiments of the fusion proteins of the disclosure, a chromosome comprises the response element. In some embodiments, the response element comprises an endogenous sequence. In some embodiments, the response element comprises an exogenous sequence. In some embodiments, the response element comprises at least one repeat of a sequence of the response element. In some embodiments, the response element comprises at least 2, 3, 4, 5, 6, 7, 8, 9, or 10 repeats of a sequence of the response element.

[0014] In some embodiments of the fusion proteins of the disclosure, the response element comprises one or more of 5×Gal4RE (SEQ ID NO: 84), 6×ZFIRE (SEQ ID NO: 85), 6×ZF2RE (SEQ ID NO: 86), 6×ZF3v1RE (SEQ ID NO: 87), 6×ZF3vRE (SEQ ID NO: 88), 12×ZF3veRE (SEQ ID NO: 89), and 12×ZFHIV2RE (SEQ ID NO: 90).

[0015] In some embodiments of the fusion proteins of the disclosure, (a) the DNA binding domain comprises Gal4DBD (SEQ ID NO: 56) and the response element comprises 5×Gal4RE (SEQ ID NO: 84); or (b) the DNA binding domain comprises ZF1 (SEQ ID NO: 57) and the response element comprises 6×ZF1RE (SEQ ID NO: 85); or (c) the DNA binding domain comprises ZF2 (SEQ ID NO: 58) and the response element comprises 6×ZF2RE (SEQ ID NO: 86); or (d) the DNA binding domain comprises ZF3 (SEQ ID NO: 59) and the response element comprises one or more of 6×ZF3v1RE (SEQ ID NO: 87), 6×ZF3vRE (SEQ ID NO: 88), and 12×ZF3veRE (SEQ ID NO: 89); or (e) the DNA binding domain comprises ZFHIV2 (SEQ ID NO: 60) and the response element comprises 12×ZFHIV2RE (SEQ ID NO: 90).

[0016] In some embodiments of the fusion proteins of the disclosure, the fusion protein comprises, from amino to carboxy termini, the DNA binding domain, a linker, and the dimerization domain. In some embodiments, the linker comprises one or more of a DNA sequence, an RNA sequence, an amino acid sequence, and a polymer. In some embodiments, the linker: (a) comprises a sequence of GGGGS (SEQ ID NO: 243); or (b) comprises a length of between 2 and 20 amino acids; or (c) comprises a sequence comprising glycine (G) and serine (S). In some embodiments, the linker comprises an oligomerization domain. In some embodiments, the oligomerization domain comprises the sequence of SEQ ID NO: 1, 2, 3, 4, or 5.

[0017] In some embodiments of the fusion proteins of the disclosure, the dimerization domain comprises an NS3a polypeptide. In some embodiments, the NS3a polypeptide comprises a sequence of SEQ ID NO: 6, 7, 8, 9, 66, 133, or 134. In some embodiments, the NS3a polypeptide comprises a sequence of SEQ ID NO: 65, 68-73 or 153.

[0018] In some embodiments of the fusion proteins of the disclosure, the dimerization domain comprises a DNCR polypeptide. In some embodiments, the DNCR polypeptide comprises a sequence of SEQ ID NO: 11-46. In some embodiments, the DNCR polypeptide comprises a sequence of SEQ ID NO: 55.

[0019] In some embodiments of the fusion proteins of the disclosure, the dimerization domain comprises a GNCR polypeptide. In some embodiments, the GNCR polypeptide comprises a sequence of SEQ ID NO: 47-50.

[0020] In some embodiments of the fusion proteins of the disclosure, the fusion protein further comprises a degradation domain. In some embodiments, the degradation domain comprises a sequence of SEQ ID NO: 156 or 160.

[0021] In some embodiments of the fusion proteins of the disclosure, the fusion protein further comprises a cleavable peptide. In some embodiments, the cleavable peptide comprises a P2A sequence or a T2A sequence. In some embodiments, the P2A sequence comprises the sequence of SEQ ID NO: 74. In some embodiments, the T2A sequence comprises the sequence of SEQ ID NO: 75. In some embodiments, the cleavable peptide comprises the sequence of SEQ ID NO: 135 or 136. As used throughout the disclosure, the terms “separation element” and “cleavable peptide” may be used interchangeably.

[0022] The disclosure provides a nucleic acid encoding a fusion protein of the disclosure, including those fusion proteins comprising a DNA binding domain operably-linked to a dimerization domain.

[0023] The disclosure provides a fusion protein comprising a regulation domain operably-linked to a dimerization domain, wherein the regulation domain is capable of modulating a transcriptional activity or an epigenetic activity of one or more target sequences.

[0024] In some embodiments of the fusion proteins of the disclosure, including a fusion protein comprising a regulation domain operably-linked to a dimerization domain, the regulation domain comprises one or more of a DNA sequence, an RNA sequence, and an amino acid sequence. In some embodiments, the regulation domain activates transcription. In some embodiments, the regulation domain deactivates transcription. In some embodiments, the regulation domain blocks transcription. In some embodiments, the regulation domain reconfigures chromatin comprising the one or more target sequences. In some embodiments, the regulation domain comprises a sequence derived from one or more of a Kruppel associated box (KRAB) sequence, a Methyl-CpG-binding protein 2 (MeCP2) sequence, a p65 sequence, a minimal p65 (p65mini) sequence, a p65mini-Heat shock factor protein 1 (HSF1) (p65mini-HSF1) sequence, a VP16 sequence, a VP64 sequence, a VP64-RTAmini sequence, a VP64-p65-RTA (VPR) sequence, and a minimal VPR (VPRmini) sequence. In some embodiments, the regulation domain comprises a sequence of one or more of a KRAB sequence (SEQ ID NO: 155), a MeCP2 sequence (SEQ ID NO: 170 or 171), a p65 sequence (SEQ ID NOs:172-175), a p65mini sequence (SEQ ID NO: 61), a p65mini-HSF1 sequence (SEQ ID NO: 62), a VP16 sequence (SEQ ID NO: 176), a VP64 sequence (SEQ ID NO: 177), a VP64-RTAmini sequence (SEQ ID NO: 63), and a VPRmini sequence (SEQ ID NO: 64).

[0025] In some embodiments of the fusion proteins of the disclosure, including a fusion protein comprising a regulation domain operably-linked to a dimerization domain, the fusion protein comprises, from amino to carboxy termini, the dimerization domain, a linker and the regulation domain. In some embodiments, the linker comprises one or more of a DNA sequence, an RNA sequence, an amino acid sequence, and a polymer. In some embodiments, the linker: (a) comprises a sequence of GGGGS (SEQ ID NO: 243); or (b) comprises a length of between 2 and 20 amino acids; or (c) comprises a sequence comprising glycine (G) and serine (S). In some embodiments, the linker comprises an oligomerization domain. In some embodiments, the oligomerization domain comprises the sequence of SEQ ID NO: 1, 2, 3, 4, or 5.

[0026] In some embodiments of the fusion proteins of the disclosure, including a fusion protein comprising a regulation domain operably-linked to a dimerization domain, the dimerization domain comprises an NS3a polypeptide. In some embodiments, the NS3a polypeptide comprises a sequence of SEQ ID NO: 6, 7, 8, 9, 66, 133, or 134. In some embodiments, the NS3a polypeptide comprises a sequence of SEQ ID NO: 67.

[0027] In some embodiments of the fusion proteins of the disclosure, including a fusion protein comprising a regulation domain operably-linked to a dimerization domain, the dimerization domain comprises a DNCR polypeptide. In some embodiments, the DNCR polypeptide comprises a sequence of SEQ ID NO: 11-46. In some embodiments, the DNCR polypeptide comprises a sequence of SEQ ID NO: 51-54 or 162.

[0028] In some embodiments of the fusion proteins of the disclosure, including a fusion protein comprising a regulation domain operably-linked to a dimerization domain, the dimerization domain comprises a GNCR polypeptide. In some embodiments, the GNCR polypeptide comprises a sequence of SEQ ID NO: 47-50.

[0029] In some embodiments of the fusion proteins of the disclosure, including a fusion protein comprising a regulation domain operably-linked to a dimerization domain, the fusion protein further comprises a degradation domain. In some embodiments, the degradation domain comprises a sequence of SEQ ID NO: 160.

[0030] In some embodiments of the fusion proteins of the disclosure, including a fusion protein comprising a regulation domain operably-linked to a dimerization domain, the one or more target sequences comprises a sequence isolated or derived from a sequence encoding a protein provided in Table A or any isoform thereof. In some embodiments, the one or more target sequences comprises a sequence isolated or derived from a sequence encoding a protein provided in Table A or a sequence at least 50%, 55%, 60%, 65%, 70%, 75%, 80%, 85%, 90%, 95%, 97%, 99% or a sequence having at least any percentage of identity in between.

[0031] The disclosure provides a nucleic acid encoding a fusion protein of the disclosure comprising a regulation domain operably-linked to a dimerization domain.

[0032] The disclosure provides a composition comprising: (a) a first fusion protein of the disclosure comprising a DNA binding domain operably-linked to a dimerization domain, wherein the DNA binding domain specifically binds to a response element; and (b) a second fusion protein of the disclosure comprising a regulation domain operably-linked to a dimerization domain, wherein the regulation domain is capable of modulating a transcriptional activity or an epigenetic activity of one or more target sequences.

[0033] In some embodiments of the compositions of the disclosure, including those comprising a first fusion protein and a second fusion protein, the composition further comprises a small molecule, wherein the dimerization domain of the first fusion protein and the dimerization domain of the second fusion protein are capable of forming a complex in the presence of the small molecule.

[0034] In some embodiments of the compositions of the disclosure, including those comprising a first fusion protein and a second fusion protein, the composition further comprises a target composition, wherein the target composition comprises a nucleic acid sequence comprising a promoter and one or more target sequences, wherein the promoter is capable of driving expression of the one or more target sequences. In some embodiments, the target composition comprises a nucleic acid sequence further comprising a response element capable of binding the DNA binding domain of the first fusion protein. In some embodiments, the response element comprises two or more response elements. In some embodiments, the response element comprises at least 2, 3, 4, 5, 6, 7, 8, 9, or 10 repeats of a sequence of the response element. In some embodiments, the response element comprises one or more of 5×Gal4RE (SEQ ID NO: 84), 6×ZFIRE (SEQ ID NO: 85), 6×ZF2RE (SEQ ID NO: 86), 6×ZF3v1RE (SEQ ID NO: 87), 6×ZF3vRE (SEQ ID NO: 88), 12×ZF3veRE (SEQ ID NO: 89), and 12×ZFHIV2RE (SEQ ID NO: 90).

[0035] In some embodiments of the compositions of the disclosure, including those comprising a first fusion protein and a second fusion protein, either the first fusion protein or the second fusion protein comprises a dimerization domain comprising a DNCR sequence of the disclosure.

[0036] In some embodiments of the compositions of the disclosure, including those comprising a first fusion protein and a second fusion protein, either the first fusion protein or the second fusion protein comprises a dimerization domain comprising a GNCR sequence of the disclosure.

[0037] In some embodiments of the compositions of the disclosure, including those comprising a first fusion protein and a second fusion protein, either the first fusion protein or the second fusion protein comprises a dimerization domain comprising a NS3a sequence of the disclosure.

[0038] In some embodiments of the compositions of the disclosure, including those comprising a first fusion protein and a second fusion protein, (a) the first fusion protein comprises a dimerization domain comprising an NS3a sequence and the second fusion protein comprises a dimerization domain comprising a DNCR sequence; or (b) the second fusion protein comprises a dimerization domain comprising an NS3a sequence and the first fusion protein comprises a dimerization domain comprising a DNCR sequence. In some embodiments, the small molecule comprises danoprevir.

[0039] In some embodiments of the compositions of the disclosure, including those comprising a first fusion protein and a second fusion protein, the small molecule comprises danoprevir.

[0040] In some embodiments of the compositions of the disclosure, including those comprising a first fusion protein and a second fusion protein, (a) the first fusion protein comprises a dimerization domain comprising an NS3a sequence and the second fusion protein comprises a dimerization domain comprising a GNCR sequence; or (b) the second fusion protein comprises a dimerization domain comprising an NS3a sequence and the first fusion protein comprises a dimerization domain comprising a GNCR sequence. In some embodiments, the small molecule comprises grazoprevir.

[0041] In some embodiments of the compositions of the disclosure, including those comprising a first fusion protein and a second fusion protein, the small molecule comprises grazoprevir.

[0042] In some embodiments of the compositions of the disclosure, including those comprising a first fusion protein and a second fusion protein, the one or more target sequences comprise(s) a sequence isolated or derived from a sequence encoding a gene of Table A. In some embodiments, the one or more target sequences comprises a sequence isolated or derived from a sequence encoding a protein provided in Table A or a sequence at least 50%, 55%, 60%, 65%, 70%, 75%, 80%, 85%, 90%, 95%, 97%, 99% or a sequence having at least any percentage of identity in between.

[0043] In some embodiments of the nucleic acids of the disclosure, the nucleic acid further comprises an Internal Ribosome Entry Sequence (IRES). In some embodiments, the IRES comprises the sequence of SEQ ID NO: 163.

[0044] In some embodiments of the nucleic acids of the disclosure, the nucleic acid further comprises one or more of a promoter, an enhancer, an intron, an exon, an untranslated region (UTR), and a posttranslational regulatory element (PRE). In some embodiments, the promoter comprises an inducible promoter. In some embodiments, the inducible promoter comprises a sequence isolated or derived from a YB_TATA promoter (SEQ ID NO: 77), human beta globin promoter (huBG) (SEQ ID NO: 78), minIL2 promoter (SEQ ID NO: 79), minimalCMV (minCMV) promoter (SEQ ID NO: 80), and TRE3G promoter (SEQ ID NO: 81). In some embodiments, the promoter comprises a constitutive promoter. In some embodiments, the constitutive promoter comprises a sequence isolated or derived from a MND promoter (SEQ ID NO: 82), a hPGK promoter (SEQ ID NO: 83), a CMV promoter(SEQ ID NO: 137), a CAG promoter(SEQ ID NO: 138), a SFFV promoter (SEQ ID NO: 139), an EF1alpha promoter (SEQ ID NO: 140), a UBC promoter(SEQ ID NO: 141), and a CD43 promoter (SEQ ID NO: 142).

[0045] The disclosure provides a vector comprising a nucleic acid of the disclosure. In some embodiments, the vector comprises a nucleic acid sequence of the disclosure, optionally, wherein the nucleic acid sequence encodes a fusion protein of the disclosure comprising a DNA binding domain operably-linked to a dimerization domain. In some embodiments, the vector comprises a nucleic acid sequence of the disclosure, optionally, wherein the nucleic acid sequence encodes a fusion protein of the disclosure comprising a regulation domain operably-linked to a dimerization domain, wherein the regulation domain is capable of modulating a transcriptional activity or an epigenetic activity of one or more target sequences. In some embodiments, the vector comprises (a) a nucleic acid sequence of the disclosure encoding a fusion protein of the disclosure comprising a DNA binding domain operably-linked to a dimerization domain and (b) a nucleic acid sequence of the disclosure encoding a regulation domain operably-linked to a dimerization domain, wherein the regulation domain is capable of modulating a transcriptional activity or an epigenetic activity of one or more target sequences.

[0046] In some embodiments of the vectors of the disclosure, the vector comprises an expression vector capable of driving expression of the nucleic acid in a mammalian cell. In some embodiments, the expression vector comprises a plasmid.

[0047] In some embodiments of the vectors of the disclosure, the vector comprises a delivery vector capable of introducing the nucleic acid to a mammalian cell. In some embodiments, the delivery vector comprises one or more of a plasmid, viral vector, a non-viral vector, a liposome, a micelle, a polymersome, and a nanoparticle. In some embodiments, the viral vector comprises one or more sequences isolated or derived from a viral genome. In some embodiments, the viral vector is replication-deficient.

[0048] The disclosure provides a cell comprising a fusion protein of the disclosure, a nucleic acid of the disclosure or a vector of the disclosure. In some embodiments, the cell is a mammalian cell. In some embodiments, the cell is a human cell. In some embodiments, the cell is a somatic cell. In some embodiments, the cell is a stem cell. In some embodiments, the cell is not a human embryonic stem cell. In some embodiments, the cell is an immune cell. In some embodiments, the immune cell is a Hematopoietic Stem Cell (HSC), a Myeloid Progenitor cell or a Lymphoid Progenitor cell. In some embodiments, the Myeloid Progenitor cell is a mast cell, a myeloblast, an erythrocyte or a platelet. In some embodiments, the Lymphoid Progenitor cell is a lymphocyte. In some embodiments, the lymphocyte is a Natural Killer (NK) cell, a B lymphocyte (B cell), or a T lymphocyte (T cell). In some embodiments, the B cell is a naive B cell or memory B cell. In some embodiments, the T cell is a gamma delta T cell (γδT-cell) a MAIT T-cell, a memory CD4 T-cell, a memory CD8 T-cell, a naive CD4 T-cell, a naive CD8 T-cell or a regulatory T cell (T-reg). In some embodiments, the cell is ex vivo or in vitro. In some embodiments, the cell is in vivo.

[0049] The disclosure provides a composition comprising a cell of the disclosure, a fusion protein of the disclosure, a nucleic acid of the disclosure or a vector of the disclosure.

[0050] The disclosure provides a pharmaceutical composition comprising a composition of the disclosure and a pharmaceutically-acceptable carrier.

[0051] The disclosure provides a use of a fusion protein of the disclosure, a nucleic acid of the disclosure, a vector of the disclosure, a cell of the disclosure, a composition of the disclosure, or the pharmaceutical composition of the disclosure in the manufacture of a medicament for the treatment of a disease or disorder.

[0052] A use of a fusion protein of the disclosure, a nucleic acid of the disclosure, a vector of the disclosure, a cell of the disclosure, a composition of the disclosure, or the pharmaceutical composition of the disclosure for the treatment of a disease or disorder.

[0053] In some embodiments of the uses of the disclosure, the disease or disorder comprises one or more of an autoimmune disease or disorder; an inflammatory disease or disorder; an immunodeficiency disease or disorder; an ischemic disease or disorder; a blood disease or disorder; a bone disease or disorder; a neurological disease or disorder; a cardiac disease or disorder; a vascular disease or disorder; a metabolic disease or disorder; a dermatological disease or disorder; a digestive disease or disorder; a mitochondrial disease or disorder; a muscle disease or disorder; a liver disease or disorder; a kidney disease or disorder; a hearing disease or disorder; an ophthalmic disease or disorder; and a proliferative disease or disorder.

[0054] In some embodiments of the uses of the disclosure, the disease or disorder comprises a cancer. In some embodiments of the uses of the disclosure, the cancer comprises one or more of Acute Lymphocytic Leukemia (ALL) in Adults, Acute Myeloid Leukemia (AML) in Adults, Adrenal Cancer, Anal Cancer, Basal and Squamous Cell Skin Cancer, Bile Duct Cancer, Bladder Cancer, Bone Cancer, Brain and Spinal Cord Tumors in Adults, Brain and Spinal Cord Tumors in Children, Breast Cancer, Breast Cancer in Men, Cancer in Adolescents. Cancer in Children, Cancer in Young Adults, Cancer of Unknown Primary, Cervical Cancer, Chronic Lymphocytic Leukemia (CLL), Chronic Myeloid Leukemia (CML), Chronic Myelomonocytic Leukemia (CMML), Colorectal Cancer, Endometrial Cancer, Esophagus Cancer, Ewing Family of Tumors, Eye Cancer (Ocular Melanoma), Gallbladder Cancer, Gastrointestinal Neuroendocrine (Carcinoid) Tumors, Gastrointestinal Stromal Tumor (GIST), Head and Neck Cancers, Hodgkin Lymphoma, Kaposi Sarcoma, Kidney Cancer, Laryngeal and Hypopharyngeal Cancer, Leukemia, Leukemia in Children, Liver Cancer, Lung Cancer, Lung Carcinoid Tumor, Lymphoma, Lymphoma of the Skin, Malignant Mesothelioma, Melanoma Skin Cancer, Merkel Cell Skin Cancer, Multiple Myeloma, Myelodysplastic Syndromes, Nasal Cavity and Paranasal Sinuses Cancer, Nasopharyngeal Cancer, Neuroblastoma, Non-Hodgkin Lymphoma, Non-Hodgkin Lymphoma in Children, Oral Cavity (Mouth) and Oropharyngeal (Throat) Cancer, Osteosarcoma, Ovarian Cancer, Pancreatic Cancer, Pancreatic Neuroendocrine Tumor (NET), Penile Cancer, Pituitary Tumors, Prostate Cancer, Retinoblastoma, Rhabdomyosarcoma, Salivary Gland Cancer, Skin Cancer, Small Intestine Cancer, Soft Tissue Sarcoma, Stomach Cancer, Testicular Cancer, Thymus Cancer, Thyroid Cancer, Uterine Sarcoma, Vaginal Cancer, Vulvar Cancer, Waldenstrom Macroglobulinemia and Wilms Tumor. In some embodiments of the uses of the disclosure, the disease or disorder is cancer and the one or more target genes comprises one or more of a gene provided in Table 4.

[0055] In some embodiments of the uses of the disclosure, the disease or disorder comprises an infection or a disease or disorder caused by the infectious disease.

[0056] In some embodiments of the uses of the disclosure, the disease or disorder comprises a genetic disease or disorder.

[0057] In some embodiments, administering to a subject an effective amount of a fusion protein, nucleic acid, vector or cell, composition or pharmaceutical composition results in the severity of a sign or symptom of the disease or disorder being decreased, thereby treating the disease or disorder.

[0058] In some embodiments, administering to a subject an effective amount of a fusion protein, nucleic acid, vector or cell, composition or pharmaceutical composition results in onset or a relapse of a sign or symptom of the disease or disorder being delayed or inhibited, thereby preventing the disease or disorder.

[0059] The disease or disorder may, for example, include one or more of an autoimmune disease or disorder; an inflammatory disease or disorder; an immunodeficiency disease or disorder; an ischemic disease or disorder; a blood disease or disorder; a bone disease or disorder; a neurological disease or disorder; a cardiac disease or disorder; a vascular disease or disorder; a metabolic disease or disorder; a dermatological disease or disorder; a digestive disease or disorder; a mitochondrial disease or disorder; a muscle disease or disorder; a liver disease or disorder; a kidney disease or disorder; a hearing disease or disorder; an ophthalmic disease or disorder; and a proliferative disease or disorder.

[0060] The disease or disorder may, for example, include a cancer.

[0061] The disease or disorder may, for example, include an infection or a disease or disorder caused by the infectious disease.

[0062] The disease or disorder may, for example, include a genetic disease or disorder.

[0063] The disclosure provides a polynucleotide set comprising: (a) a first polynucleotide comprising: (i) a promoter sequence operatively linked to one or more genes of interest; or (ii) an inducible promoter sequence operatively linked to one or more genes of interest; and (b) a second polynucleotide comprising: (i) a polynucleotide encoding a first fusion protein comprising a first dimerization polypeptide linked to a DNA binding domain specific for the promoter sequence of one or more genes of interest; and (ii) a polynucleotide encoding a second fusion protein comprising a transcriptional or epigenetic regulation domain linked to a second dimerization polypeptide; and wherein the first and second dimerization polypeptides are selected so that interaction of the first and second dimerization polypeptides is mediated by the presence of a small molecule. In some embodiments, the first polynucleotide comprises a promoter sequence operatively linked to one or more genes of interest. In some embodiments, the first polynucleotide comprises an inducible promoter sequence operatively linked to one or more genes of interest. In some embodiments, the second polynucleotide is operatively linked to a polynucleotide component encoding at least one promoter sequence. In some embodiments, the second polynucleotide is operatively linked to a polynucleotide component encoding at least one constitutive promoter sequence. In some embodiments, the first or second dimerization polypeptide comprises NS3a. In some embodiments, the first or second dimerization polypeptide is selected from the group consisting of DNCR2 and GNCR1. In some embodiments, the first or second dimerization polypeptide comprises NS3a; and the other of the first or second dimerization polypeptide is selected from the group consisting of DNCR2 and GNCR1. In some embodiments, the first or second dimerization polypeptide is selected from the group consisting of: DNCR2_1 through DNCR2_34, DNCR2-3rep, GNCR1-3rep, G33, and G38.

[0064] In some embodiments of the polynucleotide sets of the disclosure, expression of the one or more genes of interest in a cell is titratable relative to administration of the small molecule to the cell. In some embodiments, the cell comprises a prokaryotic cell. In some embodiments, the cell comprises a yeast cell. In some embodiments, the cell comprises a mammalian cell. In some embodiments, the cell comprises a human cell. In some embodiments, the cell comprises a human cell in vivo. In some embodiments, the cell comprises a human cell ex vivo. In some embodiments, the small molecule mediates binding of the first and second dimerization polypeptides. In some embodiments, the small molecule disrupts binding of the first and second dimerization polypeptides. In some embodiments, the small molecule is selected from the group consisting of: danoprevir and grazoprevir and their analogs. In some embodiments, a second small molecule disrupts binding of the first and second dimerization polypeptides by out-competing the first small molecule.

[0065] In some embodiments of polynucleotide sets the disclosure, a vector comprises the first polynucleotide and the second polynucleotide.

[0066] In some embodiments of polynucleotide sets the disclosure, a first vector comprises the first polynucleotide and a second vector comprises the second polynucleotide. In some embodiments, the first vector lacks a constitutive promoter. In some embodiments, the first vector lacks a transduction marker. In some embodiments, the vector is selected from the group consisting of adenoviral vectors, lentiviral vectors, baculoviral vectors, Epstein Barr viral vectors, papovaviral vectors, vaccinia viral vectors, herpes simplex viral vectors, adeno associated virus (AAV) vectors, and transposon vectors. In some embodiments, the vector comprises a homology directed repair vector.

[0067] In some embodiments of the disclosure, a chromosome comprises the first polynucleotide or the second polynucleotide.

[0068] In some embodiments of the polynucleotide sets of the disclosure, the polynucleotide encoding a first fusion protein and the polynucleotide encoding the second fusion protein are separated by a separation element comprising a polynucleotide sequence that prevents fusion of the first fusion protein and the second fusion protein. In some embodiments, the separation element comprises a polynucleotide sequence comprising a ribosomal skipping sequence. In some embodiments, the separation element comprises a polynucleotide sequence comprising at least two ribosomal skipping sequences. In some embodiments, the separation element comprises a polynucleotide sequence comprising P2a and/or T2a. In some embodiments, the separation element comprises a polynucleotide sequence selected from the group consisting of: P2a, T2a, T2a-RFP-P2a, P2a-T2a, T2a-P2a, and IRES. In some embodiments, the separation element comprises a polynucleotide sequence comprising a second constitutive promoter.

[0069] In some embodiments of the polynucleotide sets of the disclosure, the constitutive promoter sequence is selected from the group consisting of: MND, hPGK, CMV, CAG, SFFV, EF1alpha, UBC, and CD43. In some embodiments, the constitutive promoter sequence comprises an hPGK promoter.

[0070] In some embodiments of the polynucleotide sets of the disclosure, the transcriptional activation domain is selected from the group consisting of: KRAB, MeCP2, p65, p65mini, p65mini-HSF1, VP16, VP64, VP64-RTAmini, VPR, and VPRmini.

[0071] In some embodiments of the polynucleotide sets of the disclosure, the DNA binding domain is selected from the group consisting of: dCas12a, dCas9, dCasPhi, Gal4, TALEs, ZF1, ZF2, ZF3, ZFHD1, and ZFHIV2.

[0072] In some embodiments of the polynucleotide sets of the disclosure, the inducible polynucleotide component comprises a transcription factor-specific recognition sequence comprising a transcription factor-specific response element. In some embodiments, the transcription factor response element comprises a polynucleotide selected from the group consisting of: 5×Gal4, 6×RE for ZF1, ZF2, ZF3v1, ZF3v2, ZFHIV2, 12×RE for ZF3v3, and ZFHIV2, and repeats or combinations of any of the foregoing. In some embodiments, the transcription factor response element is repeated. In some embodiments, the transcription factor response element is repeated 2, 3, 4, 5, 6, 7, 8, 9, 10, or more times.

[0073] The disclosure provides a cell comprising the polynucleotide set of the disclosure. In some embodiments, the cell is a prokaryotic cell. In some embodiments, the cell is a yeast cell. In some embodiments, the cell is a mammalian cell. In some embodiments, the cell is a human cell. In some embodiments, the cell is a human cell in vivo. In some embodiments, the cell is a human cell ex vivo. In some embodiments, the cell is a stem cell. In some embodiments, the cell is a pluripotent stem cell. In some embodiments, the cell is a multipotent stem cell. In some embodiments, the cell is a hematopoietic stem cell. In some embodiments, the cell is a mesenchymal stromal cell. In some embodiments, the cell is a mesenchymal cell. In some embodiments, the cell is an autologous cell selected for a cell therapy or is the progeny of an autologous cell selected for a cell therapy. In some embodiments, the cell is an allogeneic cell selected for a cell therapy or is the progeny of an allogeneic cell selected for a cell therapy.

[0074] The disclosure provides a method of effecting stem cell differentiation comprising modifying a stem cell using a polypeptide set of the polynucleotide set of the disclosure. In some embodiments, the cell is a cancer cell. In some embodiments, the cell is a non-cancer cell from a human subject diagnosed with cancer. In some embodiments, the cell is an immune cell. In some embodiments, the cell is selected from the group consisting of: leukocyte, lymphocyte, T cell, regulatory T cell, effector T cell, CD4+ effector T cell, CD8+ effector T cell, memory T cell, autoreactive T cell, exhausted T cell, natural killer T cell, B cell, dendritic cell, and macrophage. In some embodiments, the cell is selected from the group consisting of: cardiac cell, lung cell, muscle cell, epithelial cell, pancreatic cell, skin cell, CNS cell, neuron, myocyte, skeletal muscle cell, smooth muscle cell, liver cell, kidney cell and glial cell.

[0075] The disclosure provides a cell genetically modified to express a CAR, comprising the polynucleotide set of the disclosure. In some embodiments, the cell is a T cell, a natural killer (NK) cell, a natural killer T (NKT) cell, or an ILC cell.

[0076] The disclosure provides a producer cell line wherein cells of the cell line comprise the polynucleotide set of the disclosure.

[0077] The disclosure provides a method of producing a polypeptide product of interest from a gene of interest, the method comprising: modifying a cell line using the polynucleotide set of the disclosure to yield a producer cell line; and culturing the producer cell line to produce the product of interest. In some embodiments, the polypeptide product of interest comprises a therapeutic protein or peptide.

[0078] The disclosure provides a producer cell line wherein cells of the cell line produce the polynucleotide set of the disclosure packaged in a viral capsid. The disclosure provides a viral capsid comprising the polynucleotide set of the disclosure. The disclosure provides a cell producing the viral capsid of the disclosure. In some embodiments of the disclosure, the viral capsid is selected from capsids of an adenovirus, lentivirus, baculovirus, Epstein Barr virus, papovavirus, vaccinia virus, herpes virus, herpes simplex virus, and adeno-associated virus.

[0079] The disclosure provides a composition comprising the polynucleotide set the disclosure.

[0080] The disclosure provides a composition of the disclosure for use in treating a subject in need of a CAR therapy.

[0081] The disclosure provides a kit comprising the polynucleotide set of the disclosure.

[0082] The disclosure provides a method of making an engineered cell, the method comprising introducing the polynucleotide of any the polynucleotide set of the disclosure into a cell. In some embodiments, the polypeptide is expressed in the cell. In some embodiments, the method further comprises administering the cell in a subject in need thereof. In some embodiments, the method further comprises administering the small molecule to the subject.

[0083] The disclosure provides a method of controlling a T cell-mediated immune response in a subject in need thereof comprising administering to the subject an effective amount of the cell of the disclosure.

[0084] The disclosure provides a method of stimulating a T cell-mediated immune response to a target cell population or tissue in a subject, comprising administering to the subject an effective amount of the cell of the disclosure.

[0085] The disclosure provides a method of providing an anti-tumor immunity in a subject in need thereof, the method comprising administering to the subject an effective amount of the cell of the disclosure.

[0086] The disclosure provides a method of treating cancer in a subject in need thereof comprising administering to the subject an effective amount of the cell of the disclosure. In some embodiments, the cell is a T cell. In some embodiments, the cell is an autologous T cell. In some embodiments, the cell is allogeneic. In some embodiments, the method further comprises administering to the subject the small molecule.

[0087] The disclosure provides a gene therapy method, wherein: a first polynucleotide comprises an inducible promoter sequence operatively linked to one or more genes of interest; and the one or more genes of interest comprise a therapeutic polypeptide; the method comprising administering to a subject in need thereof a therapeutically effective amount of the polynucleotide set of the disclosure. In some embodiments, the method further comprises administering to the subject the small molecule. In some embodiments, the method further comprises adjusting dosage of the small molecule to adjust production of the therapeutic polypeptide in the subject. In some embodiments, the method further comprises monitoring production of the therapeutic polypeptide in the subject; and adjusting dosage of the small molecule to adjust production of the therapeutic polypeptide in the subject to a desired level. In some embodiments, the subject has a condition selected from the group consisting of: cancer, cystic fibrosis, heart disease, diabetes, hemophilia and AIDS.

[0088] The disclosure provides a use of the polynucleotide set of the disclosure for the manufacture of a medicament for treating cancer in a subject in need thereof.

### BRIEF DESCRIPTION OF DRAWINGS

[0089] FIG. 1 is a schematic diagram depicting an exemplary small molecule-regulated gene expression system of the disclosure in operation.

[0090] FIG. 2 is a series of schematic diagrams depicting examples of a unidirectional forward, unidirectional reverse, and bidirectional head-to-toe configurations for encoding an inducible polynucleotide component and a constitutive polynucleotide component on a single vector.

[0091] FIG. 3 is a schematic diagram depicting an exemplary small molecule-regulated gene expression system that includes a first vector that includes an inducible polynucleotide component for expression of a gene of interest and a second vector that includes a constitutive polynucleotide component for expression of a split transcription factor;

[0092] FIG. 4 is a series of schematic diagrams depicting exemplary all-in-one vectors in lentiviral backbones in unidirectional forward, unidirectional reverse, and bidirectional head-to-head orientations.

[0093] FIG. 5A is a plot showing transduction results for the three vector orientations of FIG. 4 using different volumes of 10× concentrated lentivirus in Jurkat cells.

[0094] FIG. 5B is a plot showing titration of danoprevir on Jurkat cells expressing the unidirectional forward or bidirectional vectors of FIG. 4.

[0095] FIG. 6 is a schematic diagram depicting an exemplary two-vector system with the constitutive transcription factor component and inducible promoter component on separate lentiviral vectors.

[0096] FIG. 7A is a plot showing GFP intensity in transduction positive Jurkat cells in response to increasing concentrations of danoprevir.

[0097] FIG. 7B is a plot showing median GFP intensity in primary CD4+ T cells.

[0098] FIG. 8A is a panel of histogram plots showing EGFP expressed from untransduced Jurkat cells or Jurkat cells co-transduced with the transcription factor vector TFV1 and one of the inducible promoter vectors (IPV2-IPV6) exposed to 500 nM danoprevir.

[0099] FIG. 8B is a pair of plots showing maximal EGFP mean fluorescence intensity data (gMFI) and fold induction, respectively, for induction GFP expression in response to 500 nM danoprevir in Jurkat cells co-transduced with the transcription factor vector TFV1 and one of the inducible promoter vectors (IPV2-IPV6).

[0100] FIG. 8C is a pair of plots showing EGFP expression levels in response to titration of danoprevir on the weakest minimal promoter, YB_TATA (i.e., IPV3).

[0101] FIG. 8D is a pair of plots showing EGFP expression levels in response of the strongest minimal promoters minCMV (IPV2), huBG (IPV5), TRE3G (IPV6) to danoprevir titration and EGFP levels for huBG, respectively.

[0102] FIG. 9A is a schematic diagram depicting an exemplary inducible promoter vector (IPV5) showing the constitutive promoter MND driving the expression of the transduction marker BFP and the minimal inducible promoter huBG driving expression of EGFP.

[0103] FIG. 9B is a pair of plots showing normalized GFP expression levels in Jurkat cells co-transformed with TFV1 and either IPV5 or IPV7, which utilize the MND and hPCK promoters, respectively.

[0104] FIG. 9C is a pair of plots showing EGFP expression levels in response to titration of danoprevir on the hPGK vector (i.e., IPV7) in Jurkat cells co-transduced with TFV1.

[0105] FIG. 10 is a series of histogram plots showing GFP levels in cells co-transduced with IPV1 and either TFV1, TFV2, or TFV3, respectively, and exposed to danoprevir or DMSO.

[0106] FIG. 11 is a plot showing GFP expression (gMFI) for the four zinc finger (ZF) DBD-NS3a fusion proteins and the four DNCR2-TAD fusion proteins in response to treatment with 500 nM danoprevir.

[0107] FIG. 12A is a plot showing GFP expression (gMFI) induced by DNCR2-VPRmini on inducible promoters includes 6×RE or 12×RE for ZFHIV2.

[0108] FIG. 12B is a plot showing GFP expression (gMFI) induced by DNCR2-VPRmini on inducible promoters includes 6×RE or 12×RE for ZF3.

[0109] FIG. 13A is a schematic diagram showing the crystal structure of DNCR2/danoprevir/NS3a and models of D-1, D-9, and D-20 designs.

[0110] FIG. 13B is a plot showing the median NS3a binding intensity (PE) for titration of NS3a/danoprevir binding to the four DNCR2 variants displayed on yeast.

[0111] FIG. 14A is a series of schematic diagrams showing exemplary models of GNCR1 (with G-3rep truncation indicated), G-33, and G-38.

[0112] FIG. 14B is a pair of plots depicting a titration of NS3a/grazoprevir binding the GNCR1 (left) and a titration of NS3a/grazoprevir on G-3rep, G-33, and G-38 displayed on yeast (right).

[0113] FIG. 15 is a schematic diagram depicting an exemplary modified two-vector system with transduction markers removed from the constitutive transcription factor and inducible promoter lentiviral vectors.

[0114] FIG. 16 is a panel of histogram plots showing GFP levels in Jurkat and HEK293 cells co-transduced with IPV16 and either TFV1 or TFV21.

[0115] FIG. 17 is a panel of histogram plots showing EGFP expression in HEK293 cells transduced with the normal IPV16 and TFV1 vectors or with vectors expressing elements designed to reduce EGFP output.

[0116] FIG. 18 is a panel of plots showing a comparison of EGFP background levels and titratable EGFP expression from the normal IPV16/TFV1 combination and IPV16 with the transcription factor vector TFV23 expressing ANR-SPOP.

### DETAILED DESCRIPTION

### Nucleic Acids

[0117] In some embodiments of the disclosure, the terms “Nucleic acid,” “nucleic acid molecule,” “nucleotide,” “nucleotide sequence,” “polynucleotide,” and grammatical variants thereof are used interchangeably and refer to the phosphate ester polymeric form of ribonucleosides (adenosine, guanosine, uridine or cytidine; “RNA molecules”) or deoxyribonucleosides (deoxyadenosine, deoxyguanosine, deoxythymidine, or deoxycytidine; “DNA molecules”), or any phosphoester analogs thereof, such as phosphorothioates and thioesters, in either single stranded form, or a double-stranded helix. Single stranded nucleic acid sequences refer to single-stranded DNA (ssDNA) or single-stranded RNA (ssRNA). Double stranded DNA-DNA, DNA-RNA and RNA-RNA helices are possible.

[0118] In some embodiments of the disclosure, “Nucleic acid,” and in particular a DNA or RNA molecule, refers only to the primary and secondary structure of the molecule, and does not limit it to any particular tertiary forms. In some embodiments of the disclosure, “Nucleic acid,” includes double-stranded DNA found, inter alia, in linear or circular DNA molecules (e.g., restriction fragments), plasmids, supercoiled DNA and chromosomes. In discussing the structure of particular double-stranded DNA molecules, sequences are provided according to the normal convention of writing the sequence left to right in the 5′ to 3′ direction along the non-transcribed strand of DNA (i.e., the strand having a sequence homologous to the messenger RNA or mRNA). Unless otherwise indicated, all nucleic acid and nucleotide sequences are written left to right in 5′ to 3′ orientation.

[0119] Nucleotides are referred to by their commonly known one-letter symbols recommended by the IUPAC-IUB Biochemical Nomenclature Commission. Accordingly, ‘A’ represents adenine, ‘C’ represents cytosine, ‘G’ represents guanine, ‘T’ represents thymine, and ‘U’ represents uracil.

[0120] In some embodiments of the disclosure, the term “polynucleotide” refers to polymers of nucleotides of any length or type, including ribonucleotides, deoxyribonucleotides, analogs thereof, or mixtures thereof. This term refers to the primary structure of the molecule. Thus, the term includes triple-, double- and single-stranded deoxyribonucleic acid (“DNA”) and ribonucleic acid (“RNA”). It also includes modified, for example by alkylation and/or by capping, and unmodified forms of the polynucleotide. More particularly, “polynucleotide” includes polydeoxyribonucleotides (containing 2-deoxy-D-ribose) and polyribonucleotides (containing D-ribose), including mRNA, whether spliced or unspliced, any other type of polynucleotide which is an N- or C-glycoside of a purine or pyrimidine base, and other polymers containing nucleotide backbones, for example, polyamide (e.g., peptide nucleic acids “PNAs”) and polymorpholino polymers, and other synthetic sequence-specific nucleic acid polymers providing that the polymers contain nucleobases in a configuration which allows for base pairing and base stacking, such as is found in DNA and RNA.

[0121] In some embodiments of the disclosure, a polynucleotide comprises a DNA sequence. In some embodiments of the disclosure, a polynucleotide comprises a DNA sequence inserted in a vector or a vector comprising a DNAsequence.

[0122] In some embodiments of the disclosure, a polynucleotide comprises an mRNA. In some embodiments, the mRNA is a synthetic mRNA or the mRNA comprises a synthetic nucleotide.

[0123] In some embodiments of the disclosure, a polynucleotide comprises at least one unnatural, non-naturally occurring or modified nucleic acid. In some embodiments, the polynucleotide comprises a plurality of unnatural, non-naturally occurring or modified nucleic acids. In some embodiments, all nucleic acids of a certain class are unnatural, non-naturally occurring or modified nucleic acids (e.g., all uridines in a polynucleotide can be replaced with an unnatural nucleobase, e.g., 5-methoxy uridine).

[0124] In some embodiments of the disclosure, “expression” refers to the transcription and/or translation of a particular nucleotide sequence driven by a promoter.

[0125] In some embodiments of the disclosure, “expression vector” refers to a plasmid, virus, or other nucleic acid designed for polypeptide expression in a cell. The vector or construct is used to introduce a gene into a host cell whereby the vector will interact with polymerases in the cell to express the protein encoded in the vector/construct. The expression vector may exist in the cell extrachromosomally or may be integrated into the chromosome. Expression vectors may include additional sequences which render the vector suitable for replication and integration in prokaryotes, eukaryotes, or preferably both (e.g., shuttle vectors). The polynucleotides of the disclosure may be provided as components of expression vectors.

[0126] In some embodiments of the disclosure, “cloning vector” refers to a plasmid, virus, or other nucleic acid designed for producing copies of a polynucleotide. Cloning vectors may contain transcription and translation initiation sequences, transcription and translation termination sequences and a polyadenylation signal. Such constructs will typically include a 5′ LTR, a tRNA binding site, a packaging signal, an origin of second-strand DNA synthesis, and a 3′ LTR or a portion thereof. The polynucleotides of the disclosure may be provided as components of cloning vectors, which may be used to produce the polynucleotides of the disclosure.

[0127] In some embodiments of the disclosure, “promoter” refers to a nucleotide sequence which indicates where transcription of a gene is initiated and in which direction transcription will continue.

[0128] In some embodiments of the disclosure, “encoding” or the like refers to the capacity of specific sequences of nucleotides in a polynucleotide (e.g. a gene, cDNA, or mRNA) to serve as templates for synthesis of other polymers and macromolecules in biological processes having either a defined sequence of nucleotides (e.g., rRNA, tRNA and mRNA) or a defined sequence of amino acids. Thus, a gene, cDNA, or RNA, encodes a protein if transcription and translation of mRNA corresponding to that gene produces the protein in a cell or other biological system. Both the coding strand, the nucleotide sequence of which is identical to the mRNA sequence and is usually provided in sequence listings, and the non-coding strand, used as the template for transcription of a gene or cDNA, can be referred to as encoding the protein or other product of that gene or cDNA.

[0129] Unless otherwise specified, a nucleotide sequence “encoding an amino acid sequence,” e.g., a polynucleotide “encoding” a chimeric polypeptide, defined below of the present disclosure, includes all nucleotide sequences that are degenerate versions of each other and that encode the same amino acid sequence.

### Polypeptides

[0130] Amino acids are referred to by either their commonly known three letter symbols or by the one-letter symbols recommended by the IUPAC-IUB Biochemical Nomenclature Commission. The amino acid residues are abbreviated as follows, where the abbreviations are shown in parentheses: alanine (Ala; A), asparagine (Asn; N), aspartic acid (Asp; D), arginine (Arg; R), cysteine (Cys; C), glutamic acid (Glu; E), glutamine (Gln; Q), glycine (Gly; G), histidine (His; H), isoleucine (Ile; I), leucine (Leu; L), lysine (Lys; K), methionine (Met; M), phenylalanine (Phe; F), proline (Pro; P), serine (Ser; S), threonine (Thr; T), tryptophan (Trp; W), tyrosine (Tyr; Y), and valine (Val; V).

[0131] Amino acid sequences are written left to right in amino to carboxy orientation.

[0132] In some embodiments of the disclosure, “Polypeptide” may refer to a sequence of amino acid subunits. In some embodiments, a “peptide” can be less than or equal to 50 amino acids long, e.g., about 5, 10, 15, 20, 25, 30, 35, 40, 45, or 50 amino acids long. “Polypeptide,” refers to proteins, polypeptides, and peptides of any length, size, structure, or function. “Polypeptide,” “peptide,” and “protein” are used interchangeably to refer to polymers of amino acids of any length.

[0133] Polypeptides of the disclosure may comprise naturally or synthetically created or modified amino acids, for example, disulfide bond formation, glycosylation, lipidation, acetylation, phosphorylation, or any other manipulation or modification, such as conjugation with a labeling component. Also included within the definition are, for example, polypeptides in which one or more amino acid residues are artificial chemical analogs of a corresponding naturally occurring amino acid (including, for example, synthetic amino acids such as homocysteine, ornithine, p-acetylphenylalanine, D-amino acids, and creatine), as well as other modifications known in the art. Polypeptides also include gene products, homologs, orthologs, paralogs, fragments and other equivalents, variants, and analogs of the foregoing.

[0134] A polypeptide may comprises a single polypeptide or can be a multi-molecular complex such as a dimer, trimer or tetramer. Polypeptides of the disclosure may comprise single-chain or multi-chain polypeptides. Most commonly disulfide linkages are found in multi-chain polypeptides.

[0135] The polypeptides of the disclosure may comprise L-amino acids+glycine, D-amino acids+glycine (which are resistant to L-amino acid-specific proteases in vivo), or a combination of D- and L-amino acids+glycine. Polypeptides described may be chemically synthesized or recombinantly expressed.

[0136] The polypeptides of the disclosure can include additional residues at the N-terminus, C-terminus, internal to the polypeptide, or a combination thereof; these additional residues are not included in determining the percent identity of the polypeptides of the disclosure relative to the reference polypeptide. Such residues may be any residues suitable for an intended use, including but not limited to tags.

[0137] In some embodiments of the disclosure, “tags” include general detectable moieties (e.g., fluorescent proteins, antibody epitope tags, etc.), therapeutic agents, purification tags (His tags, etc.), linkers, ligands suitable for purposes of purification, ligands to drive localization of the polypeptide, and peptide domains that add functionality to the polypeptides, etc.

[0138] In some embodiments of the disclosure, “chimeric polypeptide” may refer to any polypeptide comprised of a first amino acid sequence derived from a first source, bonded, covalently or non-covalently, to a second amino acid sequence derived from a second source, wherein the first and second source are not the same. In some embodiments, a first source and a second source that are not the same can include two different biological entities, or two different proteins from the same biological entity, or a biological entity and a non-biological entity. A chimeric protein can include for example, a protein derived from at least 2 different biological sources. In some embodiments, the chimeric polypeptide may include sequences from similar proteins derived from two distinct species. In some embodiments, the chimeric polypeptide may include sequences from dissimilar proteins derived from the same species. A biological source can include any non-synthetically produced nucleic acid or amino acid sequence (e.g. a genomic or cDNA sequence, a plasmid or viral vector, a native virion or a mutant or analog of any of the above). A synthetic source can include a protein or nucleic acid sequence produced chemically and not by a biological system (e.g. solid phase synthesis of amino acid sequences). A chimeric protein can also include a protein derived from at least 2 different synthetic sources or a protein derived from at least one biological source and at least one synthetic source. A chimeric protein may also comprise a first amino acid sequence derived from a first source, covalently or non-covalently linked to a nucleic acid, derived from any source or a small organic or inorganic molecule derived from any source. The chimeric protein can comprise a linker molecule between the first and second amino acid sequence or between the first amino acid sequence and the nucleic acid, or between the first amino acid sequence and the small organic or inorganic molecule.

[0139] In some embodiments of the disclosure, a “fragment” of a polypeptide, or a “truncated polypeptide” may refers to an amino acid sequence of a polypeptide that is shorter than the sequence of a reference polypeptide (which may be a naturally-occurring sequence). In comparison to the reference polypeptide, the fragment may comprise an N- and/or C-terminal deletion. In comparison to the reference polypeptide, the fragment may comprise a deletion of any part of the sequence, whether or not the deletion is contiguous. A polypeptide in which internal amino acids have been deleted with respect to the naturally occurring sequence is also considered a fragment. The various polypeptide components of the disclosure may be provided as fragments or truncated versions of a reference protein.

[0140] In some embodiments of the disclosure, a “functional fragment” may refer to a polypeptide fragment that retains a function of the polypeptide. In some embodiments, a functional fragment of a bioactive peptide (e.g., an enzyme), retains the ability to catalyze a biological action because the functional fragment comprises a catalytic domain of the enzyme. Polypeptides of the disclosure may be provided as functional fragments or truncated versions.

[0141] In some embodiments of the disclosure, “amino acid substitution” may refer to replacing an amino acid residue present in a parent or reference sequence with another amino acid residue. In some embodiments, the parent or reference sequence comprises a wildtype sequence. An amino acid can be substituted, for example, via chemical peptide synthesis or through recombinant methods known in the art. For example, substituting an amino acid residue with an alternative amino acid residue is conducted by substituting the codon encoding the first amino acid with a codon encoding the second amino acid. Polypeptides of the disclosure may be provided with one or more amino acid substitutions.

[0142] In some embodiments of the disclosure, a “conservative amino acid substitution” is one in which one amino acid residue is replaced with an amino acid residue having a chemically similar side chain. Families of amino acid residues having similar side chains have been defined in the art, including acidic side chains (e.g., aspartic acid, glutamic acid), basic side chains (e.g., lysine, arginine, histidine), uncharged polar side chains (e.g., glycine, asparagine, glutamine, serine, threonine, tyrosine, cysteine), nonpolar side chains (e.g., alanine, valine, leucine, isoleucine, proline, phenylalanine, methionine, tryptophan), beta-branched side chains (e.g., threonine, valine, isoleucine) and aromatic side chains (e.g., tyrosine, phenylalanine, tryptophan, histidine). Thus, if an amino acid in a polypeptide is replaced with another amino acid from the same side chain family, the substitution is considered to be conservative. In some embodiments, a string of amino acids can be conservatively replaced with a chemically similar string that differs in order and/or composition of side chain family members. The various polypeptide components of the disclosure may be provided with conservative amino acid substitutions.

[0143] In some embodiments of the disclosure, non-conservative amino acid substitutions include those in which (i) a residue having an electropositive side chain (e.g., Arg, His or Lys) is substituted for, or by, an electronegative residue (e.g., Glu or Asp), (ii) a hydrophilic residue (e.g., Ser or Thr) is substituted for, or by, a hydrophobic residue (e.g., Ala, Leu, Ile, Phe or Val), (iii) a cysteine or proline is substituted for, or by, any other residue, or (iv) a residue having a bulky hydrophobic or aromatic side chain (e.g., Val, His, Ile or Trp) is substituted for, or by, one having a smaller side chain (e.g., Ala or Ser) or no side chain (e.g., Gly). The various polypeptide components of the disclosure may be provided with non-conservative amino acid substitutions. The likelihood that one of the foregoing non-conservative substitutions can alter functional properties of the protein is also correlated to the position of the substitution with respect to functionally important regions of the protein: some non-conservative substitutions can accordingly have little or no effect on biological properties. The various polypeptide components of the disclosure may be provided with non-conservative amino acid substitutions that do not significantly alter the functionality of the altered components.

[0144] In some embodiments of the disclosure, “transmembrane element” or “transmembrane domain” may refer to the polypeptide element between the extracellular element and the intracellular element. A portion of the transmembrane element exists within the cell membrane. Chimeric antigen receptors (CARs) of the disclosure include transmembrane elements.

[0145] In some embodiments of the disclosure, “intracellular element” or “intracellular domain” may refer to the polypeptide element that resides on the cytoplasmic side of the eukaryotic cell's cytoplasmic membrane, and transmits a signal into the eukaryotic cell. CARs of the disclosure include intracellular elements.

[0146] In some embodiments of the disclosure, “intracellular signaling element” or “intracellular signaling domain” may refer to a portion of the intracellular element which transduces the effector function signal which directs the eukaryotic cell to perform a specialized function.

[0147] In some embodiments of the disclosure, “extracellular element” or “extracellular element” may refer to a polypeptide element that resides outside a eukaryotic cell's cytoplasmic membrane. In a CAR-expressing cell, the extracellular element comprises an antigen binding element of the CAR.

### Sequence Analyses

[0148] In some embodiments of the disclosure, “conserved” may refer to nucleotides of a polynucleotide sequence or amino acid residues of a polypeptide sequence that occur unaltered in the same position of two or more sequences being compared. Nucleotides or amino acids that are relatively conserved are those that are conserved amongst more related sequences than nucleotides or amino acids appearing elsewhere in the sequences. In some embodiments, two or more sequences are said to be “conserved” if they are at least about 30% identical, at least about 35% identical, at least about 40% identical, at least about 45% identical, at least about 50% identical, at least about 55%, at least about 60% identical, at least about 65% identical, at least about 70% identical, at least about 75% identical, at least about 80% identical, at least about 85% identical, at least about 90% identical, at least about 95% identical to one another, at least about 98% identical, or at least about 99% identical to one another. Conservation of sequence may apply to the entire length of a polynucleotide or polypeptide or may apply to a portion, region or feature thereof.

[0149] In some embodiments of the disclosure, two or more sequences may be “completely conserved” or “identical” if they are 100% identical to one another. In some embodiments, two or more sequences are said to be “highly conserved” if they are at least about 70% identical, at least about 75% identical, at least about 80% identical, at least about 85% identical, at least about 90% identical, at least about 95% identical to one another at least about 98% identical, or at least about 99% identical to one another.

[0150] In some embodiments of the disclosure, “identity” refers to the overall monomer conservation between polymeric molecules, e.g., between polypeptide molecules or polynucleotide molecules. “Identical” without any additional qualifiers, e.g., protein A is identical to protein B, implies the sequences are 100% identical (100% sequence identity). Describing two sequences as, e.g., “70% identical,” is equivalent to describing them as having, e.g., “70% sequence identity.”

[0151] When a position in the first sequence is occupied by the same amino acid as the corresponding position in the second sequence, then the molecules are identical at that position. The percent identity between the two sequences is a function of the number of identical positions shared by the sequences, taking into account the number of gaps, and the length of each gap, which needs to be introduced for optimal alignment of the two sequences. The comparison of sequences and determination of percent identity between two sequences can be accomplished using a mathematical algorithm.

[0152] In certain embodiments, the percentage identity (% ID) of a first amino acid (or nucleic acid) sequence to a second amino acid (or nucleic acid) sequence is calculated as % ID=100 (Y/Z), where Y is the number of amino acid (or nucleobase) residues scored as identical matches in the alignment of the first and second sequences (as aligned by visual inspection or a particular sequence alignment program) and Z is the total number of residues in the second sequence. If the length of a first sequence is longer than the second sequence, the percent identity of the first sequence to the second sequence will be higher than the percent identity of the second sequence to the first sequence.

[0153] Calculation of the percent identity of two polypeptide sequences, for example, can be performed by aligning the two sequences for optimal comparison purposes. For example, gaps can be introduced in one or both of a first and a second polypeptide sequences for optimal alignment and non-identical sequences can be disregarded for comparison purposes. In certain embodiments, the length of a sequence aligned for comparison purposes is at least 30%, at least 40%, at least 50%, at least 60%, at least 70%, at least 80%, at least 90%, at least 95%, or 100% of the length of the reference sequence. The amino acids at corresponding amino acid positions are then compared.

[0154] Generation of a sequence alignment for the calculation of a percent sequence identity is not limited to binary sequence-sequence comparisons exclusively driven by primary sequence data. It will also be appreciated that sequence alignments can be generated by integrating sequence data with data from heterogeneous sources such as structural data (e.g., crystallographic protein structures), functional data (e.g., location of mutations), or phylogenetic data. A suitable program that integrates heterogeneous data to generate a multiple sequence alignment is T-Coffee, available at www.tcoffee.org, and alternatively available, e.g., from the European Bioinformatics Institute (EBI) at web site ebi.ac.uk/Tools/psa. It will also be appreciated that the final alignment used to calculate percent sequence identity can be curated either automatically or manually.

[0155] Suitable software programs are available from various sources, and for alignment of both protein and nucleotide sequences. One suitable program to determine percent sequence identity is bl2seq, part of the BLAST suite of program available from the U.S. government's National Center for Biotechnology Information BLAST web site (blast.ncbi.nlm.nih.gov). B12seq performs a comparison between two sequences using either the BLASTN or BLASTP algorithm. BLASTN is used to compare nucleic acid sequences, while BLASTP is used to compare amino acid sequences. Other suitable programs are, e.g., Needle, Stretcher, Water, or Matcher, part of the EMBOSS suite of bioinformatics programs and also available from the EBI. Sequence alignments can be conducted using methods known in the art such as MAFFT, Clustal (ClustalW, Clustal X or Clustal Omega), MUSCLE, etc. Different regions within a single polynucleotide or polypeptide target sequence that aligns with a polynucleotide or polypeptide reference sequence can each have their own percent sequence identity. It is noted that the percent sequence identity value is rounded to the nearest tenth. For example, values from 80.11 to 80.14 are rounded down to 80.1, while values from 80.15 to 80.19 are rounded up to 80.2. It also is noted that the length value will always be an integer.

[0156] In some embodiments of the disclosure, “linked” may refer to not only a fusion of a first moiety to a second moiety at the C-terminus or the N-terminus, but also includes insertion of the whole first moiety (or the second moiety) into any two points, e.g., amino acids, in the second moiety (or the first moiety, respectively). In some embodiments, the first moiety is linked to a second moiety by a peptide bond or a linker. The first moiety can be linked to a second moiety by a phosphodiester bond or a linker. The linker can be a peptide, a polypeptide, a nucleotide, a nucleotide chain or any chemical moiety.

[0157] In some embodiments of the disclosure, “non-naturally occurring” means a polypeptide or a polynucleotide sequence that does not exist in nature. In some embodiments, the non-naturally occurring sequence does not exist in nature because the sequence is altered relative to a naturally occurring sequence. In some embodiments, the non-naturally occurring sequence does not exist in nature because it is a combination of two known, naturally-occurring, sequences (e.g., chimeric polypeptide) that do not occur together in nature. In some embodiments, a non-naturally occurring polypeptide is a chimeric polypeptide. In some embodiments, a polypeptide or a polynucleotide is not naturally occurring because the sequence contains a portion (e.g., a fragment) that cannot be found in nature, i.e., a novel sequence. Any of the polynucleotides described herein may be provided as non-naturally occurring sequences, e.g., having sequences which are altered relative to native sequences or provided as polynucleotides which are linked to other polynucleotides in a manner that does not exist in nature. Any of the polypeptides described herein may be provided as non-naturally occurring sequences, e.g., having sequences which are altered relative to native sequences or provided as polypeptides which are linked to other polypeptides in a manner that does not exist in nature.

### Antibodies

[0158] In some embodiments of the disclosure, “antibody” comprises various antibody structures, including but not limited to monoclonal antibodies, polyclonal antibodies, and antibody fragments so long as they exhibit the desired antigen-binding activity.

[0159] In some embodiments of the disclosure, “antibody fragment” may refers to a molecule other than an intact antibody that comprises a portion of an intact antibody that binds the antigen to which the intact antibody binds. Examples of antibody fragments include, but are not limited to, Fab, Fab′, F(ab′)2, and Fv fragments, scFv antibody fragments, linear antibodies, single domain antibodies such as sdAb (either V_{L} or V_{H}), camelid VHH domains, and multi-specific antibodies formed from antibody fragments. Genes of interest of the disclosure, may for example, include antibody fragments.

[0160] In some embodiments of the disclosure, “single chain antibody” (scFv) may refer to an antibody fragment that includes variable regions of heavy (VH) and light (VL) chains, which are linked by a flexible peptide linker.

[0161] In some embodiments of the disclosure, “antigen binding molecule” may refer to a molecule that specifically binds an antigenic determinant. Genes of interest of the disclosure, may for example, include antigen binding molecules.

[0162] In some embodiments of the disclosure, “antigen” may refer to a molecule that provokes an immune response.

[0163] In some embodiments of the disclosure, “Chimeric Antigen Receptor” or “CAR” refer to a fusion protein comprising antigen recognition moieties and cell-activation elements. Polynucleotides of the disclosure may include genes of interest that encode or produce CARs.

[0164] In some embodiments of the disclosure, a “CAR T cell” or a “CAR T lymphocyte” refers to a T cell capable of expressing or producing a CAR polypeptide. For example, a cell that is capable of expressing a CAR is a T cell containing nucleic acid sequences for the expression of the CAR in the cell. Cells of the disclosure may be CAR T-cells.

[0165] In some embodiments of the disclosure, a “costimulatory element” or “costimulatory signaling domain” or “costimulatory polypeptide” refers to the intracellular portion of a costimulatory polypeptide. Costimulatory signals may enhance CAR T cell expansion, function, persistence and antitumor activity. Costimulatory signals may be provided in CARs of the disclosure by incorporating intracellular signaling domains from one or more T cell costimulatory molecules, such as CD28 or 4-1BB.

[0166] In some embodiments of the disclosure, a costimulatory polypeptide comprises a sequence isolated or derived from a protein belonging to one or more of the following protein families: TNF receptor proteins, Immunoglobulin-like proteins, cytokine receptors, integrins, signaling lymphocytic activation molecules (SLAM proteins), and activating natural killer cell receptors. Examples of such costimulatory polypeptides of the disclosure include, but are not limited to, CD27, CD28, 4-1BB (CD137), OX40, GITR, CD30, CD40, ICOS, BAFFR, HVEM, lymphocyte function-associated antigen-1 (LFA-1), CD2, CD7, LIGHT, NKG2C, SLAMF7, NKp80, CD160, B7-H3, and MyD88.

### Therapeutic Uses

[0167] In some embodiments of the disclosure, the term “therapeutically effective” may refer to imparting a beneficial effect on the recipient, e.g., providing some alleviation, mitigation, or decrease in at least one clinical symptom in the subject. Therapeutic effects of the disclosure need not be complete or curative, as long as some benefit is provided to the subject. For example, a therapeutic regimen that incorporates the polynucleotides, gene therapy vectors or cells of the disclosure with the small molecules of the disclosure may be structured such that the regimen is therapeutically effective as a whole.

[0168] In some embodiments of the disclosure, the term “therapeutically effective amount” refers to a dose or an amount of a nucleic acid, vector, polypeptide, composition, pharmaceutical composition or cell of the disclosure sufficient to impart a therapeutically effective benefit on the recipient. For example, polynucleotides, gene therapy vectors or cells of the disclosure may be administered in a therapeutically effective amount. A subject who has been administered polynucleotides, gene therapy vectors or cells of the disclosure may subsequently be administered a therapeutically effective amount of a small molecule of the disclosure, i.e., an amount sufficient to impart a beneficial effect on the recipient given the previous administration of polynucleotides, gene therapy vectors or cells.

[0169] The specific dose level of polynucleotides, gene therapy vectors or cells of the disclosure for any particular subject may depend upon a variety of factors, for example, the disorder being treated; the stage or severity of the disorder being treated; the effectiveness of the polynucleotides, gene therapy vectors or cells; the effectiveness of the small molecule; the route of administration of the polynucleotides, gene therapy vectors, cells, or small molecule; the rate of clearance of the polynucleotides, gene therapy vectors, cells, or small molecule; the duration of treatment; the drugs used in combination or coincident with the cellular therapy or gene therapy; the age, body weight, sex, diet and general health of the subject; and like factors well known in the medical arts and sciences.

### Cellular Therapies

[0170] In some embodiments of the disclosure, the term “stem cell” may refer to an undifferentiated or partially differentiated cell that can differentiate into various types of cells and proliferate indefinitely to produce more of the same stem cell.

[0171] In some embodiments of the disclosure, the term “Pluripotent stem cell” (PSC) may refer to a cell that can maintain an undifferentiated state indefinitely and can differentiate into most, if not all cells of the body.

[0172] In some embodiments of the disclosure, the term “Induced pluripotent stem cell” (iPS or iPSC) may refer to a pluripotent stem cell that can be generated directly from a somatic cell. This includes, but is not limited to, specialized cells such as skin or blood cells derived from an adult.

[0173] In some embodiments of the disclosure, the term “multipotent” may refer to a cell that can develop into more than one cell type but is more limited than a pluripotent cell. For example, adult stem cells and cord blood stem cells may be considered as multipotent.

[0174] In some embodiments of the disclosure, the term “hematopoietic cell” may refer to a cell that arises from a hematopoietic stem cell (HSC). Hematopoietic cells of the disclosure include, but is not limited to, myeloid progenitor cells, lymphoid progenitor cells, megakaryocytes, erythrocytes, mast cells, myeloblasts, basophils, neutrophils, eosinophils, macrophages, thrombocytes, monocytes, natural killer cells, T lymphocytes, B lymphocytes and plasma cells.

[0175] In some embodiments of the disclosure, the term “T-lymphocyte” or “T-cell” may refer to a hematopoietic cell that normally develops in the thymus. T-lymphocytes or T-cells include, but are not limited to, natural killer T cells, regulatory T cells, helper T cells, cytotoxic T cells, memory T cells, gamma delta T cells, and mucosal invariant T cells.

[0176] In some embodiments of the disclosure, the term “mesenchyme” may refer to a type of animal tissue comprising loose cells embedded in a mesh of proteins and fluid, i.e., the extracellular matrix. Mesenchyme directly gives rise to most of the body's connective tissues including bones, cartilage, lymphatic system, and circulatory system.

[0177] In some embodiments of the disclosure, the term “mesenchymal cell” may refer to a cell that is derived from a mesenchymal tissue. In some embodiments, cells of the disclosure may be mesenchymal cells.

[0178] In some embodiments of the disclosure, the term “mesenchymal stromal cell” (MSC) may refer to a spindle shaped plastic-adherent cell isolated from bone marrow, adipose, and other tissue sources, with multipotent differentiation capacity in vitro. For example, a mesenchymal stromal cell can differentiate into osteoblasts (bone cells), chondrocytes (cartilage cells), myocytes (muscle cells), and adipocytes (fat cells which give rise to marrow adipose tissue). The term mesenchymal stromal cell is suggested in the scientific literature to replace the term “mesenchymal stem cell”. In some cases, cells of the disclosure may be mesenchymal stromal cells.

[0179] In some embodiments of the disclosure, an “autologous cell” is a cell obtained from the same individual to whom it may be administered as a therapy (the cell is autologous to the subject). Autologous cells of the disclosure include, but are not limited to, hematopoietic cells and stem cells, such as hematopoietic stem cells.

[0180] In some embodiments of the disclosure, an allogeneic cell is a cell obtained from an individual who is not the intended recipient of the cell as a therapy (the cell is allogeneic to the subject). Allogeneic cells of the disclosure may be selected from immunologically compatible donors with respect to the subject of the methods of the disclosure. Allogeneic cells of the disclosure may be modified to produce “universal” allogeneic cells, suitable for administration to any subject without unintended immunogenicity. Allogeneic cells of the disclosure include, but are not limited to, hematopoietic cells and stem cells, such as hematopoietic stem cells.

[0181] In some embodiments of the disclosure, the term “Transfect” or “transform” or “transduce” may refer to a process by which exogenous nucleic acid is transferred or introduced into a host cell. In some embodiments, a “transfected” or “transformed” or “transduced” cell is one which has been transfected, transformed or transduced with exogenous nucleic acid or progeny of the cell.

[0182] In some embodiments of the disclosure, the term “Cell therapy” may refer to the provision or delivery of cells into a recipient for therapeutic purposes.

### Small Molecule Terminology

[0183] In some embodiments of the disclosure, the term “analog” means a chemically modified form of a compound, or member of a class of compounds, which maintains the binding properties of the compound or class. In some embodiments, an analog of danoprevir includes chemically modified forms of danoprevir that retains the ability to bind DNCR2 and NS3a.

[0184] In some embodiments of the disclosure, the term “prodrug” refers to a covalently bonded carriers that release a small molecule of the disclosure in vivo when such prodrug is administered to a patient. Prodrugs of the disclosure may be prepared by modifying functional groups present in the compound in such a way that the modifications are cleaved, either in routine manipulation or in vivo, to the parent compound. The transformation in vivo may be, for example, as the result of some metabolic process, such as chemical or enzymatic hydrolysis of a carboxylic, phosphoric or sulphate ester, or reduction or oxidation of a susceptible functionality. Prodrugs within the scope of the disclosure include compounds wherein a hydroxy, amino, or sulfhydryl group is bonded to any group that, when the prodrug of the disclosure is administered to a mammalian subject, it cleaves to form a free hydroxyl, free amino, or free sulfhydryl group, respectively. Functional groups that may be rapidly transformed, by metabolic cleavage, in vivo form a class of groups reactive with the carboxyl group of the compounds of this disclosure. They include, but are not limited to, such groups as alkanoyl (such as acetyl, propionyl, butyryl, and the like), unsubstituted and substituted aroyl (such as benzoyl and substituted benzoyl), alkoxycarbonyl (such as ethoxycarbonyl), trialkysilyl (such as trimethyl- and triethysilyl), monoesters formed with dicarboxylic acids (such as succinyl), and the like. The small molecules of the disclosure may be administered as prodrugs. The small molecules of the disclosure may be administered to a subject as a prodrugs. A therapeutically effective amount of such a prodrug of the disclosure may be administered. The prodrug may be administered contemporaneously with the administration of the polynucleotides, gene therapy vectors or cells of the disclosure or following the administration of the polynucleotides, gene therapy vectors or cells of the disclosure.

### Compositions

[0185] In some embodiments of the disclosure, “pharmaceutically acceptable” refers to compounds, materials, compositions, and/or dosage forms which are, within the scope of sound medical judgment, suitable for use in contact with the tissues of human beings and animals without excessive toxicity, irritation, allergic response, or other problem or complication commensurate with a reasonable benefit/risk ratio. For example, the small molecules, polynucleotides, polypeptides, gene therapy vectors or cells of the disclosure may be administered as part of a composition together with other pharmaceutically acceptable components, including pharmaceutically acceptable carriers.

[0186] In some embodiments of the disclosure, the term “pharmaceutically acceptable salts” refers to derivatives of the small molecules of the disclosure wherein the specified compound is converted to an acid or base salt thereof. Such pharmaceutically acceptable salts include, but are not limited to, mineral or organic acid salts of basic residues such as amines; alkali or organic salts of acidic residues such as carboxylic acids; and the like. The pharmaceutically acceptable salts include the conventional non-toxic salts or the quaternary ammonium salts of the parent compound formed, for example, from non-toxic inorganic or organic acids. For example, such conventional non-toxic salts include those derived from inorganic acids such as hydrochloric, hydrobromic, sulfuric, sulfamic, phosphoric, nitric and the like; and the salts prepared from organic acids such as acetic, propionic, succinic, glycolic, stearic, lactic, malic, tartaric, citric, ascorbic, pamoic, maleic, hydroxymaleic, phenylacetic, glutamic, benzoic, salicylic, sulfanilic, 2-acetoxybenzoic, fumaric, toluensulfonic, methanesulfonic, ethane dislfonic, oxalic, isethionic, and the like. For example, the small molecules of the disclosure may be provided as pharmaceutically acceptable salts.

[0187] In some embodiments of the disclosure, the term “controlled release” refers to part or all of a dosage form that can release one or more active pharmaceutical agents over a prolonged period of time (i.e., over a period of more than 1 hour). The characteristic of controlled release (CR) may also be referred to as sustained release (SR), prolonged release (PR), or extended release (ER). When used in association with the dissolution profiles discussed herein, the term “controlled release” refers to that portion of a dosage form according to the disclosure that delivers active agent over a period of time greater than 1 hour. For example, the small molecules of the disclosure may be administered in a controlled release composition.

[0188] In some embodiments of the disclosure, the term “immediate release” refers to part or all of a dosage form that releases active agent substantially immediately upon contact with gastric juices and that results in substantially complete dissolution within about 1 hour. The characteristic of immediate release (IR) may also be referred to as instant release (IR). When used in association with the dissolution profiles discussed herein, the term “immediate release” refers to that portion of a dosage form according to the disclosure that delivers active agent over a period of time less than 1 hour. The small molecules of the disclosure may be administered in an immediate release composition.

[0189] In some embodiments of the disclosure, the term “excipients” refer to pharmacologically inert ingredients that are not active in the body. See, for example, Hancock, B. C., Moss, G. P., &amp; Goldfarb, D. J. (2020). Handbook of pharmaceutical excipients. London: Pharmaceutical Press, the entire disclosure of which is incorporated herein by reference. The small molecules of the disclosure may be mixed with pharmaceutically acceptable carriers, diluents, adjuvants, excipients, or vehicles, such as preserving agents, fillers, polymers, disintegrating agents, glidants, wetting agents, emulsifying agents, suspending agents, sweetening agents, flavoring agents, perfuming agents, lubricating agents, acidifying agents, and dispensing agents, depending on the nature of the mode of administration and dosage forms. Such ingredients, including pharmaceutically acceptable carriers and excipients that may be used to formulate oral dosage forms. Pharmaceutically acceptable carriers include water, ethanol, polyols, vegetable oils, fats, waxes polymers, including gel forming and non-gel forming polymers, and suitable mixtures thereof. Examples of excipients include starch, pregelatinized starch, Avicel, lactose, milk sugar, sodium citrate, calcium carbonate, dicalcium phosphate, and lake blend. Examples of disintegrating agents include starch, alginic acids, and certain complex silicates. Examples of lubricants include magnesium stearate, sodium lauryl sulphate, talc, as well as high molecular weight polyethylene glycols. For example, the small molecules, polynucleotides, gene therapy vectors or cells of the disclosure may be provided and administered in compositions that include pharmaceutically acceptable excipients.

### Definitions

[0190] In some embodiments of the disclosure, the term “subject” refers to any mammal, including without limitation, humans.

[0191] The terms “a”, “an” and “the” include their plural forms unless the context clearly dictates otherwise.

[0192] The term “and” is used interchangeably with “or” unless expressly stated otherwise.

[0193] The term “And/or” is to be taken as specific disclosure of each of the two specified features or components with or without the other. Thus, “and/or” as used in a phrase such as “A and/or B,” includes “A and B,” “A or B,” “A” (alone), and “B” (alone). Likewise, “and/or,” as used in a phrase such as “A, B, and/or C,” is intended to encompass each of the following embodiments: A, B, and C; A, B, or C; A or C; A or B; B or C; A and C; A and B; B and C; A (alone); B (alone); and C (alone).

[0194] In some embodiments of the disclosure, the term “about” is used interchangeably with the term “approximately” or “substantially”. When “about” is used with a numerical range, it modifies that range by extending the boundaries above and below the numerical values set forth. In some embodiments, the term “about” may modify a numerical value above and below the stated value by a variance of, e.g., 10 percent up or down (higher or lower).

[0195] Numeric ranges are inclusive of the numbers defining the range. Where a range of values is stated, each intervening integer value, and each fraction thereof, between the recited upper and lower limits of that range is also specifically disclosed, as is each subrange between such values. The upper and lower limits of any range can independently be included in or excluded from the range, and each range where either, neither or both limits are included is also encompassed within the disclosure. Thus, ranges are understood to be shorthand for all of the values within the range, inclusive of the recited endpoints. For example, a range of 1 to 10 is understood to include any number, combination of numbers, or sub-range from the group consisting of 1, 2, 3, 4, 5, 6, 7, 8, 9, and 10.

[0196] Where a value is explicitly stated, it is to be understood that values which are about the same quantity or amount as the stated value are also within the scope of the disclosure. Where a combination is disclosed, each subcombination of the elements of that combination is also specifically disclosed and is within the scope of the disclosure. Conversely, where different elements or groups of elements are individually disclosed, combinations thereof are also disclosed. Where any element of a disclosure is disclosed as having a plurality of alternatives, examples of that disclosure in which each alternative is excluded singly or in any combination with the other alternatives are also hereby disclosed; more than one element of a disclosure can have such exclusions, and all combinations of elements having such exclusions are hereby disclosed.

[0197] Unless the context clearly requires otherwise, throughout the description and the claims, the words ‘comprise’, ‘comprising’, and the like are to be construed in an inclusive sense as opposed to an exclusive or exhaustive sense; that is to say, in the sense of “including, but not limited to”.

[0198] Singular or plural words also include the plural and singular number, respectively. Thus, for example, where the specification describes a gene of interest, the disclosure includes polynucleotides with a single gene of interest or multiple genes of interest.

[0199] “Above,” and “below” and words of similar import refer to this application as a whole and not to any particular portions of the application.

[0200] “Set” includes sets of one or more elements or objects.

[0201] Units, prefixes, and symbols are denoted in their Systeme International de Unites (SI) accepted form.

[0202] Headings are included herein for reference and to aid in locating the various sections. These headings are not intended to limit the scope of the concepts described with respect to the headings. Such concepts may have applicability throughout the present specification.

[0203] Although the disclosure is described in some detail by way of illustration and example for purposes of clarity and understanding, it will be apparent to those skilled in the art that certain changes and modifications may be practiced. Reference to “the disclosure” or the like is intended as a reference to any of a wide variety of embodiments of, or aspects of, the disclosure, and not as limiting the disclosure to a single embodiment or aspect. As used throughout the disclosure, the terms “aspect” and “embodiment” are interchangeable. Features discussed in the context of “certain”, “some”, or “other” aspects or embodiments of the disclosure may be found in any embodiment of the disclosure, however, in these instances, the feature may be considered a preferred feature in these highlighted embodiments.

[0204] The description and examples should not be construed as limiting the scope of the disclosure to the embodiments and examples described herein, but rather as encompassing all modifications and alternatives falling within the true scope and spirit of the disclosure.

### Small Molecule-Regulated Gene Expression System

[0205] The disclosure provides a small molecule-regulated gene expression system. The system generally includes a polynucleotide set that includes a first polynucleotide and a second polynucleotide. The first and second polynucleotides may be provided as a single polynucleotide or as a set of two or more polynucleotides. The first polynucleotide generally includes a regulatory element operatively linked to a gene of interest. For example, the first polynucleotide may include a promoter sequence, or an inducible promoter sequence, operatively linked to a gene of interest. The second polynucleotide encodes components of a polypeptide dimerization system that forms a dimerization complex in the presence of a small molecule. The dimerization complex can be used to localize polypeptide components that interact with the regulatory elements to modulate expression of the gene of interest.

[0206] The second polynucleotide encodes each dimerization polypeptide as a fusion protein together with other polypeptide components. For example, each dimerization polypeptide may include a dimerization polypeptide linked to a regulatory element. In one embodiment, the second polynucleotide encodes:
[0207] (i) a first fusion protein that may include a first dimerization polypeptide linked to a DNA binding domain specific for the promoter sequence of a gene of interest; and
[0208] (ii) a second fusion protein that may include a transcriptional or epigenetic regulation domain linked to a second dimerization polypeptide.

[0209] The first and second dimerization polypeptides may be selected so that interaction of the first and second dimerization polypeptides is mediated by the presence of a small molecule. For example, the first and second dimerization polypeptides may assemble, together with the small molecule, to form a dimerization complex.

[0210] As noted, the first polynucleotide may include an inducible promoter sequence operatively linked to a gene of interest. For example, the first polynucleotide may include:
[0211] (i) a transcription factor-specific recognition sequence that includes a transcription factor-specific response element,
[0212] (ii) a minimal promoter sequence linked to the one or more response elements, and
[0213] (iii) one or more optional regulatory sequences.

[0214] The response elements, minimal promoter, and optional regulatory sequences may be configured in a vector backbone for expression of a gene of interest.

[0215] The second polynucleotide may, for example, include:
[0216] (i) a constitutive promoter sequence,
[0217] (ii) a polynucleotide encoding the first fusion protein;
[0218] (iii) a polynucleotide encoding the second fusion protein;
[0219] (iv) a separation element that prevents fusion of the first fusion protein and the second fusion protein; and
[0220] (v) one or more optional regulatory sequences.

[0221] The constitutive promoter sequence, the polynucleotides encoding the first and second fusion proteins, separation element, and optional regulatory sequence may be configured in a vector backbone for expression of the first and second fusion proteins.

[0222] FIG. 1 illustrates a schematic diagram of an example of a small molecule-regulated gene expression system of the disclosure in operation. The figure illustrates expressed components of the system (first and second fusion proteins) binding to response elements RE and driving expression of a gene of interest (GOI) from an inducible promoter (min) from the first polynucleotide. Three response elements (RE) and a minimal promoter (min) are shown linked to the gene or interest (GOI). A first fusion protein includes an NS3a protein fused to a DNA binding domain that recognizes and binds the three REs. A second fusion protein includes a reader protein (DNCR2) fused to a transcriptional activation domain. In the presence of the small molecule drug danoprevir, the DNCR2 reader protein recognizes and binds the NS3a/danoprevir complex, thereby colocalizing the transcriptional activation domain to the minimal promoter (min) for transcription of the gene of interest. In this example, the reader protein, DNCR2, can be modularly replaced with an alternative reader that responds to a different NS3a inhibitor small molecule drug (e.g., a grazoprevir/NS3 complex reader (GNCR) protein).

### Chemically Induced Dimers

[0223] The disclosure makes use of small molecule regulated polypeptide dimers to colocalize regulatory elements and thereby modulate expression of a gene of interest. For example, the dimers may colocalize a DNA binding domain and a transcriptional regulation domain for an inducible promoter that is linked to a gene of interest. The dimers are formed when dimerization polypeptides assemble together with the small molecule to form a dimerization complex.

[0224] The dimers may be used to colocalize split transcription factors. For example, the split transcription factor may include:
[0225] (i) a first fusion protein that includes a first dimerization polypeptide linked to a DNA binding domain (DBD), and
[0226] (ii) a second fusion protein that includes a second dimerization polypeptide linked to a transcriptional or epigenetic regulation domain.

[0227] The first and second dimerization polypeptides may be selected so that interaction of the first and second dimerization polypeptides is mediated by the presence of the small molecule. In some cases, the small molecule may mediate assembly of the dimer. In other cases, the small molecule may mediate disassembly of the dimer. In still other cases, a first small molecule may mediate assembly of the dimer while a second small molecule may displace the first small molecule and thereby mediate disassembly of the dimer.

[0228] As an example, a small molecule regulated polypeptide dimer may include the hepatitis C virus protease NS3a/4a protein (hereafter referred to as NS3a) or a modification thereof as a first dimerization polypeptide and a “reader” protein as a second dimerization polypeptide. The reader protein may, for example, be selected to recognize a specific drug-bound state of the NS3a protein. NS3a proteins and NS3a reader proteins have been described in Baker et al., International Patent Publication WO2020117778, entitled “Reagents and Methods for Controlling Protein Function and Interaction,” published on Jun. 11, 2020, which is incorporated herein by reference in its entirety.

[0229] NS3a can integrate multiple drug inputs and translate the drug inputs into diverse outputs using different engineered reader proteins as dimerization partners. NS3a proteins and pleiotropic response outputs from danoprevir/NS3a complex readers, grazoprevir/NS3a complex readers, and ANR/NS3a complex readers have been been described in Foight, G. W., et al., Nature Biotechnology (2019) 37:1209-1216; Cunningham-Bryant, D. et al., Journal of the American Chemical Society (2019) 141: 3352-3355; and Kugler, J., et al., Journal of Biological Chemistry (2012) 287:39224-39232, which are incorporated herein by reference in their entireties.

[0230] In one example, the split transcription factor that forms the dimer includes:
[0231] (i) a first fusion protein that includes an NS3a polypeptide and a DNA binding domain (DBD); and
[0232] (ii) a second fusion protein that includes a reader polypeptide and a transcriptional activation domain (TAD).

[0233] Interaction between the NS3a and reader binding partners may be controlled by the presence of a small molecule drug. A reader may be selected to recognize and bind a specific NS3a/drug complex.

[0234] In some embodiments, the reader selected for the dimer is a danoprevir/NS3 complex reader (DNCR) polypeptide (or minimized/modified variants thereof) designed to recognize and bind NS3a in the presence of the small molecule drug danoprevir, thereby providing a drug-inducible transcription system. In one example the DNCR polypeptide is DNCR2. See Foight, G. W., et al., Nature Biotechnology (2019) 37:1209-1216.

[0235] In some embodiments, the reader selected for the dimer is a grazoprevir/NS3 complex reader (GNCR) polypeptide (or minimized/modified variants thereof) designed to recognize and bind NS3a in the presence of the small molecule drug grazoprevir, thereby providing a drug-inducible transcription system. In one example, the GNCR protein is GNCR1. See Foight, G. W., et al., Nature Biotechnology (2019) 37:1209-1216.

[0236] In some embodiments, the reader selected for the dimer is an apoNS3a complex reader (ANR) peptide (or minimized/modified variants thereof). ANR forms a basal complex with NS3a, which is disrupted by NS3a-targeting drugs, thereby providing a drug-disreputable transcription system. See Cunningham-Bryant, D., et al., Journal of the American Chemical Society (2019) 141:3352-3355, Kügler, J., et al., Journal of Biological Chemistry (2012) 287:39224-39232, and Foight, G. W., et al., Nature Biotechnology (2019) 37:1209-1216. Transcription Factor-Specific Recognition Sequences

[0237] In some embodiments, the first polynucleotide includes an inducible polynucleotide component that includes a transcription factor-specific recognition sequence.

[0238] In some embodiments, the transcription factor-specific recognition sequence may include a Gal4 response element.

[0239] In some embodiments, the transcription factor-specific recognition sequence may include a zinc finger (ZF) response element (e.g., a ZF1, ZF2, ZF3, and/or ZFHIV2 response element) or any modifications thereof.

[0240] In some embodiments, the transcription factor-specific recognition sequence may include a response element that is repeated 2, 3, 4, 5, 6, 7, 8, 9, 10, or more times.

[0241] In some embodiments, the transcription factor response element may include a polynucleotide selected from the group consisting of: 5×Gal4RE (SEQ ID NO: 84), 6×ZF1RE (SEQ ID NO: 85), 6×ZF2RE (SEQ ID NO: 86), 6×ZF3v1RE (SEQ ID NO: 87), 6×ZF3vRE (SEQ ID NO: 88), 12×ZF3veRE (SEQ ID NO: 89), and 12×ZFHIV2RE (SEQ ID NO: 90), and repeats or combinations thereof.

### Minimal Promoter Sequences

[0242] In some embodiments, the first polynucleotide encodes an inducible polynucleotide component that includes a minimal promoter sequence operatively linked to the gene of interest. The minimal promoter may, for example, be a minimal core promoter. In some embodiments, the minimal promoter sequence may be selected from the group consisting of: YB_TATA (SEQ ID NO: 77), human beta globin (huBG) (SEQ ID NO: 78), minIL2 (SEQ ID NO: 79), minimalCMV (minCMV) (SEQ ID NO: 80), and TRE3G (SEQ ID NO: 81).

### Regulatory Domains and Elements

[0243] In some embodiments, the first polynucleotide includes an inducible polynucleotide component that includes an optional regulatory element, such as a post-transcriptional regulatory element. For example, post-transcriptional regulatory elements may be included to increase expression of the gene of interest. Examples include bGHpA (SEQ ID NO: 91), SV40pA (SEQ ID NO: 92), and synpA (SEQ ID NO: 93).

### Constitutive Polynucleotide Component

[0244] In some embodiments, the second polynucleotide includes a constitutive polynucleotide component that may include:
[0245] (i) a first polynucleotide encoding a first fusion protein that includes a first dimerization polypeptide and a DNA binding domain (DBD),
[0246] (ii) a second polynucleotide encoding a second fusion protein that includes a second dimerization polypeptide and transcriptional activation domain (TAD),
[0247] (iii) a separation element that includes a polynucleotide sequence that prevents fusion of the first fusion protein and the second fusion protein,
[0248] (iv) a constitutive promoter sequence operatively linked to the first and second polynucleotides, and
[0249] (v) one or more optional regulatory sequences,
   wherein the first and second polynucleotides, separation element, constitutive promoter sequence, and optional regulatory elements are configured for expression of a split transcription factor.

### Dimerization Polypeptide

[0250] In various embodiments, the first or second polynucleotide may encode a dimerization polypeptide that includes NS3a (or a modification thereof) and the other of the first or second polynucleotide may encode a dimerization polypeptide selected from the group consisting of DNCR2 (or a modification thereof) and GNCR1 (or modification thereof).

[0251] In some embodiments, the first or second polynucleotide encodes a dimerization polypeptide which may include an NS3a polypeptide that includes: NS3aopt S139A (SEQ ID NO: 66), NS3a1b (SEQ ID NO: 133), NS3aH1 (SEQ ID NO: 134). The NS3a polypeptides may be designed to be either catalytically active or catalytically inactive as listed herein.

[0252] In some embodiments, the first or second polynucleotide encodes a dimerization polypeptide which may include a homo-oligomeric NS3a fusion polypeptide that includes: dimer-NS3aH1 (SEQ ID NO: 6), hexamer-NS3a (SEQ ID NO: 7), pentamer-NS3aH1 (Seq ID NO: 8), or trimer-NS3aH1 (SEQ ID NO: 9).

[0253] In some embodiments, the first or second polynucleotide encodes a dimerization polypeptide which may include a DNCR2 polypeptide that includes: DNCR2 (SEQ ID NO: 11), DNCR2_1 (SEQ ID NO: 12), DNCR2_2 (SEQ ID NO: 13), DNCR2_3 (SEQ ID NO: 14), DNCR2_4 (SEQ ID NO: 15), DNCR2_5 (SEQ ID NO: 16), DNCR2_6 (SEQ ID NO: 17), DNCR2_7 (SEQ ID NO: 18), DNCR2_8 (SEQ ID NO: 19), DNCR2_9 (SEQ ID NO: 20), DNCR2_10 (SEQ ID NO: 21), DNCR2_11 (SEQ ID NO: 22), DNCR2_12 (SEQ ID NO: 23), DNCR2_13 (SEQ ID NO: 24), DNCR2_14 (SEQ ID NO: 25), DNCR2_15 (SEQ ID NO: 26), DNCR2_16 (SEQ ID NO: 27), DNCR2_17 (SEQ ID NO: 28), DNCR2_18 (SEQ ID NO: 29), DNCR2_19 (SEQ ID NO: 30), DNCR2_20 (SEQ ID NO: 31), DNCR2_21 (SEQ ID NO: 32), DNCR2_22 (SEQ ID NO: 33), DNCR2_23 (SEQ ID NO: 34), DNCR2_24 (SEQ ID NO: 35), DNCR2_25 (SEQ ID NO: 36), DNCR2_26 (SEQ ID NO: 37), DNCR2_27 (SEQ ID NO: 38), DNCR2_28 (SEQ ID NO: 39), DNCR2_29 (SEQ ID NO: 40), DNCR2_30 (SEQ ID NO: 41), DNCR2_31 (SEQ ID NO: 42), DNCR2_32 (SEQ ID NO: 43), DNCR2_33 (SEQ ID NO: 44), DNCR2_34 (SEQ ID NO: 45), or DNCR2-3rep (SEQ ID NO: 46).

[0254] In some embodiments, the first or second polynucleotide encodes a dimerization polypeptide which may include a GNCR1 polypeptide that includes: GNCR1 (SEQ ID NO: 47), GNCR1-3rep (SEQ ID NO: 48), G33 (SEQ ID NO: 49), or G38 (SEQ ID NO: 50).

### Dimerization Peptide+DNA Binding Domain

[0255] In various embodiments, the first polynucleotide encodes a fusion protein which may include:
[0256] (i) a first dimerization polypeptide that includes: NS3aopt S139A (SEQ ID NO: 66), NS3a1b (SEQ ID NO: 133), NS3aH1 (SEQ ID NO: 134), dimer-NS3aH1 (SEQ ID NO: 6), hexamer-NS3a (SEQ ID NO: 7), pentamer-NS3aH1 (SEQ ID NO: 8), trimer-NS3aH1 (SEQ ID NO: 9), DNCR2 (SEQ ID NO: 11), DNCR2_1 (SEQ ID NO: 12), DNCR2_2 (SEQ ID NO: 13), DNCR2_3 (SEQ ID NO: 14), DNCR2_4 (SEQ ID NO: 15), DNCR2_5 (SEQ ID NO: 16), DNCR2_6 (SEQ ID NO: 17), DNCR2_7 (SEQ ID NO: 18), DNCR2_8 (SEQ ID NO: 19), DNCR2_9 (SEQ ID NO: 20), DNCR2_10 (SEQ ID NO: 21), DNCR2_11 (SEQ ID NO: 22), DNCR2_12 (SEQ ID NO: 23), DNCR2_13 (SEQ ID NO: 24), DNCR2_14 (SEQ ID NO: 25), DNCR2_15 (SEQ ID NO: 26), DNCR2_16 (SEQ ID NO: 27), DNCR2_17 (SEQ ID NO: 28), DNCR2_18 (SEQ ID NO: 29), DNCR2_19 (SEQ ID NO: 30), DNCR2_20 (SEQ ID NO: 31), DNCR2_21 (SEQ ID NO: 32), DNCR2_22 (SEQ ID NO: 33), DNCR2_23 (SEQ ID NO: 34), DNCR2_24 (SEQ ID NO: 35), DNCR2_25 (SEQ ID NO: 36), DNCR2_26 (SEQ ID NO: 37), DNCR2_27 (SEQ ID NO: 38), DNCR2_28 (SEQ ID NO: 39), DNCR2_29 (SEQ ID NO: 40), DNCR2_30 (SEQ ID NO: 41), DNCR2_31 (SEQ ID NO: 42), DNCR2_32 (SEQ ID NO: 43), DNCR2_33 (SEQ ID NO: 44), DNCR2_34 (SEQ ID NO: 45), DNCR2-3rep (SEQ ID NO: 46), GNCR1 (SEQ ID NO: 47), GNCR1-3rep (SEQ ID NO: 48), G33 (SEQ ID NO: 49), or G38 (SEQ ID NO: 50); and
[0257] (ii) a DNA binding domain (DBD) that includes: Gal4DBD (SEQ ID NO: 56), ZF1 (SEQ ID NO: 57), ZF2 (SEQ ID NO: 58), ZF3 (SEQ ID NO: 59), or ZFHIV2 (SEQ ID NO: 60).

[0258] In certain embodiments, the first polynucleotide encodes a Gal4-NS3a fusion protein that includes the Gal4 DNA binding domain and an NS3a dimerization polypeptide (SEQ ID NO: 65).

[0259] In certain embodiments, the first polynucleotide encodes an NS3a-ZF1 fusion protein that includes an NS3a dimerization polypeptide and the ZF1 DNA binding domain (SEQ ID NO: 68).

[0260] In certain embodiments, the first polynucleotide encodes an NS3a-ZF2 fusion protein that includes an NS3a dimerization polypeptide and the ZF2 DNA binding domain (SEQ ID NO: 69).

[0261] In certain embodiments, the first polynucleotide encodes an NS3a-ZF3 fusion protein that includes an NS3a dimerization polypeptide and the ZF3 DNA binding domain (SEQ ID NO: 70).

[0262] In certain embodiments, the first polynucleotide encodes an NS3a-ZFHIV2 fusion protein that includes an NS3a dimerization polypeptide and the ZFHIV2 DNA binding domain (SEQ ID NO: 71).

[0263] In certain embodiments, the first polynucleotide encodes a homodimerized NS3a-LZ-ZF3 fusion protein that includes an NS3a dimerization polypeptide and the ZF3 DNA binding domain (SEQ ID NO: 72).

[0264] In certain embodiments, the first polynucleotide encodes a homodimerized NS3a-LZ-ZFHIV2 fusion protein that includes an NS3a dimerization polypeptide and the ZFHIV2 DNA binding domain (SEQ ID NO: 73).

[0265] In certain embodiments, the first polynucleotide encodes a Gal4-DNCR2 fusion protein that includes the Gal4 DNA binding domain and a DNCR2 dimerization polypeptide (SEQ ID NO: 55).

### Dimerization Polypeptide+Transcriptional Activation Domain

[0266] In various embodiments, the second polynucleotide encodes a fusion protein which may include:
[0267] (i) a second dimerization polypeptide that includes: NS3aopt S139A (SEQ ID NO: 66), NS3a1b (SEQ ID NO: 133), NS3aH1 (SEQ ID NO: 134), dimer-NS3aH1 (SEQ ID NO: 6), hexamer-NS3a (SEQ ID NO: 7), pentamer-NS3aH1 (Seq ID NO: 8), trimer-NS3aH1 (SEQ ID NO: 9), DNCR2 (SEQ ID NO: 11), DNCR2_1 (SEQ ID NO: 12), DNCR2_2 (SEQ ID NO: 13), DNCR2_3 (SEQ ID NO: 14), DNCR2_4 (SEQ ID NO: 15), DNCR2_5 (SEQ ID NO: 16), DNCR2_6 (SEQ ID NO: 17), DNCR2_7 (SEQ ID NO: 18), DNCR2_8 (SEQ ID NO: 19), DNCR2_9 (SEQ ID NO: 20), DNCR2_10 (SEQ ID NO: 21), DNCR2_11 (SEQ ID NO: 22), DNCR2_12 (SEQ ID NO: 23), DNCR2_13 (SEQ ID NO: 24), DNCR2_14 (SEQ ID NO: 25), DNCR2_15 (SEQ ID NO: 26), DNCR2_16 (SEQ ID NO: 27), DNCR2_17 (SEQ ID NO: 28), DNCR2_18 (SEQ ID NO: 29), DNCR2_19 (SEQ ID NO: 30), DNCR2_20 (SEQ ID NO: 31), DNCR2_21 (SEQ ID NO: 32), DNCR2_22 (SEQ ID NO: 33), DNCR2_23 (SEQ ID NO: 34), DNCR2_24 (SEQ ID NO: 35), DNCR2_25 (SEQ ID NO: 36), DNCR2_26 (SEQ ID NO: 37), DNCR2_27 (SEQ ID NO: 38), DNCR2_28 (SEQ ID NO: 39), DNCR2_29 (SEQ ID NO: 40), DNCR2_30 (SEQ ID NO: 41), DNCR2_31 (SEQ ID NO: 42), DNCR2_32 (SEQ ID NO: 43), DNCR2_33 (SEQ ID NO: 44), DNCR2_34 (SEQ ID NO: 45), DNCR2-3rep (SEQ ID NO: 46), GNCR1 (SEQ ID NO: 47), GNCR1-3rep (SEQ ID NO: 48), G33 (SEQ ID NO: 49), or G38 (SEQ ID NO: 50); and
[0268] (ii) a transcriptional activation domain (TAD) that includes: p65mini (SEQ ID NO: 61), p65mini-HSF1 (SEQ ID NO: 62), VP64-RTAmini (SEQ ID NO: 63), or VPRmini (SEQ ID NO: 64).

[0269] In certain embodiments, the second polynucleotide encodes an NS3a-VPRmini fusion protein that includes an NS3a dimerization polypeptide and the VPRmini transcriptional activation domain (SEQ ID NO: 67).

[0270] In certain embodiments, the second polynucleotide encodes a DNCR2-p65mini fusion protein that includes a DNCR2 dimerization polypeptide and the p65mini transcriptional activation domain (SEQ ID NO: 51).

[0271] In certain embodiments, the second polynucleotide encodes a DNCR2-p65mini-HSF1 fusion protein that includes a DNCR2 dimerization polypeptide and the p65mini-HSF1 transcriptional activation domain (SEQ ID NO: 52).

[0272] In certain embodiments, the second polynucleotide encodes a DNCR2-VP64-RTAmini fusion protein that includes a DNCR2 dimerization polypeptide and the VP64-RTAmini transcriptional activation domain (SEQ ID NO: 53).

[0273] In certain embodiments, the second polynucleotide encodes a DNCR2-VPRmini fusion protein that includes a DNCR2 dimerization polypeptide and the VPRmini transcriptional activation domain (SEQ ID NO: 54).

### Separation Element

[0274] In various embodiments, the second polynucleotide encoding the fusion proteins may include a polynucleotide sequence encoding a separation element separating the fusion proteins.

[0275] In some embodiments, the separation element may include a ribosomal skipping sequence selected from the group consisting of: P2a (SEQ ID NO: 74) and T2a (SEQ ID NO: 75).

[0276] In some embodiments, the separation element may include a polynucleotide sequence that includes at least two ribosomal skipping sequences selected from the group consisting of T2a-RFP-P2a (SEQ ID NO: 76), P2a-T2a (SEQ ID NO: 135), and T2a-P2a (SEQ ID NO: 136).

[0277] In some embodiments, the separation element may include an internal ribosome entry site (IRES).

[0278] In some embodiments, the separation element may include a second constitutive promoter sequence.

### Constitutive Promoter Sequence

[0279] In various embodiments, the constitutive polynucleotide component may include a constitutive promoter sequence selected from the group consisting of: MND (SEQ ID NO: 82), hPGK (SEQ ID NO: 83), CMV (SEQ ID NO: 137), CAG (SEQ ID NO: 138), SFFV (SEQ ID NO: 139), EF1alpha (SEQ ID NO: 140), UBC (SEQ ID NO: 141), and CD43 (SEQ ID NO: 142).

### Regulatory Sequence

[0280] In some embodiments, the constitutive polynucleotide component may include one or more optional regulatory sequence selected from the group consisting of: bGHpA (SEQ ID NO: 91), SV40pA (SEQ ID NO: 92), and synpA (SEQ ID NO: 93).

### Target Sequences (Genes of Interest (GOI))

[0281] The polynucleotides of the disclosure encode genes of interest. The genes of interest may encode polypeptides conferring beneficial therapeutic effects. The genes of interest may, for example, encode antibodies, subcomponents of antibodies, enzymes, viral packaging polypeptides, and other polypeptides. The genes of interest may be therapeutic polypeptides. The genes of interest expressing therapeutic polypeptides may be expressed in vivo to provide a therapeutic effect to a subject, i.e., gene therapy. The genes of interest expressing therapeutic polypeptides may be expressed in vitro and purified for subsequent administration to a subject. Genes of interest may encode single polypeptides or multiple polypeptides.

### Chimeric Antigen Receptors

[0282] Genes of interest may include chimeric antigen receptors (CARs). CARs can be fused proteins including an extracellular antigen-binding/recognition element, a transmembrane element that anchors the receptor to the cell membrane and at least one intracellular element. These CAR elements are known in the art, for example as described in patent application US20140242701, entitled “Chimeric Antigen Receptors”, published on Aug. 28, 2014, which is incorporated by reference in its entirety. The CAR can be a recombinant polypeptide expressed from a polynucleotide comprising at least an extracellular antigen binding element, a transmembrane element and an intracellular signaling element comprising a functional signaling element derived from a stimulatory molecule.

[0283] The stimulatory molecule can, for example, be the zeta chain associated with the T cell receptor complex.

[0284] The cytoplasmic signaling element may, for example, include one or more functional signaling elements derived from at least one costimulatory molecule.

[0285] The costimulatory molecule can, for example, be chosen from 4-1BB (i.e., CD137), CD27 and/or CD28.

[0286] The CAR may be a chimeric fusion protein comprising an extracellular antigen recognition element, a transmembrane element and an intracellular signaling element comprising a functional signaling element derived from a stimulatory molecule.

[0287] The CAR may include a chimeric fusion protein comprising an extracellular antigen recognition element, a transmembrane element and an intracellular signaling element comprising a functional signaling element derived from a co-stimulatory molecule and a functional signaling element derived from a stimulatory molecule.

[0288] The CAR may be a chimeric fusion protein comprising an extracellular antigen recognition element, a transmembrane element and an intracellular signaling element comprising two functional signaling elements derived from one or more co-stimulatory molecule(s) and a functional signaling element derived from a stimulatory molecule.

[0289] The CAR may include a chimeric fusion protein comprising an extracellular antigen recognition element, a transmembrane element and an intracellular signaling element comprising at least two functional signaling elements derived from one or more co-stimulatory molecule(s) and a functional signaling element derived from a stimulatory molecule.

[0290] The CAR may include an optional leader sequence at the amino-terminus (N-term) of the CAR fusion protein. The CAR may further comprise a leader sequence at the N-terminus of the extracellular antigen recognition element, wherein the leader sequence is optionally cleaved from the antigen recognition element (e.g., a scFv) during cellular processing and localization of the CAR to the cellular membrane.

### Therapeutic Uses

[0291] Genes of interest may encode therapeutic polypeptides, such as polypeptides useful for treating one or more of the following conditions:
[0292] Autoimmune system disorders, such as
   [0293] Adenosine deaminase deficiency (ADA)
   [0294] AIDS (soluble CD4)
   [0295] Ankylosing spondylitis
   [0296] Autoimmune diseases (interleukin-1 receptor antagonist)
   [0297] Chronic inflammatory demyelinating polyneuropathy (CIDP)
   [0298] DADA2 vasculitis
   [0299] Diabetes mellitus Type 1 (insulin, PGC-al, GLP-1, myostatin propeptide, glucose transporter 4)
   [0300] Generalized myasthenia gravis (GMG)
   [0301] Hashimoto's thyroiditis (experimental autoimmune thyroiditis (EAT))
   [0302] Inflammatory bowel disease (IBD)
   [0303] Limb ischemia (VEGF, FGF, PGC-la, EC-SOD, HIF)
   [0304] Lupus erythematosus
   [0305] Mucosal-dominant pemphigus vulgaris
   [0306] Multiple sclerosis (β-interferon)
   [0307] Rheumatoid arthritis
   [0308] Severe combined immune deficiency (ADA-SCID)
   [0309] X-linked Severe combined immune deficiency (XSCID)
[0310] Blood cell disorders, such as
   [0311] Anemia (erythropoietin)
   [0312] Chronic granulomatous disease (CGD)
   [0313] Familial hypercholesterolemia
   [0314] Fanconi Anemia
   [0315] Glucose-6-phosphate dehydrogenase deficiency (G6PD)
   [0316] Hb S/Beta-Thalassemia (Hb S/Th)
   [0317] Hemophilia A (Factor VIII deficiency)
   [0318] Hemophilia B (Factor IX deficiency)
   [0319] Homozygous familial hypercholesterolemia (HoFH)
   [0320] Hyperlipoproteinemia type 1
   [0321] LDL receptor deficiency (LDL receptor)
   [0322] Ornithine transcarbamylase (OTC) deficiency
   [0323] Sickle cell anemia (Hb SS)>1 in 5,000;
   [0324] Sickle-cell disease (Hb S/C)
   [0325] Thalassemia (β-globin)
   [0326] Variant hemoglobinopathies (including Hb E)
   [0327] and other blood disorders
[0328] Bone disorders and fractures, such as osteodysplasia
   [0329] Alveolar bone atrophy
   [0330] Congenital and acquired maxillofacial defects
   [0331] Hip fracture
   [0332] Maxillofacial bone regeneration
   [0333] Tooth extraction, osteogenesis
[0334] Brain disorders, such as
   [0335] Osteodysplasia (also located in bone disorders)
   [0336] Schizophrenia
[0337] Cardiovascular disorders, such as
   [0338] Acute myocardial infarction
   [0339] Anemia of end stage renal disease (ESRD)
   [0340] Angina (class 2-4)
   [0341] Chronic heart failure
   [0342] Chronic kidney disease patients suffering from anemia
   [0343] Coronary artery bypass grafting
   [0344] Coronary artery disease
   [0345] Critical congenital heart defects (screened using pulse oximetry)
   [0346] Critical limb ischemia (leg)
   [0347] Critical limb ischemia with skin lesions
   [0348] Diffuse coronary artery disease
   [0349] Erectile dysfunction
   [0350] Heart disease
   [0351] Heart failure, advanced heart failure, with reduced left ventricular ejection fraction
   [0352] Heart transplants (improve survival of) (superoxide dismutase)
   [0353] Incomplete revascularisation
   [0354] Intermittent claudication
   [0355] Intimal hyperplasia (e.g., by delivering enos, inos)
   [0356] Ischemic heart disease
   [0357] Kuopio Angioplasty
   [0358] Myocardial angiogenesis
   [0359] Myocardial ischemia
   [0360] Painful diabetic peripheral neuropathy
   [0361] Peripheral artery disease
   [0362] Peripheral vascular disease
   [0363] Pulmonary hypertension
   [0364] Refractory angina pectoris
   [0365] Refractory coronary artery disease
   [0366] Restenosis
   [0367] Secondary Raynaud's Phenomenon
   [0368] Severe angina
   [0369] Severe peripheral artery occlusive disease (PAOD)
   [0370] Severe peripheral artery occlusive disease (PAOD) Fontaine stage 3
   [0371] Stable (severe) angina pectoris
   [0372] Stable exertional angina
   [0373] Stenosis prevention
   [0374] Systemic scleroderma
   [0375] Unstable angina
   [0376] Vascular access graft survival in hemodialysis patients
   [0377] Venous leg ulcer
[0378] Cancer, such as
   [0379] Cancer (endostatin, angiostatin, TRAIL, FAS-ligand, cytokines including interferons; inhibitory RNA including without limitation RNAi (such as siRNA or shRNA), antisense RNA and microRNA including inhibitory RNA against VEGF, the multiple drug resistance gene product or a cancer immunogen).
   [0380] EBV+Hodgkin's disease
   [0381] EBV+lymphoma after allo-BMT
   [0382] Follicular non-Hodgkin's lymphoma
   [0383] Graft-versus-host disease
   [0384] Leukemia
   [0385] Lymphoid malignancies
   [0386] Malignant melanoma
   [0387] Neuroblastoma
   [0388] Non-small cell lung cancer
   [0389] Oral Mucositis (associated with cancer therapy)
   [0390] Retinoblastoma
   [0391] Sarcoma
   [0392] Secondary lymphedema associated with the treatment of breast cancer
[0393] Dermatological disorders, such as
   [0394] Murine psoriasiform skin lesions
   [0395] Psoriasis
[0396] Digestive disorders, such as
   [0397] Crohn's disease
   [0398] Ulcerative colitis
[0399] Ear disorders, such as
   [0400] Inner ear disorders
   [0401] Severe hearing loss
[0402] Infectious diseases, such as
   [0403] Adenovirus infection
   [0404] COVID-19
   [0405] Cytomegalovirus (CMV) infection
   [0406] Epstein-bar virus
   [0407] Hepatitis B, C
   [0408] HIV-AIDS
   [0409] Influenza
   [0410] Malaria
   [0411] Parainfluenza virus type 3 (PIV3)
   [0412] Plasmodium falciparum infection
   [0413] Respiratory syncytial virus (RSV) infection
   [0414] Tetanus
   [0415] Tuberculosis
[0416] Inborn errors of amino acid metabolism, such as
   [0417] Argininemia
   [0418] Argininosuccinic aciduria (ASA)
   [0419] Benign hyperphenylalaninemia
   [0420] Citrullinemia (CIT)
   [0421] Citrullinemia type II
   [0422] Defects of biopterin cofactor biosynthesis
   [0423] Defects of biopterin cofactor regeneration
   [0424] Homocystinuria (HCY)
   [0425] Hypermethioninemia
   [0426] Maple syrup urine disease (MSUD)
   [0427] Phenylketonuria (PKU)
   [0428] Tyrosinemia I (TYR I)
   [0429] Tyrosinemia II
   [0430] Tyrosinemia III
[0431] Inborn errors of organic acid metabolism, such as
   [0432] 2-Methyl 3-hydroxy butyric aciduria
   [0433] 2-Methylbutyryl-CoA dehydrogenase deficiency
   [0434] 3-Methylcrotonyl-CoA carboxylase deficiency (3MCC)
   [0435] 3-Methylglutaconyl-CoA hydratase deficiency
   [0436] Adenosylcobalamin synthesis defects
   [0437] Beta-ketothiolase deficiency (BKT)
   [0438] Beta-methyl crotonyl carboxylase deficiency
   [0439] Glutaric acidemia type I (GA I)
   [0440] Glutaric acidemia type II
   [0441] HHH syndrome (Hyperammonemia, hyperornithinemia, homocitrullinuria syndrome)
   [0442] Hydroxymethylglutaryl lyase deficiency (HMG)
   [0443] Isobutyryl-CoA dehydrogenase deficiency
   [0444] Isovaleric acidemia (IVA)
   [0445] Malonic acidemia
   [0446] Methylmalonic acidemia (Cbl C,D)
   [0447] Methylmalonic aciduria, cblA and cblB forms (MMA, Cbl A,B)
   [0448] Methylmalonyl-CoA mutase deficiency (MUT)
   [0449] Multiple-CoA carboxylase deficiency (MCD)
   [0450] Propionic acidemia (PROP)
[0451] Inborn errors of fatty acid metabolism, such as
   [0452] Carnitine palmityl transferase deficiency type 1
   [0453] Carnitine palmityl transferase deficiency type 2
   [0454] Carnitine uptake defect (CUD)
   [0455] Carnitine/acylcarnitine Translocase Deficiency (Translocase)
   [0456] Dienoyl-CoA reductase deficiency
   [0457] Glutaric acidemia type II
   [0458] Long-chain acyl-CoA dehydrogenase deficiency (LCAD)
   [0459] Long-chain hydroxyacyl-CoA dehydrogenase deficiency (LCHAD)
   [0460] Medium-chain acyl-CoA dehydrogenase deficiency (MCAD)
   [0461] Medium-chain ketoacyl-CoA thiolase deficiency
   [0462] Medium/short-chain L-3-hydroxy acyl-CoA dehydrogenase deficiency
   [0463] Multiple acyl-CoA dehydrogenase deficiency (MADD)
   [0464] Short-chain acyl-CoA dehydrogenase deficiency (SCAD)
   [0465] Short-chain hydroxy Acyl-CoA dehydrogenase deficiency (SCHAD)
   [0466] Trifunctional protein deficiency (TFP)
   [0467] Very-long-chain acyl-CoA dehydrogenase deficiency (VLCAD)
   [0468] X-linked adrenoleukodystrophy
[0469] Inflammatory diseases, such as
   [0470] Degenerative joint disease of the knee
   [0471] Herpes simplex virus
   [0472] Inflammatory arthritis
   [0473] Osteoarthritis of the knee (Kellgren & Lawrence grade 2-3)
   [0474] Severe inflammatory disease of the rectum
[0475] Kidney disorders, such as kidney deficiency (erythropoietin)
   [0476] Chronic renal insufficiency
   [0477] Hemodialysis arteriovenous fistula maturation
   [0478] Kidney transplantation
[0479] Liver disorders, such as Hepatitis (a-interferon)
[0480] Lung disorders, such as
   [0481] Alpha-1 antitrypsin
   [0482] Chronic obstructive pulmonary disease (COPD)
   [0483] Lung transplant
[0484] Metabolic disorders, such as
   [0485] Hyperammonemia (ornithine transcarbamylase)
   [0486] Lysosomal storage diseases (Gaucher disease)
   [0487] Phenylketonuria (phenylalanine hydroxylase)
   [0488] Pompe disease
   [0489] Mucopolysaccharidosis type 1
[0490] Miscellaneous multisystem diseases, such as
   [0491] Biotinidase deficiency (BIOT)
   [0492] Classical galactosemia (GALT)
   [0493] Congenital adrenal hyperplasia (CAH)
   [0494] Congenital hypothyroidism (CH)
   [0495] Cystic fibrosis (CF) (cystic fibrosis transmembrane regulator protein)
   [0496] Galactokinase deficiency
   [0497] Galactose epimerase deficiency
   [0498] POEMS syndrome
[0499] Mitochondrial conditions, such as
   [0500] Ethylmalonic encephalopathy
   [0501] Leber's hereditary optic neuropathy (LHON)
[0502] Muscle disorders, such as
   [0503] Muscular dystrophies including Duchenne and Becker (e.g., dystrophin, mini-dystrophin, micro-dystrophin, insulin-like growth factor I, a sarcoglycan (e.g., α, β, γ) inhibitory RNA (e.g, RNAi, antisense RNA or microRNA) against myostatin or myostatin propeptide, laminin-alpha2, Fukutin-related protein, dominant negative myostatin, follistatin, activin type II soluble receptor, antiinflammatory polypeptides such as the Ikappa B dominant mutant, sarcospan, utrophin, mini-utrophin, inhibitory RNA [e.g, RNAi, antisense RNA or microRNA] against splice junctions in the dystrophin gene to induce exon skipping [see, e.g., WO/2003/095647], inhibitory RNA (e.g., RNAi, antisense RNA or micro RNA) against U7 snRNAs to induce exon skipping [see, e.g, WO/2006/021724], and antibodies or antibody fragments against myostatin or myostatin propeptide)
   [0504] Muscle wasting (insulin-like growth factor I, myostatin propeptide, an anti-apoptotic factor, follistatin)
   [0505] Detruser overactivity
   [0506] Overactive bladder syndrome
[0507] Nervous system disorders, such as spinal cerebral ataxias including SCA1, SCA2 and SCA3
[0508] Neurodegenerative disorders, such as
   [0509] Huntington's disease (inhibitory RNA including without limitation RNAi such as siRNA or shRNA, antisense RNA or microRNA to remove repeats)
   [0510] Parkinson's disease (glial-cell line derived neurotrophic factor [GDNF])
[0511] Neurological conditions and pathologies, such as
   [0512] Alzheimer's disease (GDF, neprilysin)
   [0513] Amyotrophic lateral sclerosis (ALS)
   [0514] Aromatic L-amino acid decarboxylase (AADC) deficiency
   [0515] Cerebral adrenoleukodystrophy (CALD)
   [0516] Charcot-marie-tooth Neuropathy type 1A
   [0517] Chronic traumatic brain injury (TBI)
   [0518] Cubital tunnel syndrome
   [0519] Developed metachromatic leukodystrophy and adrenoleukodystrophy
   [0520] Diabetic foot
   [0521] Diabetic insensate foot ulcer
   [0522] Epilepsy (galanin, neurotrophic factors)
   [0523] Intractable Pain
   [0524] Mucolopolysaccharidosis 3A (Sanfilippo Type A syndrome)
   [0525] Neuromyelitis optica spectrum disorders (NMOSD)
   [0526] Peripheral neuropathy
   [0527] Spinal muscular atrophy (SMA)
   [0528] Traumatic brain injury (TBI)
[0529] Ophthalmologic disorders and diseases, such as
   [0530] Achromatopsia
   [0531] Age-related macular degeneration (AMD)
   [0532] AMD (exudative)
   [0533] Blindness (retinitis pigmentosa) (rp)
   [0534] Choroideremia
   [0535] CNGA3-linked achromatopsia
   [0536] Congenital achromatopsia
   [0537] Diabetic macular edema
   [0538] Glaucoma
   [0539] Leber congenital amaurosis (LCA)
   [0540] Leber hereditary optic neuropathy (LHON)
   [0541] Macular degeneration
   [0542] Macular telangiectasia type 2
   [0543] Myopia
   [0544] Neovascular AMD
   [0545] Retinal disease
   [0546] Retinal dystrophy
   [0547] Retinoschisis
   [0548] Stargardt's disease
   [0549] Superficial corneal opacity/corneal scarring
   [0550] Usher syndrome (1B)
   [0551] X-linked rp (xlrp)
   [0552] All the retinal diseases listed at University of Texas RetNet website
[0553] Rheumatic conditions, such as
   [0554] Arthritis (anti-inflammatory factors such as IRAP and TNFa soluble receptor)
   [0555] Other joint disorders (insulin-like growth factors)
   [0556] Rheumatoid arthritis
   [0557] Degenerative arthritis
   [0558] Osteoarthritis
[0559] Other disorders and treatments, such as
   [0560] Allogenic stem cell transplantation
   [0561] Flexor tendon injury
   [0562] Peanut allergy
   [0563] Wound healing

### Vectors and Vector Configurations

[0564] The polynucleotides of the disclosure may be provided as part of a vector. Examples of suitable vectors include expression vectors, viral vectors, and plasmid vectors. Expression vectors can include plasmids, phagemids, viruses, and derivatives thereof. The type of vector used by some embodiments of the disclosure will depend on the cell type transformed. The ability to select suitable vectors according to the cell type transformed is well within the capabilities of the ordinary skilled artisan.

[0565] In some embodiments, the viral vectors may include polynucleotides encoding gene editing polypeptides, such as polypeptides useful for implementation of gene editing techniques. Examples of such gene editing techniques include RNA/DNA guided endonucleases (e.g., CRISPR (clustered regularly interspaced short palindromic repeats)), TALEN (transcription activator-like effector nucleases), ZFN (zinc finger nucleases), recombinase, meganucleases, or viral integration.

[0566] In some embodiments, the polynucleotides of the disclosure may be provided as part of a homology directed repair (HDR) vector. A homology directed repair mechanism may be used to integrate a polynucleotide set into a chromosome. Examples of mechanisms that may be used to integrate a polynucleotide set into a chromosome include sequence-specific nucleases such as transposase, CRISPR/Cas9, ZF nucleases, TALE nucleases, recombinases, and other homologous recombination targeting vectors known in the art.

[0567] Vector components generally include, but are not limited to, one or more of the following: a signal sequence, an origin of replication, one or more marker genes, an enhancer element, a promoter, and a transcription termination sequence. A vector for use in a eukaryotic host cell may also encode a signal sequence or other polypeptide having a specific cleavage site at the N-terminus of the mature protein or polypeptide of interest. The signal sequence selected preferably is one that is recognized and processed (i.e., cleaved by a signal peptidase) by the host cell. In mammalian cell expression, mammalian signal sequences as well as viral secretory leaders may be used. Expression vectors used in eukaryotic host cells will typically also contain sequences necessary for the termination of transcription and for stabilizing the mRNA. Such sequences are commonly available from the 5′ and, occasionally 3′, untranslated regions of eukaryotic or viral DNAs or cDNAs. One useful transcription termination component is the bovine growth hormone polyadenylation region.

[0568] Expression and cloning vectors may contain a selection gene, also termed a selectable marker. Typical selection genes encode proteins that (a) confer resistance to antibiotics or other toxins, e.g., ampicillin, neomycin, methotrexate, or tetracycline, (b) complement auxotrophic deficiencies, where relevant, or (c) supply critical nutrients not available from complex media.

[0569] The polynucleotides of the disclosure may in some cases be provided as part of a single vector. The polynucleotides of the disclosure may be provided as part of a set of at least two vectors; a first vector including the first polynucleotide and a second vector comprising the second polynucleotide. In some cases, inducible and constitutive parts of the system are provided on separate vectors, i.e., a first vector comprising the inducible polynucleotide component; and a second vector comprising the constitutive polynucleotide component.

[0570] Examples of vectors suitable for use with the polynucleotides of the disclosure include adenoviral vectors, lentiviral vectors, baculoviral vectors, Epstein Barr viral vectors, papovaviral vectors, vaccinia viral vectors, herpes simplex viral vectors, adeno associated virus (AAV) vectors, and transposon vectors. The polynucleotides of the disclosure may be provided as part of a homology directed repair vector.

[0571] The disclosure provides a polynucleotide set that includes the following as part of one or more vectors:
[0572] (i) a first polynucleotide that includes a promoter sequence operatively linked to a gene of interest; and
[0573] (ii) a second polynucleotide that includes a polynucleotide encoding a first fusion protein that includes a first dimerization polypeptide linked to a DNA binding domain specific for the promoter sequence of the gene of interest and a polynucleotide encoding a second fusion protein that includes a transcriptional or epigenetic regulation domain linked to a second dimerization polypeptide; wherein interaction of the first and second dimerization polypeptides is mediated by the presence of a small molecule.

[0574] The disclosure provides a polynucleotide set that includes the following as part of one or more vectors:
[0575] (i) an inducible polynucleotide component encoding an inducible promoter sequence operatively linked to a gene of interest, and
[0576] (ii) a constitutive polynucleotide component encoding at least one constitutive promoter sequence operatively linked to a polynucleotide encoding a split transcription factor, wherein the split transcription factor may include (a) a first fusion protein that includes an NS3a polypeptide and a DNA binding domain (DBD) and (b) a second fusion protein that includes a reader polypeptide and a transcriptional activation domain (TAD), wherein interaction between the NS3a polypeptide and reader polypeptide is controlled by the presence of a small molecule.

[0577] The disclosure provides a polynucleotide set that includes the following as part of one or more vectors:
[0578] (i) an inducible polynucleotide component encoding an inducible promoter sequence operatively linked to a gene of interest; and
[0579] (ii) a constitutive polynucleotide component encoding at least one constitutive promoter sequence operatively linked to a polynucleotide encoding a split transcription factor, wherein the split transcription factor may include (a) a first fusion protein that includes an NS3a polypeptide and transcriptional activation domain (TAD) and (b) a second fusion protein that includes a reader polypeptide and a DNA binding domain (DBD), wherein interaction between the NS3a polypeptide and reader polypeptide is controlled by the presence of a small molecule.

[0580] In various embodiments, the inducible polynucleotide component may include a polynucleotide that includes:
[0581] (i) a transcription factor-specific recognition sequence that includes a transcription factor-specific response element,
[0582] (ii) a minimal promoter sequence operatively linked to a gene of interest, and
[0583] (iii) one or more optional regulatory sequences, wherein the response element, minimal promoter, and optional regulatory sequence are configured for expression of the gene of interest.

### Single Vector Configuration

[0584] FIG. 2 illustrates a schematic diagram of examples of a unidirectional forward configuration 200, a unidirectional reverse configuration 210, and a bidirectional head-to-toe configuration 215 for encoding an inducible polynucleotide component and a constitutive polynucleotide component on a single vector. Each vector configuration 200, 210, and 215 is an example of a small molecule-regulated gene expression system consisting of a constitutive polynucleotide component configured for expressing a split transcription factor and an inducible polynucleotide component that is bound by that transcription factor to regulate the expression of a gene of interest. The encoded split transcription factor may include two polypeptide chains: (1) a DNA binding domain (DBD) fused to a first dimerization polypeptide, NS3a, and (2) a transcriptional activation domain (TAD) fused to second dimerization polypeptide, designated as “Reader.” In one example, the reader polypeptide is a DNCR2 polypeptide. The first and second dimerization polypeptides are selected so that interaction of the first and second dimerization polypeptides is mediated by the presence of a small molecule. A separation element includes a polynucleotide sequence that prevents fusion of the two polypeptide chains is positioned between the sequences encoding the split transcription factor. The constitutive promoter component may also include optional regulatory sequences such as a polyA sequence. The inducible promoter component consists of a minimal promoter with one or more 5′ response element repeats (RE) that are recognized and bound by the DBD. The inducible promoter component may also include optional regulatory sequences such as a polyA sequence.

### Two-Vector Configuration

[0585] In some embodiments, the polynucleotide set that includes the inducible and constitutive polynucleotide components is integrated on two vectors, wherein: (i) a first vector may include the inducible polynucleotide component, and (ii) a second vector may include the constitutive polynucleotide component. The vector that includes the inducible polynucleotide component may be referred to as an “inducible promoter vector” (IPV). The vector that includes the constitutive polynucleotide components may be referred to as a “transcription factor vector” (TFV).

[0586] In some embodiments, the first vector that includes the inducible polynucleotide component lacks a constitutive promoter and/or a transduction marker.

[0587] In some embodiments, the first vector that includes the inducible polynucleotide component further includes a constitutive promoter and/or a transduction marker.

[0588] FIG. 3 illustrates a schematic diagram of an example of a small molecule-regulated gene expression system that includes a first vector that includes an inducible polynucleotide component for expression of a gene of interest and a second vector that includes a constitutive polynucleotide component for expression of a split transcription factor. On a first vector backbone, the inducible polypeptide component includes one or more response elements (e.g., 5 response elements) and a minimal promoter sequence linked to an inducible gene of interest. The inducible polynucleotide component may also include regulatory sequences such as a polyA sequence, insulators, or posttranscriptional regulatory elements such as WPRE placed 5′ or 3′ to the coding region to improve system performance.

[0589] Referring still to FIG. 3, on a second vector backbone, the constitutive polynucleotide component includes a separation element (P2a, etc.) or a second constitutive promoter can be used to produce separate polypeptide chains of the split transcription factor, which can be composed of different fusion variants of DNA binding domain, transcriptional regulatory domain, NS3a, and a reader protein (DNCR2, ANR, GNCR1, or minimized/modified variants thereof). Optional regulatory sequences such as polyAs, insulators, or WPRE can be placed 5′ or 3′ to the coding regions to improve system performance (see Table 1).

[0590] The disclosure provides compositions comprising a polynucleotide set that includes a constitutive polynucleotide component encoding a split transcription factor and an inducible polynucleotide component that is bound by that transcription factor to regulate the expression of a gene of interest.

[0591] A polynucleotide set of the disclosure may be provided as part of a vector. In some embodiments, the inducible and constitutive polynucleotide components of the polynucleotide set may be provided as part of a single vector.

[0592] The disclosure provides a composition that includes a single vector comprising an inducible polynucleotide component linked to a gene of interest and a constitutive polynucleotide component encoding a split transcription for regulating the expression of the gene of interest. In some embodiments, the composition may be used for producing a polypeptide product of interest.

[0593] In some embodiments, the composition may be used for treating a subject in need of a therapy. The disclosure provides a pharmaceutical composition that includes: (i) a single vector comprising an inducible polynucleotide component linked to a gene of interest and a constitutive polynucleotide component encoding a split transcription for regulating the expression of the gene of interest, and (ii) a pharmaceutically acceptable carrier, excipient, and/or stabilizer.

[0594] In some embodiments, the constitutive and inducible polynucleotide components may be provided as part of a set of at least two vectors, wherein, for example, a first vector includes the inducible polynucleotide component, and a second vector includes the constitutive polynucleotide component.

[0595] In some embodiments, the disclosure provides a composition that includes: (i) a first vector comprising an inducible polynucleotide component, and (ii) a second vector that includes a constitutive polynucleotide component encoding a split transcription for regulating the expression of the gene of interest. In some embodiments, the composition may be used for producing a polypeptide product of interest.

[0596] In some embodiments, the composition may be used for treating a subject in need of a therapy. The disclosure provides a composition that includes: (i) a first vector comprising an inducible polynucleotide component, (ii) a second vector that includes a constitutive polynucleotide component encoding a split transcription for regulating the expression of the gene of interest, and (iii) a pharmaceutically acceptable carrier, excipient, and/or stabilizer.

### Host Cells

[0597] Expression vectors of the disclosure may be expressed in host cells. Host cells may, for example, be prokaryotic cells, such as bacteria cells; or eukaryotic cells, such as yeast cells, plant cells, or mammalian cells. Examples of mammalian cells suitable for use with the disclosure include human, mouse, rat, pig, rabbit, sheep, and goat cells. In some cases, the cells are synthetic cells.

[0598] A host cell may, for example, be selected from the group consisting of: cardiac cell, lung cell, muscle cell, epithelial cell, pancreatic cell, skin cell, CNS cell, neuron, myocyte, skeletal muscle cell, smooth muscle cell, liver cell, kidney cell and glial cell.

[0599] In some embodiments, a host cell is a human cell ex vivo. In some embodiments, a host cell is a human cell in vivo.

[0600] In some embodiments, a host cell is a stem cell such as a pluripotent stem cell or a hematopoietic stem cell.

[0601] In some embodiments, a host cell is a multipotent cell or a mesenchymal cell or a mesenchymal stromal cell (MSC).

[0602] In some embodiments, a host cell is a stem cell and the polynucleotides of the disclosure are used to control differentiation for cell products being generated from pluripotent cells, such as pluripotent stem cells. The drug-inducible gene expression system may, for example, be used to control the timing/dosage of transcription factors driving the differentiation.

[0603] In some embodiments, a host cell is not pluripotent and the polynucleotides of the disclosure are used to control reprogramming of the cell to induce pluripotency. The drug-inducible gene expression system may, for example, be used to control the timing/dosage of transcription factors driving the reprogramming.

[0604] In some embodiments, a host cell is part of an organism. In addition to the therapeutic embodiments described elsewhere herein, the cells may be part of a model organism. The drug-inducible gene expression system may, for example, be used to control expression producing a characteristic for scientific study, such as a disease characteristic or a biological enhancement. Examples of suitable model organisms include yeast, fruit flies, nematodes, frogs, mice and fish (such as zebrafish). The gene of interest may, for example, be a dysfunctional polypeptide, or a polypeptide that interacts with or modulates a gene of the organism, or that interferes with a metabolic process. The small molecules of the disclosure may be administered to modulate or titrate expression and thus produce variation in the characteristic being studied.

[0605] In some embodiments, a host cell is a cancer cell and/or a non-cancer cell from a human subject diagnosed with cancer.

[0606] In some embodiments, a host cell is an immune cell selected from the group consisting of: leukocyte, lymphocyte, T cell, regulatory T cell, effector T cell, CD4+ effector T cell, CD8+ effector T cell, memory T cell, autoreactive T cell, exhausted T cell, natural killer T cell, B cell, dendritic cell, and macrophage.

[0607] In some embodiments, a host cell is a producer cell line wherein cells of the cell line comprise a polynucleotide set configured for producing a product of interest.

[0608] Host cells may be transformed with one or more polynucleotides or vectors of the disclosure and cultured in nutrient media. Nutrient media may be formulated for inducing promoters, selecting transformants, or amplifying the genes of interest.

[0609] In some embodiments, the cell is a mammalian cell or cell line. Non-limiting examples include African green monkey kidney cells (VERO-76, ATCC CRL-1587); baby hamster kidney cells (BHK, ATCC CCL 10); BALB/c mouse myeloma lines (NSO/I, ECACC No: 85110503); buffalo rat liver cells (BRL 3A, ATCC CRL 1442); canine kidney cells (MDCK, ATCC CCL 34); Chinese hamster ovary (CHO) cell or cell line, CHO-K1 cell line (see, e.g., ATCC catalog no. CCL-61™ and Lewis, N. E. et al. (2013) Nat. Biotechnol. 31:759-765); Chinese hamster ovary cells +/−DHFR (see. e.g., Urlaub, G. and Chasin, L. A. (1980) Proc. Natl. Acad. Sci. 77:4216-4220); FS4 cells; HEK 293 cells; HT-1080 cells (ATCC® CCL-121™); human cervical carcinoma cells (HeLa, ATCC CCL-2); human embryonic kidney cell lines (293 or 293 cells subcloned for growth in suspension culture, Graham et al, J. Gen Virol. 36:59 (1977)); human hepatoma line (Hep G2); human liver cells (Hep G2, HB 8065); human lung cells (W138, ATCC CCL 75); human retinoblasts (PER.C6, CruCell, Leiden, The Netherlands); monkey kidney cells (CV1 ATCC CCL 70); monkey kidney CV1 line transformed by SV40 (COS-7, ATCC CRL 1651); mouse Sertoli cells (TM4, Mather, Biol. Reprod. 23:243-251 (1980)); mouse mammary tumor (MMT 060562, ATCC CCL51); MRC 5 cells; TRI cells (Mather et al., Annals N. Y. Acad. Sci. 383:44-68 (1982)); and engineered T cells and engineered natural killer cells.

[0610] A polynucleotide set of the disclosure may be provided in a host cell. The cells can be transiently or stably engineered to incorporate the polynucleotide set of the disclosure. The disclosure provides a cell comprising a polynucleotide set that includes a constitutive polynucleotide component encoding a split transcription factor and an inducible polynucleotide component that is bound by that transcription factor to regulate the expression of a gene of interest.

[0611] The disclosure provides a composition comprising a cell modified to express a polynucleotide set. In some embodiments, the cell composition may be used for producing a polypeptide product of interest. The expressed polypeptide can be recovered from the cell free extract or recovered from the culture medium.

[0612] In some embodiments, the composition may be used for treating a subject in need of a therapy. The disclosure provides a pharmaceutical composition that includes: (i) a cell which has been modified to express a polynucleotide set, and (ii) a pharmaceutically acceptable carrier, excipient, or stabilizer.

[0613] The cells may include polynucleotides of the disclosure expressing a gene of interest that provides a therapeutic benefit. Expression of the gene of interest may confer the cells with ability to attack tumor cells. The gene of interest may be a chimeric antigen receptor (CAR), e.g., a chimeric antigen receptor that targets tumor cells. The gene of interest may express a single-chain antibody fragment linked to a hinge linked to a transmembrane region. The transmembrane region may be linked to an intracellular signaling domain. The transmembrane region may be linked to a costimulatory domain.

[0614] The cells of the composition may, for example, be T cells. The cells of the composition may, for example, be CAR-T cells.

[0615] In some embodiments, the disclosure provides a cell composition comprising a means for reducing, ameliorating, or inhibiting exhaustion and/or dysfunction in a population of immune cells, e.g., immune cells expressing a CAR. In some embodiments, the means comprise expressing the CAR as a gene of interest in a polynucleotide set.

### Methods of Making Small Molecules

[0616] The small molecules of the disclosure may be synthesized using known techniques. Danoprevir ((2R,6S,12Z,13aS,14aR,16aS)-14a-[(Cyclopropylsulfonyl)carbamoyl]-6-({[(2-methyl-2-propanyl)oxy]carbonyl}amino)-5,16-dioxo-1,2,3,5,6,7,8,9,10,11,13a,14,14a,15,16,16a-hexadecahydrocyclopropa[e]pyrrolo[1,2-a][1,4]diazacyclopentadecin-2-yl 4-fluoro-1,3-dihydro-2H-isoindole-2-carboxylate) may be synthesized using known techniques. See for example, Carreira, Erick Moran, Hisashi Yamamoto, and N. K. Yee. “Industrial Applications of Asymmetric Synthesis.” In Comprehensive Chirality 9, Amsterdam: Elsevier, 2012. Section 9.19.6, Danoprevir, the disclosure of which is incorporated herein by reference.

### Methods of Making Polynucleotides

[0617] The disclosure provides methods of producing the polynucleotides of the disclosure, such as DNA vectors of the disclosure and their subcomponents, as well as packaging vectors and plasmids of the disclosure. Standard molecular biology techniques may be used to assemble the polynucleotides of the disclosure. Polynucleotides can be chemically synthesized.

### Methods of Making Packaged Viral Capsids

[0618] The disclosure includes methods of making viral capsids containing polynucleotides of the disclosure. In general, viral capsids of the disclosure may be produced by supplying cells with packaging polynucleotides of the disclosure. The packaging polynucleotides may be supplied to packaging cells as plasmids. The packaging cells may be cultured to produce the viral capsids containing polynucleotides of the disclosure. Preferably the packaged viral capsids are replication incompetent.

[0619] A variety of commercially available kits are suitable for producing packaged viral capsids of the disclosure. Examples include: MISSION® Lentiviral Packaging Mix (available from Millipore Sigma); LV-Max Lentiviral Packaging Mix (available from ThermoFisher Scientific).

[0620] Viral capsid produced by packaging cells may be purified for use in downstream methods, such as delivery to cells for use in production of polypeptides, delivery to cells for use in cell-based therapies, or delivery to subjects for gene therapy methods. Purification may include processing to eliminate contaminants from host cells or culture media. Purification steps may include steps based on physical and/or chemical characteristics of the plasmids. Chemical characteristics may include, for example, hydrophilicity-hydrophobicity. Physical characteristics may include, for example, size. Examples of purification strategies based on particle size include density-gradient ultracentrifugation, ultrafiltration, precipitation, two-phase extraction systems and size exclusion chromatography. In some cases, precipitation may be employed together with centrifugation, e.g., using polyethylene glycol, ammonium sulfate or calcium phosphate. In some cases, aqueous two-phase separation systems with PEG, dextran or polyvinyl alcohol may be used. In some cases, membrane-based tangential flow filtration techniques are used; examples include ultrafiltration, diafiltration and microfiltration. In other embodiments, chromatographic means may be used for purifying viral capsids. In still other embodiments, immunoaffinity methods may be used to capture capsids using monoclonal antibodies having specificity to the relevant capsids. See Morenweiser, R., “Downstream processing of viral vectors and vaccines,” Gene Therapy (2005) 12, S103-S110 (2005), the entire disclosure of which is incorporated herein by reference.

[0621] Examples of suitable viral capsids include, but are not limited to, adenovirus, retrovirus, Lentivirus, Sendai virus vector, a baculovirus, Epstein Barr virus, a papovavirus, a vaccinia virus, a herpes simplex virus, and an adeno-associated virus (AAV).

### Methods of Making Cells

[0622] The disclosure provides methods of making a modified cell to express a gene of interest.

[0623] In some embodiments, the disclosure provides a method of making a modified cell that expresses a polynucleotide set for isolation of a polypeptide product of interest. In one embodiment, the disclosure provides a method of generating or preparing cells for expression and isolation of a polypeptide product of interest from a polynucleotide set integrated into a single vector. In one embodiment, the disclosure provides a method of generating or preparing cells for expression and isolation of a polypeptide product of interest from a polynucleotide set integrated into two (or more) vectors.

[0624] In some embodiments, the disclosure provides a method of making a therapeutic cell that expresses a polynucleotide set for use in treating a subject in need of a cell therapy. In one embodiment, the disclosure provides a method of generating or preparing a therapeutic cell that expresses a gene of interest from a polynucleotide set integrated into a single vector. In one embodiment, the disclosure provides a method of generating or preparing a therapeutic cell that expresses a gene of interest from a polynucleotide set integrated into two (or more) vectors.

[0625] In some embodiments, the polynucleotides of the disclosure are maintained as extrachromosomal polynucleotides in the host cell. In some embodiments, the polynucleotides of the disclosure are present in a vector (e.g., expression vector) in the host cell. In some embodiments, the polynucleotides of the disclosure or subcomponents thereof, are integrated into a chromosome of the host cell.

[0626] Various methods can be used to introduce the expression vector of some embodiments of the disclosure into cells to produce cells of the disclosure. See for example, Green, et al., Molecular cloning: A laboratory manual. Cold Spring Harbor, NY: Cold Spring Harbor Laboratory Press (2014).

[0627] Methods of introducing nucleic acid alterations to a gene of interest are well known in the art. Examples include targeted homologous recombination (e.g. “Hit and run”, “double-replacement”), site specific recombinases (e.g. the Cre recombinase and the Flp recombinase), PB transposases (e.g. Sleeping Beauty, piggyBac, To12 or Frog Prince), genome editing by engineered nucleases (e.g. meganucleases, Zinc finger nucleases (ZFNs), transcription-activator like effector nucleases (TALENs) and CRISPR/Cas system) and genome editing using recombinant adeno-associated virus (rAAV) platform. Agents for introducing nucleic acid alterations to a gene of interest can be designed using publicly available sources or obtained commercially from Transposagen, Addgene and Sangamo Biosciences. Vectors of the disclosure may make use of these methods for integrating polynucleotides of the disclosure into a host genome. Vectors of the disclosure may include polynucleotides encoding polypeptides required for implementation of these methods for integrating polynucleotides of the disclosure into a host genome.

[0628] Various approaches suitable for integrating a polynucleotide(s) into a host cell genome are known in the art, including random integration or site-specific integration (e.g., a“landing pad” approach); see, e.g., Zhao, M. el al. (2018) Appl. Microbiol. Biotechnol. 102:6105-6117; Lee, J. S. et al. (2015) Sci. Rep. 5:8572; and Gaidukov, L. et al. (2018) Nucleic Acids Res. 46:4072-4086. Vectors of the disclosure may make use of these methods for integrating polynucleotides of the disclosure into a host genome. Vectors of the disclosure may include polynucleotides encoding polypeptides required for implementation of these methods for integrating polynucleotides of the disclosure into a host genome.

[0629] Examples of commercially available media suitable for culturing host cells of the disclosure include Ham's F10 (Sigma), Minimal Essential Medium ((MEM), (Sigma), RP MI-1640 (Sigma), and Dulbecco's Modified Eagle's Medium ((DMEM), Sigma).

[0630] Culture media may be supplemented as necessary with hormones and/or other growth factors (such as insulin, transferrin, or epidermal growth factor), salts (such as sodium chloride, calcium, magnesium, and phosphate), buffers (such as HEPES), nucleotides (such as adenosine and thymidine), antibiotics (such as GENTAMYCIN™ drug), trace elements (defined as inorganic compounds usually present at final concentrations in the micromolar range), and glucose or an equivalent energy source. Any other necessary supplements may also be included at appropriate concentrations that would be known to those skilled in the art. Culture conditions, such as temperature, pH, and the like, will be apparent to the ordinarily skilled artisan.

### Methods of Making Polypeptides and Cellular Metabolites

[0631] The disclosure provides methods of manufacturing polypeptides. The methods may make use of cells of the disclosure treated with the small molecules of the disclosure.

[0632] The disclosure provides methods of producing a vector comprising a polynucleotide set, delivering the vector into a cell (e.g., in vivo, in vitro, or ex vivo), and expressing the polynucleotide set to provide and/or control a cellular function. Expression may be modulated by a small molecule of the disclosure.

[0633] In one embodiment, the method comprises the steps of (a) modifying a cell using a polynucleotide set encoding a polypeptide product of interest to yield a producer cell line; (b) culturing the producer cell line under conditions conducive for expression of the polypeptide product, (c) modulating production of the polypeptide product by delivering to the cell line a small molecule of the disclosure; and (d) optionally, recovering the expressed polypeptide.

[0634] In one embodiment, the method comprises the steps of (a) modifying a cell using a polynucleotide set encoding a polypeptide product of interest to yield a producer cell line; (b) culturing the producer cell line under conditions conducive for expression of the polypeptide product, (c) measuring the polypeptide of interest; (d) modulating production of the polypeptide product by delivering to the cell line a small molecule of the disclosure; and (d) optionally, recovering the expressed polypeptide.

[0635] The expressed polypeptide may, for example, be recovered from a cell free extract or recovered from the culture medium.

[0636] In one example, the polypeptide product of interest is a therapeutic protein or peptide.

[0637] Polypeptide products of interest may be produced intracellularly, or directly secreted into the medium. If the polypeptide is produced intracellularly, cells may be lysed. Particulate debris may be removed, for example, by centrifugation or ultrafiltration. Where the polypeptide is secreted into the medium, supernatants from such expression systems may optionally be concentrated, e.g., using a commercially available protein concentration filter, for example, an Ami con or Millipore Pellicon ultrafiltration unit. A protease inhibitor such as PMSF may be included in any of the foregoing steps to inhibit proteolysis and antibiotics may be included to prevent the growth of adventitious contaminants.

[0638] Polypeptides may be purified using, for example, hydroxylapatite chromatography, gel electrophoresis, dialysis, and affinity chromatography, fractionation on an ion-exchange column, ethanol precipitation, Reverse Phase HPLC, chromatography on silica, chromatography on heparin SEPHAROSE™ chromatography on an anion or cation exchange resin (such as a polyaspartic acid column), low pH hydrophobic interaction chromatography, chromatofocusing, SDS-PAGE, ammonium sulfate precipitation, fractionation on immunoaffmity or ion-exchange columns, ethanol precipitation, reverse phase HPLC, chromatography on silica or on a cation-exchange resin such as DEAE, chromatofocusing, SDS-PAGE, ammonium sulfate precipitation, and gel filtration

[0639] Polypeptide products of interest may be purified to obtain preparations that are substantially homogeneous for further assays and uses. Polypeptide products of interest may be purified to obtain preparations that are sufficiently homogenous for pharmaceutical uses.

[0640] Embodiments of the disclosure may make use of cells transformed with the polynucleotides of the disclosure for making cellular metabolites. For example, cells transformed with the polynucleotides of the disclosure may be used to transform substrates into products, e.g., alcohol products, such as ethanol, acetone, and butanol. Metabolites include, for example, products of metabolic pathways, such as glycolysis, fatty acid synthesis, the TCA cycle, phosphorylation pathways and the pentose phosphate pathway.

### Cell Therapy Methods

[0641] The disclosure provides methods of treating a subject in need of a cell therapy. The method comprises the steps of (a) administering to the subject an effective amount of a pharmaceutical composition comprising a therapeutic cell encoding a polypeptide product of interest; and (b) administering a therapeutically effective amount of a small molecule to the subject.

[0642] In one embodiment, the disclosure provides a method for treating a cancer, e.g., a tumor, in a subject in need thereof. Examples of cancers that can be treated using a pharmaceutical composition disclosed herein include, but are not limited to, melanomas, lymphomas, sarcomas, and cancers of the colon, kidney, stomach, bladder, brain (e.g., gliomas, glioblastomas, astrocytomas, medulloblastomas), prostate, bladder, rectum, esophagus, pancreas, liver, lung, breast, uterus, cervix, ovary, blood (e.g., acute myeloid leukemia, acute lymphoid leukemia, chronic myeloid leukemia, chronic lymphocytic leukemia, Burkitt's lymphoma, EBV-induced B-cell lymphoma).

[0643] In one embodiment, the disclosure provides a method of controlling a T cell-mediated immune response in a subject in need thereof.

[0644] In one embodiment, the disclosure provides a method of stimulating a T cell-mediated immune response to a target cell population or tissue in a subject.

[0645] In one embodiment, the disclosure provides a method of providing an anti-tumor immunity in a subject.

### Gene Therapy Methods

[0646] The disclosure provides methods of delivering a polynucleotide set of the disclosure to a subject. A polynucleotide set of the disclosure may be delivered into a cell of a subject. The method may include administering a pharmaceutically effective amount of the polynucleotide set to the subject. Administration may be via administration of viral particles including one or more polynucleotides of the disclosure. Administration may be via administration of a pharmaceutical composition including one or more polynucleotides of the disclosure.

[0647] The method comprises the steps of (a) administering to the subject an effective amount of a pharmaceutical composition comprising a polynucleotide set encoding a polypeptide product of interest; (b) administering a therapeutically effective amount of a small molecule to the subject; (c) monitoring the production of the therapeutic polypeptide in the subject; and (d) optionally, adjusting the dosage of the small molecule to adjust production of the polypeptide product to the subject to a desired level.

[0648] The subject may be a mammalian subject. The subject may be a human subject.

[0649] Examples of conditions that may be selected for gene therapy include, but are not limited to, cancer, cystic fibrosis, heart disease, diabetes, hemophilia, and AIDS.

### Kits

[0650] The disclosure provides kits or articles of manufacture comprising polynucleotides of the disclosure and a preparation for delivery of the polynucleotides to cells. The polynucleotides may be provided as part of a vector of the disclosure. In some embodiments, the kit or article of manufacture further comprises instructions for using the set of the polynucleotides to transform cells to express a gene of interest to produce a polypeptide of interest.

[0651] In some cases, the kits may also include a small molecule of the disclosure.

### Tables

TABLE A
Target sequences.

| Target Name | Sequence |
|---|---|
| Nuclear receptor | MPCIQAQYGTPAPSPGPRDHLASDPLTPEFIKPTMDLASPEAA |
| subfamily 4 group A | PAAPTALPSFSTFMDGYTGEFDTFLYQLPGTVQPCSSASSSAS |
| member 1 (NR4A1), | STSSSSATSPASASFKFEDFQVYGCYPGPLSGPVDEALSSSGS |
| isoform 1, | DYYGSPCSAPSPSTPSFQPPQLSPWDGSFGHFSPSQTYEGLRA |
| UniProtKB | WTEQLPKASGPPQPPAFFSFSPPTGPSPSLAQSPLKLFPSQATH |
| Accession No. | QLGEGESYSMPTAFPGLAPTSPHLEGSGILDTPVTSTKARSGA |
| P22736-1 | PGGSEGRCAVCGDNASCQHYGVRTCEGCKGFFKRTVQKNA |
| SEQ ID NO: 182 | KYICLANKDCPVDKRRRNRCQFCRFQKCLAVGMVKEVVRT |
| | DSLKGRRGRLPSKPKQPPDASPANLLTSLVRAHLDSGPSTAK |
| | LDYSKFQELVLPHFGKEDAGDVQQFYDLLSGSLEVIRKWAE |
| | KIPGFAELSPADQDLLLESAFLELFILRLAYRSKPGEGKLIFCS |
| | GLVLHRLQCARGFGDWIDSILAFSRSLHSLLVDVPAFACLSA |
| | LVLITDRHGLQEPRRVEELQNRIASCLKEHVAAVAGEPQPAS |
| | CLSRLLGKLPELRTLCTQGLQRIFYLKLEDLVPPPPIIDKIFMD |
| | TLPF |
| Nuclear receptor | MWLAKACWSIQSEMPCIQAQYGTPAPSPGPRDHLASDPLTP |
| subfamily 4 group A | EFIKPTMDLASPEAAPAAPTALPSFSTFMDGYTGEFDTFLYQ |
| member 1 (NR4A1), | LPGTVQPCSSASSSASSTSSSSATSPASASFKFEDFQVYGCYP |
| isoform 2, | GPLSGPVDEALSSSGSDYYGSPCSAPSPSTPSFQPPQLSPWDG |
| UniProtKB | SFGHFSPSQTYEGLRAWTEQLPKASGPPQPPAFFSFSPPTGPS |
| Accession No. | PSLAQSPLKLFPSQATHQLGEGESYSMPTAFPGLAPTSPHLEG |
| P22736-2 | SGILDTPVTSTKARSGAPGGSEGRCAVCGDNASCQHYGVRT |
| SEQ ID NO: 183 | CEGCKGFFKRTVQKNAKYICLANKDCPVDKRRRNRCQFCRF |
| | QKCLAVGMVKEVVRTDSLKGRRGRLPSKPKQPPDASPANLL |
| | TSLVRAHLDSGPSTAKLDYSKFQELVLPHFGKEDAGDVQQF |
| | YDLLSGSLEVIRKWAEKIPGFAELSPADQDLLLESAFLELFIL |
| | RLAYRSKPGEGKLIFCSGLVLHRLQCARGFGDWIDSILAFSRS |
| | LHSLLVDVPAFACLSALVLITDRHGLQEPRRVEELQNRIASC |
| | LKEHVAAVAGEPQPASCLSRLLGKLPELRTLCTQGLQRIFYL |
| | KLEDLVPPPPIIDKIFMDTLPF |
| Nuclear receptor | MPCIQAQYGTPAPSPGPRDHLASDPLTPEFIKPTMDLASPEAA |
| subfamily 4 group A | PAAPTALPSFSTFMDGYTGEFDTFLYQLPGTVQPCSSASSSAS |
| member 1 (NR4A1), | STSSSSATSPASASFKFEDFQVYGCYPGPLSGPVDEALSSSGS |
| isoform 3, | DYYGSPCSAPSPSTPSFQPPQLSPWDGSFGHFSPSQTYEGLRA |
| UniProtKB | WTEQLPKASGPPQPPAFFSFSPPTGPSPSLAQSPLKLFPSQATH |
| Accession No. | QLGEGESYSMPTAFPGLAPTSPHLEGSGILDTPVTSTKARSGA |
| P22736-3 | PGGSEGRCAVCGDNASCQHYGVRTCEGCKGFFKVPRSPRW |
| SEQ ID NO: 184 | GLLLEMERGWPHPIGTCGLPLGSPPS |
| Nuclear receptor | MPCVQAQYGSSPQGASPASQSYSYHSSGEYSSDFLTPEFVKF |
| subfamily 4 group A | SMDLTNTEITATTSLPSFSTFMDNYSTGYDVKPPCLYQMPLS |
| member 2 (NR4A2), | GQQSSIKVEDIQMHNYQQHSHLPPQSEEMMPHSGSVYYKPS |
| isoform 1, | SPPTPTTPGFQVQHSPMWDDPGSLHNFHQNYVATTHMIEQR |
| UniProtKB | KTPVSRLSLFSFKQSPPGTPVSSCQMRFDGPLHVPMNPEPAG |
| Accession No. | SHHVVDGQTFAVPNPIRKPASMGFPGLQIGHASQLLDTQVPS |
| P43354-1 | PPSRGSPSNEGLCAVCGDNAACQHYGVRTCEGCKGFFKRTV |
| SEQ ID NO: 185 | QKNAKYVCLANKNCPVDKRRRNRCQYCRFQKCLAVGMVK |
| | EVVRTDSLKGRRGRLPSKPKSPQEPSPPSPPVSLISALVRAHV |
| | DSNPAMTSLDYSRFQANPDYQMSGDDTQHIQQFYDLLTGS |
| | MEIIRGWAEKIPGFADLPKADQDLLFESAFLELFVLRLAYRS |
| | NPVEGKLIFCNGVVLHRLQCVRGFGEWIDSIVEFSSNLQNMN |
| | IDISAFSCIAALAMVTERHGLKEPKRVEELQNKIVNCLKDHV |
| | TFNNGGLNRPNYLSKLLGKLPELRTLCTQGLQRIFYLKLEDL |
| | VPPPAIIDKLFLDTLPF |
| Nuclear receptor | MDNYSTGYDVKPPCLYQMPLSGQQSSIKVEDIQMHNYQQH |
| subfamily 4 group A | SHLPPQSEEMMPHSGSVYYKPSSPPTPTTPGFQVQHSPMWD |
| member 2 (NR4A2), | DPGSLHNFHQNYVATTHMIEQRKTPVSRLSLFSFKQSPPGTP |
| isoform 2, | VSSCQMRFDGPLHVPMNPEPAGSHHVVDGQTFAVPNPIRKP |
| UniProtKB | ASMGFPGLQIGHASQLLDTQVPSPPSRGSPSNEGLCAVCGDN |
| Accession No. | AACQHYGVRTCEGCKGFFKRTVQKNAKYVCLANKNCPVD |
| P43354-2 | KRRRNRCQYCRFQKCLAVGMVKEVVRTDSLKGRRGRLPSK |
| SEQ ID NO: 186 | PKSPQEPSPPSPPVSLISALVRAHVDSNPAMTSLDYSRFQANP |
| | DYQMSGDDTQHIQQFYDLLTGSMEIIRGWAEKIPGFADLPK |
| | ADQDLLFESAFLELFVLRLAYRSNPVEGKLIFCNGVVLHRLQ |
| | CVRGFGEWIDSIVEFSSNLQNMNIDISAFSCIAALAMVTERHG |
| | LKEPKRVEELQNKIVNCLKDHVTFNNGGLNRPNYLSKLLGK |
| | LPELR |
| Nuclear receptor | MPCVQAQYSPSPPGSSYAAQTYSSEYTTEIMNPDYTKLTMD |
| subfamily 4 group A | LGSTEITATATTSLPSISTFVEGYSSNYELKPSCVYQMQRPLIK |
| member 3 (NR4A3), | VEEGRAPSYHHHHHHHHHHHHHHQQQHQQPSIPPASSPEDE |
| isoform alpha, | VLPSTSMYFKQSPPSTPTTPAFPPQAGALWDEALPSAPGCIAP |
| UniProtKB | GPLLDPPMKAVPTVAGARFPLFHFKPSPPHPPAPSPAGGHHL |
| Accession No. | GYDPTAAAALSLPLGAAAAAGSQAAALESHPYGLPLAKRA |
| Q92570-1 | APLAFPPLGLTPSPTASSLLGESPSLPSPPSRSSSSGEGTCAVC |
| SEQ ID NO: 187 | GDNAACQHYGVRTCEGCKGFFKRTVQKNAKYVCLANKNC |
| | PVDKRRRNRCQYCRFQKCLSVGMVKEVVRTDSLKGRRGRL |
| | PSKPKSPLQQEPSQPSPPSPPICMMNALVRALTDSTPRDLDYS |
| | RYCPTDQAAAGTDAEHVQQFYNLLTASIDVSRSWAEKIPGF |
| | TDLPKEDQTLLIESAFLELFVLRLSIRSNTAEDKFVFCNGLVL |
| | HRLQCLRGFGEWLDSIKDFSLNLQSLNLDIQALACLSALSMI |
| | TERHGLKEPKRVEELCNKITSSLKDHQSKGQALEPTESKVLG |
| | ALVELRKICTLGLQRIFYLKLEDLVSPPSIIDKLFLDTLPF |
| Nuclear receptor | MPCVQAQYSPSPPGSSYAAQTYSSEYTTEIMNPDYTKLTMD |
| subfamily 4 group A | LGSTEITATATTSLPSISTFVEGYSSNYELKPSCVYQMQRPLIK |
| member 3 (NR4A3), | VEEGRAPSYHHHHHHHHHHHHHHQQQHQQPSIPPASSPEDE |
| isoform beta, | VLPSTSMYFKQSPPSTPTTPAFPPQAGALWDEALPSAPGCIAP |
| UniProtKB | GPLLDPPMKAVPTVAGARFPLFHFKPSPPHPPAPSPAGGHHL |
| Accession No. | GYDPTAAAALSLPLGAAAAAGSQAAALESHPYGLPLAKRA |
| Q92570-2 | APLAFPPLGLTPSPTASSLLGESPSLPSPPSRSSSSGEGTCAVC |
| SEQ ID NO: 188 | GDNAACQHYGVRTCEGCKGFFKRTVQKNAKYVCLANKNC |
| | PVDKRRRNRCQYCRFQKCLSVGMVKEVVRTDSLKGRRGRL |
| | PSKPKSPLQQEPSQPSPPSPPICMMNALVRALTDSTPRDLDYS |
| | RVSFMISCFQMNDQGLYLWLLVIRVD |
| Nuclear receptor | MHDSIRFGNVDMPCVQAQYSPSPPGSSYAAQTYSSEYTTEIM |
| subfamily 4 group A | NPDYTKLTMDLGSTEITATATTSLPSISTFVEGYSSNYELKPS |
| member 3 (NR4A3), | CVYQMQRPLIKVEEGRAPSYHHHHHHHHHHHHHHQQQHQ |
| isoform 3, | QPSIPPASSPEDEVLPSTSMYFKQSP |
| UniProtKB | PSTPTTPAFPPQAGALWDEALPSAPGCIAPGPLLDPPMKAVP |
| Accession No. | TVAGARFPLFHFKPSPPHPPAPSPAGGHHLGYDPTAAAALSL |
| Q92570-3 | PLGAAAAAGSQAAALESHPYGLPLAKRAAPLAFPPLGLTPSP |
| SEQ ID NO: 189 | TASSLLGESPSLPSPPSRSSSSGEGTCAVCGDNAACQHYGVR |
| | TCEGCKGFFKRTVQKNAKYVCLANKNCPVDKRRRNRCQYC |
| | RFQKCLSVGMVKEVVRTDSLKGRRGRLPSKPKSPLQQEPSQ |
| | PSPPSPPICMMNALVRALTDSTPRDLDYSRYCPTDQAAAGTD |
| | AEHVQQFYNLLTASIDVSRSWAEKIPGFTDLPKEDQTLLIESA |
| | FLELFVLRLSIRSNTAEDKFVFCNGLVLHRLQCLRGFGEWLD |
| | SIKDFSLNLQSLNLDIQALACLSALSMITERHGLKEPKRVEEL |
| | CNKITSSLKDHQSKGQALEPTESKVLGALVELRKICTLGLQRI |
| | FYLKLEDLVSPPSIIDKLFLDTLPF |
| Thymocyte | MDVRFYPPPAQPAAAPDAPCLGPSPCLDPYYCNKFDGENMY |
| selection-associated | MSMTEPSQDYVPASQSYPGPSLESEDFNIPPITPPSLPDHSLVH |
| high mobility group | LNEVESGYHSLCHPMNHNGLLPFHPQNMDLPEITVSNMLGQ |
| box protein TOX | DGTLLSNSISVMPDIRNPEGTQYSSHPQMAAMRPRGQPADIR |
| (TOX), isoform 1, | QQPGMMPHGQLTTINQSQLSAQLGLNMGGSNVPHNSPSPPG |
| UniProtKB | SKSATPSPSSSVHEDEGDDTSKINGGEKRPASDMGKKPKTP |
| Accession No. | KKKKKKDPNEPQKPVSAYALFFRDTQAAIKGQNPNATFGEV |
| 094900-1 | SKIVASMWDGLGEEQKQVYKKKTEAAKKEYLKQLAAYRAS |
| SEQ ID NO: 190 | LVSKSYSEPVDVKTSQPPQLINSKPSVFHGPSQAHSALYLSSH |
| | YHQQPGMNPHLTAMHPSLPRNIAPKPNNQMPVTVSIANMA |
| | VSPPPPLQISPPLHQHLNMQQHQPLTMQQPLGNQLPMQVQS |
| | ALHSPTMQQGFTLQPDYQTIINPTSTAAQVVTQAMEYVRSG |
| | CRNPPPQPVDWNNDYCSSGGMQRDKALYLT |
| TOX high mobility | MQQTRTEAVAGAFSRCLGFCGMRLGLLLLARHWCIAGVFP |
| group box family | QKFDGDSAYVGMSDGNPELLSTSQTYNGQSENNEDYEIPPIT |
| member 2 (TOX2), | PPNLPEPSLLHLGDHEASYHSLCHGLTPNGLLPAYSYQAMDL |
| isoform 1, | PAIMVSNMLAQDSHLLSGQLPTIQEMVHSEVAAYDSGRPGP |
| UniProtKB | LLGRPAMLASHMSALSQSQLISQMGIRSSIAHSSPSPPGSKSA |
| Accession No. | TPSPSSSTQEEESEVHFKISGEKRPSADPGKKAKNPKKKKKK |
| Q96NM4-1 | DPNEPQKPVSAYALFFRDTQAAIKGQNPSATFGDVSKIVASM |
| SEQ ID NO: 191 | WDSLGEEQKQSSPDQGETKSTQANPPAKMLPPKQPMYAMP |
| | GLASFLTPSDLQAFRSGASPASLARTLGSKSLLPGLSASPPPPP |
| | SFPLSPTLHQQLSLPPHAQGALLSPPVSMSPAPQPPVLPTPMA |
| | LQVQLAMSPSPPGPQDFPHISEFPSSSGSCSPGPSNPTSSGDW |
| | DSSYPSGECGISTCSLLPRDKSLYLT |
| TOX high mobility | MQQTRTEAVAGAFSRCLGFCGMRLGLLLLARHWCIAGVFP |
| group box family | QKFDGDSAYVGMSDGNPELLSTSQTYNGQSENNEDYEIPPIT |
| member 2 (TOX2), | PPNLPEPSLLHLGDHEASYHSLCHGLTPNGLLPAYSYQAMDL |
| isoform 2, | PAIMVSNMLAQDSHLLSGQLPTIQEMVHSEVAAYDSGRPGP |
| UniProtKB | LLGRPAMLASHMSALSQSQLISQMGIRSSIAHSSPSPPGSKSA |
| Accession No. | TPSPSSSTQEEESEVHFKISGEKRPSADPGKKAKNPKKKKKK |
| Q96NM4-2 | DPNEPQKPVSAYALFFRDTQAAIKGQNPSATFGDVSKIVASM |
| SEQ ID NO: 192 | WDSLGEEQKQAYKRKTEAAKKEYLKALAAYRASLVSKSSP |
| | DQGETKSTQANPPAKMLPPKQPMYAMPGLASFLTPSDLQAF |
| | RSGASPASLARTLGSKSLLPGLSASPPPPPSFPLSPTLHQQLSL |
| | PPHAQGALLSPPVSMSPAPQPPVLPTPMALQVQLAMSPSPPG |
| | PQDFPHISEFPSSSGSCSPGPSNPTSSGDWDSSYPSGECGISTC |
| | SLLPRDKSLYLT |
| TOX high mobility | MSDGNPELLSTSQTYNGQSENNEDYEIPPITPPNLPEPSLLHL |
| group box family | GDHEASYHSLCHGLTPNGLLPAYSYQAMDLPAIMVSNMLA |
| member 2 (TOX2), | QDSHLLSGQLPTIQEMVHSEVAAYDSGRPGPLLGRPAMLAS |
| isoform 3, | HMSALSQSQLISQMGIRSSIAHSSPSPPGSKSATPSPSSSTQEE |
| UniProtKB | ESEVHFKISGEKRPSADPGKKAKNPKKKKKKDPNEPQKPVS |
| Accession No. | AYALFFRDTQAAIKGQNPSATFGDVSKIVASMWDSLGEEQK |
| Q96NM4-3 | QAYKRKTEAAKKEYLKALAAYRASLVSKSSPDQGETKSTQ |
| SEQ ID NO: 193 | ANPPAKMLPPKQPMYAMPGLASFLTPSDLQAFRSGASPASL |
| | ARTLGSKSLLPGLSASPPPPPSFPLSPTLHQQLSLPPHAQGALL |
| | SPPVSMSPAPQPPVLPTPMALQVQLAMSPSPPGPQDFPHISEF |
| | PSSSGSCSPGPSNPTSSGDWDSSYPSGECGISTCSLLPRDKSLY |
| | LT |
| TOX high mobility | MDVRLYPSAPAVGARPGAEPAGLAHLDYYHGGKFDGDSAY |
| group box family | VGMSDGNPELLSTSQTYNGQSENNEDYEIPPITPPNLPEPSLL |
| member 2 (TOX2), | HLGDHEASYHSLCHGLTPNGLLPAYSYQAMDLPAIMVSNM |
| isoform 4, | LAQDSHLLSGQLPTIQEMVHSEVAAYDSGRPGPLLGRPAML |
| UniProtKB | ASHMSALSQSQLISQMGIRSSIAHSSPSPPGSKSATPSPSSSTQ |
| Accession No. | EEESEVHFKISGEKRPSADPGKKAKNPKKKKKKDPNEPQKP |
| Q96NM4-4 | VSAYALFFRDTQAAIKGQNPSATFGDVSKIVASMWDSLGEE |
| SEQ ID NO: 194 | QKQAYKRKTEAAKKEYLKALAAYRASLVSKSSPDQGETKS |
| | TQANPPAKMLPPKQPMYAMPGLASFLTPSDLQAFRSGASPA |
| | SLARTLGSKSLLPGLSASPPPPPSFPLSPTLHQQLSLPPHAQGA |
| | LLSPPVSMSPAPQPPVLPTPMALQVQLAMSPSPPGPQDFPHIS |
| | EFPSSSGSCSPGPSNPTSSGDWDSSYPSGECGISTCSLLPRDKS |
| | LYLT |
| Interferon regulatory | MNLEGGGRGGEFGMSAVSCGNGKLRQWLIDQIDSGKYPGL |
| factor 4 (IRF4), | VWENEEKSIFRIPWKHAGKQDYNREEDAALFKAWALFKGK |
| isoform 1, | FREGIDKPDPPTWKTRLRCALNKSNDFEELVERSQLDISDPY |
| UniProtKB | KVYRIVPEGAKKGAKQLTLEDPQMSMSHPYTMTTPYPSLPA |
| Accession No. | QQVHNYMMPPLDRSWRDYVPDQPHPEIPYQCPMTFGPRGH |
| Q15306-1 | HWQGPACENGCQVTGTFYACAPPESQAPGVPTEPSIRSAEAL |
| SEQ ID NO: 195 | AFSDCRLHICLYYREILVKELTTSSPEGCRISHGHTYDASNLD |
| | QVLFPYPEDNGQRKNIEKLLSHLERGVVLWMAPDGLYAKR |
| | LCQSRIYWDGPLALCNDRPNKLERDQTCKLFDTQQFLSELQ |
| | AFAHHGRSLPRFQVTLCFGEEFPDPQRQRKLITAHVEPLLAR |
| | QLYYFAQQNSGHFLRGYDLPEHISNPEDYHRSIRHSSIQE |
| Interferon regulatory | MNLEGGGRGGEFGMSAVSCGNGKLRQWLIDQIDSGKYPGL |
| factor 4 (IRF4), | VWENEEKSIFRIPWKHAGKQDYNREEDAALFKAWALFKGK |
| isoform 2, | FREGIDKPDPPTWKTRLRCALNKSNDFEELVERSQLDISDPY |
| UniProtKB | KVYRIVPEGAKKGAKQLTLEDPQMSMSHPYTMTTPYPSLPA |
| Accession No. | QVHNYMMPPLDRSWRDYVPDQPHPEIPYQCPMTFGPRGHH |
| Q15306-2 | WQGPACENGCQVTGTFYACAPPESQAPGVPTEPSIRSAEALA |
| SEQ ID NO: 196 | FSDCRLHICLYYREILVKELTTSSPEGCRISHGHTYDASNLDQ |
| | VLFPYPEDNGQRKNIEKLLSHLERGVVLWMAPDGLYAKRLC |
| | QSRIYWDGPLALCNDRPNKLERDQTCKLFDTQQFLSELQAF |
| | AHHGRSLPRFQVTLCFGEEFPDPQRQRKLITAHVEPLLARQL |
| | YYFAQQNSGHFLRGYDLPEHISNPEDYHRSIRHSSIQE |
| Basic leucine zipper | MPHSSDSSDSSFSRSPPPGKQDSSDDVRRVQRREKNRIAAQK |
| transcriptional factor | SRQRQTQKADTLHLESEDLEKQNAALRKEIKQLTEELKYFTS |
| ATF-like (BATF), | VLNSHEPLCSVLAASTPSPPEVVYSAHAFHQPHVSSPRFQP |
| isoform 1, | |
| UniProtKB | |
| Accession No. | |
| Q16520-1 | |
| SEQ ID NO: 197 | |
| Basic leucine zipper | MHLCGGNGLLTQTDPKEQQRQLKKQKNRAAAQRSRQKHT |
| transcriptional factor | DKADALHQQHESLEKDNLALRKEIQSLQAELAWWSRTLHV |
| ATF-like 2 | HERLCPMDCASCSAPGLLGCWDQAEGLLGPGPQGQHGCRE |
| (BATF2), isoform 1, | QLELFQTPGSCYPAQPLSPGPQPHDSPSLLQCPLPSLSLGPAV |
| UniProtKB | VAEPPVQLSPSPLLFASHTGSSLQGSSSKLSALQPSLTAQTAP |
| Accession No. | PQPLELEHPTRGKLGSSPDNPSSALGLARLQSREHKPALSAA |
| Q8NIL9-1 | TWQGLVVDPSPHPLLAFPLLSSAQVHF |
| SEQ ID NO: 198 | |
| Basic leucine zipper | MDCASCSAPGLLGCWDQAEGLLGPGPQGQHGCREQLELFQ |
| transcriptional factor | TPGSCYPAQPLSPGPQPHDSPSLLQCPLPSLSLGPAVVAEPPV |
| ATF-like 2 | QLSPSPLLFASHTGSSLQGSSSKLSALQPSLTAQTAPPQPLELE |
| (BATF2), isoform 2, | HPTRGKLGSSPDNPSSALGLARLQSREHKPALSAATWQGLV |
| UniProtKB | VDPSPHPLLAFPLLSSAQVHF |
| Accession No. | |
| Q8NIL9-2 | |
| SEQ ID NO: 199 | |
| Basic leucine zipper | MSQGLPAAGSVLQRSVAAPGNQPQPQPQQQSPEDDDRKVR |
| transcriptional factor | RREKNRVAAQRSRKKQTQKADKLHEEYESLEQENTMLRREI |
| ATF-like 3 | GKLTEELKHLTEALKEHEKMCPLLLCPMNFVPVPPRPDPVA |
| (BATF3), isoform 1, | GCLPR |
| UniProtKB | |
| Accession No. | |
| Q9NR55-1 | |
| SEQ ID NO: 200 | |
| X-box-binding | MVVVAAAPNPADGTPKVLLLSGQPASAAGAPAGQALPLMV |
| protein 1 (XBP1), | PAQRGASPEAASGGLPQARKRQRLTHLSPEEKALRRKLKNR |
| isoform 1, | VAAQTARDRKKARMSELEQQVVDLEEENQKLLLENQLLRE |
| UniProtKB | KTHGLVVENQELRQRLGMDALVAEEEAEAKGNEVRPVAGS |
| Accession No. | AESAALRLRAPLQQVQAQLSPLQNISPWILAVLTLQIQSLISC |
| P17861-1 | WAFWTTWTQSCSSNALPQSLPAWRSSQRSTQKDPVPYQPPF |
| SEQ ID NO: 201 | LCQWGRHQPSWKPLMN |
| X-box-binding | MVVVAAAPNPADGTPKVLLLSGQPASAAGAPAGQALPLMV |
| protein 1 (XBP1), | PAQRGASPEAASGGLPQARKRQRLTHLSPEEKALRRKLKNR |
| isoform 2, | VAAQTARDRKKARMSELEQQVVDLEEENQKLLLENQLLRE |
| UniProtKB | KTHGLVVENQELRQRLGMDALVAEEEAEAKGNEVRPVAGS |
| Accession No. | AESAAGAGPVVTPPEHLPMDSGGIDSSDSESDILLGILDNLDP |
| P17861-2 | VMFFKCPSPEPASLEELPEVYPEGPSSLPASLSLSVGTSSAKLE |
| SEQ ID NO: 202 | AINELIRFDHIYTKPLVLEIPSETESQANVVVKIEEAPLSPSEN |
| | DHPEFIVSVKEEPVEDDLVPELGISNLLSSSHCPKPSSCLLDA |
| | YSDCGYGGSLSPFSDMSSLLGVNHSWEDTFANELFPQLISV |
| Transcription factor | MTAKMETTFYDDALNASFLPSESGPYGYSNPKILKQSMTLN |
| AP-1 (c-Jun), | LADPVGSLKPHLRAKNSDLLTSPDVGLLKLASPELERLIIQSS |
| isoform 1, | NGHITTTPTPTQFLCPKNVTDEQEGFAEGFVRALAELHSQNT |
| UniProtKB | LPSVTSAAQPVNGAGMVAPAVASVAGGSGSGGFSASLHSEP |
| Accession No. | PVYANLSNFNPGALSSGGGAPSYGAAGLAFPAQPQQQQQPP |
| P05412-1 | HHLPQQMPVQHPRLQALKEEPQTVPEMPGETPPLSPIDMESQ |
| SEQ ID NO: 203 | ERIKAERKRMRNRIAASKCRKRKLERIARLEEKVKTLKAQNS |
| | ELASTANMLREQVAQLKQKVMNHVNSGCQLMLTQQLQTF |
| Proto-oncogene c- | MMFSGFNADYEASSSRCSSASPAGDSLSYYHSPADSFSSMGS |
| Fos (Fos), isoform 1, | PVNAQDFCTDLAVSSANFIPTVTAISTSPDLQWLVQPALVSS |
| UniProtKB | VAPSQTRAPHPFGVPAPSAGAYSRAGVVKTMTGGRAQSIGR |
| Accession No. | RGKVEQLSPEEEEKRRIRRERNKMAAAKCRNRRRELTDTLQ |
| P01100-1 | AETDQLEDEKSALQTEIANLLKEKEKLEFILAAHRPACKIPDD |
| SEQ ID NO: 204 | LGFPEEMSVASLDLTGGLPEVATPESEEAFTLPLLNDPEPKPS |
| | VEPVKSISSMELKTEPFDDFLFPASSRPSGSETARSVPDMDLS |
| | GSFYAADWEPLHSGSLGMGPMATELEPLCTPVVTCTPSCTA |
| | YTSSFVFTYPEADSFPSCAAAHRKGSSSNEPSSDSLSSPTLLA |
| | L |
| Proto-oncogene c- | MTGGRAQSIGRRGKVEQLSPEEEEKRRIRRERNKMAAAKCR |
| Fos (Fos), isoform 2, | NRRRELTDTLQAETDQLEDEKSALQTEIANLLKEKEKLEFIL |
| UniProtKB | AAHRPACKIPDDLGFPEEMSVASLDLTGGLPEVATPESEEAF |
| Accession No. | TLPLLNDPEPKPSVEPVKSISSMELKTEPFDDFLFPASSRPSGS |
| P01100-2 | ETARSVPDMDLSGSFYAADWEPLHSGSLGMGPMATELEPLC |
| SEQ ID NO: 205 | TPVVTCTPSCTAYTSSFVFTYPEADSFPSCAAAHRKGSSSNEP |
| | SSDSLSSPTLLAL |
| Proto-oncogene c- | MMFSGFNADYEASSSRCSSASPAGDSLSYYHSPADSFSSMGS |
| Fos (Fos), isoform 3, | PVNAQDFCTDLAVSSANFIPTVTAISTSPDLQWLVQPALVSS |
| UniProtKB | VAPSQTRAPHPFGVPAPSAGAYSRAGVVKTMTGGRAQSIGR |
| Accession No. | RGKVEQETDQLEDEKSALQTEIANLLKEKEKLEFILAAHRPA |
| P01100-3 | CKIPDDLGFPEEMSVASLDLTGGLPEVATPESEEAFTLPLLND |
| SEQ ID NO: 206 | PEPKPSVEPVKSISSMELKTEPFDDFLFPASSRPSGSETARSVP |
| | DMDLSGSFYAADWEPLHSGSLGMGPMATELEPLCTPVVTCT |
| | PSCTAYTSSFVFTYPEADSFPSCAAAHRKGSSSNEPSSDSLSSP |
| | TLLAL |
| AP-1 Complex | MQFMLLFSRQGKLRLQKWYVPLSDKEKKKITRELVQTVLA |
| Subunit sigma 2 | RKPKMCSFLEWRDLKIVYKRYASLYFCCAIEDQDNELITLEII |
| (AP1S2), isoform 1, | HRYVELLDKYFGSVCELDIIFNFEKAYFILDEFLLGGEVQETS |
| UniProtKB | KKNVLKAIEQADLLQEEAETPRSVLEEIGLT |
| Accession No. | |
| P56377-1 | |
| SEQ ID NO: 207 | |
| AP-1 Complex | MPAGCPPHSTTASLPQHGDRGFPFAAAAAAGQAPPRPRPAA |
| Subunit sigma 2 | AMQFMLLFSRQGKLRLQKWYVPLSDKEKKKITRELVQTVL |
| (AP1S2), isoform 2, | ARKPKMCSFLEWRDLKIVYKRYASLYFCCAIEDQDNELITLE |
| UniProtKB | IIHRYVELLDKYFGSVCELDIIFNFEKAYFILDEFLLGGEVQET |
| Accession No. | SKKNVLKAIEQADLLQEKTETMYHSKSFIGFKKAY |
| P56377-2 | |
| SEQ ID NO: 208 | |
| AP-1 complex | MMRFMLLFSRQGKLRLQKWYLATSDKERKKMVRELMQVV |
| subunit sigma-1A | LARKPKMCSFLEWRDLKVVYKRYASLYFCCAIEGQDNELIT |
| (AP1S1), isoform 1, | LELIHRYVELLDKYFGSVCELDIIFNFEKAYFILDEFLMGGDV |
| UniProtKB | QDTSKKSVLKAIEQADLLQEEDESPRSVLEEMGLA |
| Accession No. | |
| P61966-1 | |
| SEQ ID NO: 209 | |
| AP-1 complex | MMRFMLLFSRQGKLRLQKWYLATSDKERKKMVRELMQVV |
| subunit sigma-1A | LARKPKMCSFLEWRDLKVVYKRYASLYFCCAIEGQDNELIT |
| (AP1S1), isoform 2, | LELIHRYVELLDKYFGSVCELDIIFNFEKAYFILDEFLMGGDV |
| UniProtKB | QDTSTFPFSH |
| Accession No. | |
| P61966-2 | |
| SEQ ID NO: 210 | |
| AP-1 Complex | MIHFILLFSRQGKLRLQKWYITLPDKERKKITREIVQIILSRGH |
| Subunit sigma 3 | RTSSFVDWKELKLVYKRYASLYFCCAIENQDNELLTLEIVHR |
| (AP1S3), isoform 1, | YVELLDKYFGNVCELDIIFNFEKAYFILDEFIIGGEIQETSKKI |
| UniProtKB | AVKAIEDSDMLQEVSTVSQTMGER |
| Accession No. | |
| Q96PC3-1 | |
| SEQ ID NO: 211 | |
| AP-1 Complex | MIHFILLFSRQGKLRLQKWYITLPDKERKKITREIVQIILSRGH |
| Subunit sigma 3 | RTSSFVDWKELKLVYKRYASLYFCCAIENQDNELLTLEIVHR |
| (AP1S3), isoform 2, | YVELLDKYFGNVCELDIIFNFEKAYFILDEFIIGGEIQETSKKI |
| UniProtKB | AVKAIEDSDMLQENRLSPRGRDCSEPRSCHCTLA |
| Accession No. | |
| Q96PC3-2 | |
| SEQ ID NO: 212 | |
| AP-1 Complex | MIHFILLFSRQGKLRLQKWYITLPDKERKKITREIVQIILSRGH |
| Subunit sigma 3 | RTSSFVDWKELKLVYKRYASLYFCCAIENQDNELLTLEIVHR |
| (AP1S3), isoform 3, | YVELLDKYFGNTWPFARA |
| UniProtKB | |
| Accession No. | |
| Q96PC3-3 | |
| SEQ ID NO: 213 | |
| AP-1 Complex | MIHFILLFSRQGKLRLQKWYITLPDKERKKITREIVQIILSRGH |
| Subunit sigma 3 | RTSSFVDWKELKLVYKRYASLYFCCAIENQDNELLTLEIVHR |
| (AP1S3), isoform 4, | YVELLDKYFGNVCELDIIFNFEKAYFILDEFIIGGEIQETSKKI |
| UniProtKB | AVKAIEDSDMLQETMEEYMNKPTF |
| Accession No. | |
| Q96PC3-4 | |
| SEQ ID NO: 214 | |
| AP-1 Complex | MPAPIRLRELIRTIRTARTQAEEREMIQKECAAIRSSFREEDNT |
| Subunit gamma-1 | YRCRNVAKLLYMHMLGYPAHFGQLECLKLIASQKFTDKRIG |
| (AP1G1), isoform 1, | YLGAMLLLDERQDVHLLMTNCIKNDLNHSTQFVQGLALCT |
| UniProtKB | LGCMGSSEMCRDLAGEVEKLLKTSNSYLRKKAALCAVHVIR |
| Accession No. | KVPELMEMFLPATKNLLNEKNHGVLHTSVVLLTEMCERSPD |
| 043747-1 | MLAHFRKLVPQLVRILKNLIMSGYSPEHDVSGISDPFLQVRIL |
| SEQ ID NO: 215 | RLLRILGRNDDDSSEAMNDILAQVATNTETSKNVGNAILYET |
| | VLTIMDIKSESGLRVLAINILGRFLLNNDKNIRYVALTSLLKT |
| | VQTDHNAVQRHRSTIVDCLKDLDVSIKRRAMELSFALVNGN |
| | NIRGMMKELLYFLDSCEPEFKADCASGIFLAAEKYAPSKRW |
| | HIDTIMRVLTTAGSYVRDDAVPNLIQLITNSVEMHAYTVQRL |
| | YKAILGDYSQQPLVQVAAWCIGEYGDLLVSGQCEEEEPIQV |
| | TEDEVLDILESVLISNMSTSVTRGYALTAIMKLSTRFTCTVNR |
| | IKKVVSIYGSSIDVELQQRAVEYNALFKKYDHMRSALLERM |
| | PVMEKVTTNGPTEIVQTNGETEPAPLETKPPPSGPQPTSQAN |
| | DLLDLLGGNDITPVIPTAPTSKPSSAGGELLDLLGDINLTGAP |
| | AAAPAPASVPQISQPPFLLDGLSSQPLENDIAAGIPSITAYSKN |
| | GLKIEFTFERSNTNPSVTVITIQASNSTELDMTDFVFQAAVPK |
| | TFQLQLLSPSSSIVPAFNTGTITQVIKVLNPQKQQLRMRIKLT |
| | YNHKGSAMQDLAEVNNFPPQSWQ |
| AP-1 Complex | MPAPIRLRELIRTIRTARTQAEEREMIQKECAAIRSSFREEDNT |
| Subunit gamma-1 | YRCRNVAKLLYMHMLGYPAHFGQLECLKLIASQKFTDKRIG |
| (AP1G1), isoform 2, | YLGAMLLLDERQDVHLLMTNCIKNDLNHSTQFVQGLALCT |
| UniProtKB | LGCMGSSEMCRDLAGEVEKLLKTSNSYLRKKAALCAVHVIR |
| Accession No. | KVPELMEMFLPATKNLLNEKNHGVLHTSVVLLTEMCERSPD |
| 043747-2 | MLAHFRKNEKLVPQLVRILKNLIMSGYSPEHDVSGISDPFLQ |
| SEQ ID NO: 216 | VRILRLLRILGRNDDDSSEAMNDILAQVATNTETSKNVGNAI |
| | LYETVLTIMDIKSESGLRVLAINILGRFLLNNDKNIRYVALTS |
| | LLKTVQTDHNAVQRHRSTIVDCLKDLDVSIKRRAMELSFAL |
| | VNGNNIRGMMKELLYFLDSCEPEFKADCASGIFLAAEKYAP |
| | SKRWHIDTIMRVLTTAGSYVRDDAVPNLIQLITNSVEMHAY |
| | TVQRLYKAILGDYSQQPLVQVAAWCIGEYGDLLVSGQCEEE |
| | EPIQVTEDEVLDILESVLISNMSTSVTRGYALTAIMKLSTRFT |
| | CTVNRIKKVVSIYGSSIDVELQQRAVEYNALFKKYDHMRSA |
| | LLERMPVMEKVTTNGPTEIVQTNGETEPAPLETKPPPSGPQP |
| | TSQANDLLDLLGGNDITPVIPTAPTSKPSSAGGELLDLLGDIN |
| | LTGAPAAAPAPASVPQISQPPFLLDGLSSQPLENDIAAGIPSIT |
| | AYSKNGLKIEFTFERSNTNPSVTVITIQASNSTELDMTDFVFQ |
| | AAVPKTFQLQLLSPSSSIVPAFNTGTITQVIKVLNPQKQQLRM |
| | RIKLTYNHKGSAMQDLAEVNNFPPQSWQ |
| AP-1 Complex | MSASAVYVLDLKGKVLICRNYRGDVDMSEVEHFMPILMEK |
| Subunit mu-1 | EEEGMLSPILAHGGVRFMWIKHNNLYLVATSKKNACVSLVF |
| (AP1M1), isoform 1, | SFLYKVVQVFSEYFKELEEESIRDNFVIIYELLDELMDFGYPQ |
| UniProtKB | TTDSKILQEYITQEGHKLETGAPRPPATVTNAVSWRSEGIKY |
| Accession No. | RKNEVFLDVIESVNLLVSANGNVLRSEIVGSIKMRVFLSGMP |
| Q9BXS5-1 | ELRLGLNDKVLFDNTGRGKSKSVELEDVKFHQCVRLSRFEN |
| SEQ ID NO: 217 | DRTISFIPPDGEFELMSYRLNTHVKPLIWIESVIEKHSHSRIEY |
| | MIKAKSQFKRRSTANNVEIHIPVPNDADSPKFKTTVGSVKW |
| | VPENSEIVWSIKSFPGGKEYLMRAHFGLPSVEAEDKEGKPPIS |
| | VKFEIPYFTTSGIQVRYLKIIEK |
| | SGYQALPWVRYITQNGDYQLRTQ |
| AP-1 Complex | MSASAVYVLDLKGKVLICRNYRGDVDMSEVEHFMPILMEK |
| Subunit mu-1 | EEEGMLSPILAHGGVRFMWIKHNNLYLVATSKKNACVSLVF |
| (AP1M1), isoform 2, | SFLYKVVQVFSEYFKELEEESIRDNFVIIYELLDELMDFGYPQ |
| UniProtKB | TTDSKILQEYITQEGHKLETGAPRPPATVTNAVSWRSEGIKY |
| Accession No. | RKNEVFLDVIESVNLLGKYPGVGWLGHTVSANGNVLRSEIV |
| Q9BXS5-2 | GSIKMRVFLSGMPELRLGLNDKVLFDNTGRGKSKSVELEDV |
| SEQ ID NO: 218 | KF |
| | HQCVRLSRFENDRTISFIPPDGEFELMSYRLNTHVKPLIWIES |
| | VIEKHSHSRIEYMIKAKSQFKRRSTANNVEIHIPVPNDADSPK |
| | FKTTVGSVKWVPENSEIVWSIKSFPGGKEYLMRAHFGLPSVE |
| | AEDKEGKPPISVKFEIPYFTTSGIQVRYLKIIEKSGYQALPWV |
| | RYITQNGDYQLRTQ |
| AP-1 Complex | MTDSKYFTTTKKGEIFELKAELNSDKKEKKKEAVKKVIASM |
| Subunit beta-1 | TVGKDVSALFPDVVNCMQTDNLELKKLVYLYLMNYAKSQP |
| (AP1B1), isoform A, | DMAIMAVNTFVKDCEDPNPLIRALAVRTMGCIRVDKITEYL |
| UniProtKB | CEPLRKCLKDEDPYVRKTAAVCVAKLHDINAQLVEDQGFLD |
| Accession No. | TLKDLISDSNPMVVANAVAALSEIAESHPSSNLLDLNPQSINK |
| Q10567-1 | LLTALNECTEWGQIFILDCLANYMPKDDREAQSICERVTPRL |
| SEQ ID NO: 219 | SHANSAVVLSAVKVLMKFMEMLSKDLDYYGTLLKKLAPPL |
| | VTLLSAEPELQYVALRNINLIVQKRPEILKHEMKVFFVKYND |
| | PIYVKLEKLDIMIRLASQANIAQVLAELKEYATEVDVDFVRK |
| | AVRAIGRCAIKVEQSAERCVSTLLDLIQTKVNYVVQEAIVVI |
| | KDIFRKYPNKYESVIATLCENLDSLDEPEARAAMIWIVGEYA |
| | ERIDNADELLESFLEGFHDESTQVQLQLLTAIVKLFLKKPTET |
| | QELVQQVLSLATQDSDNPDLRDRGYIYWRLLSTDPVAAKEV |
| | VLAEKPLISEETDLIEPTLLDELICYIGTLASVYHKPPSAFVEG |
| | GRGVVHKSLPPRTASSESAESPETAPTGAPPGEQPDVIPAQG |
| | DLLGDLLNLDLGPPVSGPPLATSSVQMGAVDLLGGGLDSLM |
| | GDEPEGIGGTNFVAPPTAAVPANLGAPIGSGLSDLFDLTSGV |
| | GTLSGSYVAPKAVWLPAMKAKGLEISGTFTRQVGSISMDLQ |
| | LTNKALQVMTDFAIQFNRNSFGLAPATPLQVHAPLSPNQTVE |
| | ISLPLSTVGSVMKMEPLNNLQVAVKNNIDVFYFSTLYPLHILF |
| | VEDGKMDRQMFLATWKDIPNENEAQFQIRDCPLNAEAASSK |
| | LQSSNIFTVAKRNVEGQDMLYQSLKLTNGIWVLAELRIQPG |
| | NPSCTDLELSLKCRAPEVSQHVYQAYETILKN |
| AP-1 Complex | MTDSKYFTTTKKGEIFELKAELNSDKKEKKKEAVKKVIASM |
| Subunit beta-1 | TVGKDVSALFPDVVNCMQTDNLELKKLVYLYLMNYAKSQP |
| (AP1B1), isoform B, | DMAIMAVNTFVKDCEDPNPLIRALAVRTMGCIRVDKITEYL |
| UniProtKB | CEPLRKCLKDEDPYVRKTAAVCVAKLHDINAQLVEDQGFLD |
| Accession No. | TLKDLISDSNPMVVANAVAALSEIAESHPSSNLLDLNPQSINK |
| Q10567-2 | LLTALNECTEWGQIFILDCLANYMPKDDREAQSICERVTPRL |
| SEQ ID NO: 220 | SHANSAVVLSAVKVLMKFMEMLSKDLDYYGTLLKKLAPPL |
| | VTLLSAEPELQYVALRNINLIVQKRPEILKHEMKVFFVKYND |
| | PIYVKLEKLDIMIRLASQANIAQVLAELKEYATEVDVDFVRK |
| | AVRAIGRCAIKVEQSAERCVSTLLDLIQTKVNYVVQEAIVVI |
| | KDIFRKYPNKYESVIATLCENLDSLDEPEARAAMIWIVGEYA |
| | ERIDNADELLESFLEGFHDESTQVQLQLLTAIVKLFLKKPTET |
| | QELVQQVLSLATQDSDNPDLRDRGYIYWRLLSTDPVAAKEV |
| | VLAEKPLISEETDLIEPTLLDELICYIGTLASVYHKPPSAFVEG |
| | GRGVVHKSLPPRTASSESAESPETAPTGAPPGEQPDVIPAQG |
| | DLLGDLLNLDLGPPVSGPPLATSSVQMGAVDLLGGGLDSLIG |
| | GTNFVAPPTAAVPANLGAPIGSGLSDLFDLTSGVGTLSGSYV |
| | APKAVWLPAMKAKGLEISGTFTRQVGSISMDLQLTNKALQV |
| | MTDFAIQFNRNSFGLAPATPLQVHAPLSPNQTVEISLPLSTVG |
| | SVMKMEPLNNLQVAVKNNIDVFYFSTLYPLHILFVEDGKMD |
| | RQMFLATWKDIPNENEAQFQIRDCPLNAEAASSKLQSSNIFT |
| | VAKRNVEGQDMLYQSLKLINGIWVLAELRIQPGNPSCTDLE |
| | LSLKCRAPEVSQHVYQAYETILKN |
| AP-1 Complex | MTDSKYFTTTKKGEIFELKAELNSDKKEKKKEAVKKVIASM |
| Subunit beta-1 | TVGKDVSALFPDVVNCMQTDNLELKKLVYLYLMNYAKSQP |
| (AP1B1), isoform C, | DMAIMAVNTFVKDCEDPNPLIRALAVRTMGCIRVDKITEYL |
| UniProtKB | CEPLRKCLKDEDPYVRKTAAVCVAKLHDINAQLVEDQGFLD |
| Accession No. | TLKDLISDSNPMVVANAVAALSEIAESHPSSNLLDLNPQSINK |
| Q10567-3 | LLTALNECTEWGQIFILDCLANYMPKDDREAQSICERVTPRL |
| SEQ ID NO: 221 | SHANSAVVLSAVKVLMKFMEMLSKDLDYYGTLLKKLAPPL |
| | VTLLSAEPELQYVALRNINLIVQKRPEILKHEMKVFFVKYND |
| | PIYVKLEKLDIMIRLASQANIAQVLAELKEYATEVDVDFVRK |
| | AVRAIGRCAIKVEQSAERCVSTLLDLIQTKVNYVVQEAIVVI |
| | KDIFRKYPNKYESVIATLCENLDSLDEPEARAAMIWIVGEYA |
| | ERIDNADELLESFLEGFHDESTQVQLQLLTAIVKLFLKKPTET |
| | QELVQQVLSLATQDSDNPDLRDRGYIYWRLLSTDPVAAKEV |
| | VLAEKPLISEETDLIEPTLLDELICYIGTLASVYHKPPSAFVEG |
| | GRGVVHKSLPPRTASSESAESPETAPTGAPPGEQPDVIPAQG |
| | DLLGDLLNLDLGPPVSGPPLATSSVQMGAVDLLGGGLDSLIG |
| | GTNFVAPPTAAVPANLGAPIGSGLSDLFDLTSGVGTLSGSYV |
| | APKAVWLPAMKAKGLEISGTFTRQVGSISMDLQLTNKALQV |
| | MTDFAIQFNRNSFGLAPATPLQVHAPLSPNQTVEISLPLSTVG |
| | SVMKMEPLNNLQVAVKNNIDVFYFSTLYPLHILFVEDGKMD |
| | RQMFLATWKDIPNENEAQFQIRDCPLNAEAASSKLQSSNIFT |
| | VAKRNVEGQDMLYQSLKLINGIWVLAELRIQPGNPSCTLSL |
| | KCRAPEVSQHVYQAYETILKN |
| AP-1 Complex | MTDSKYFTTTKKGEIFELKAELNSDKKEKKKEAVKKVIASM |
| Subunit beta-1 | TVGKDVSALFPDVVNCMQTDNLELKKLVYLYLMNYAKSQP |
| (AP1B1), isoform 4, | DMAIMAVNTFVKDCEDPNPLIRALAVRTMGCIRVDKITEYL |
| UniProtKB | CEPLRKCLKDEDPYVRKTAAVCVAKLHDINAQLVEDQGELD |
| Accession No. | TLKDLISDSNPMVVANAVAALSEIAESHPSSNLLDLNPQSINK |
| Q10567-4 | LLTALNECTEWGQIFILDCLANYMPKDDREAQSICERVTPRL |
| SEQ ID NO: 222 | SHANSAVVLSAVKVLMKFMEMLSKDLDYYGTLLKKLAPPL |
| | VTLLSAEPELQYVALRNINLIVQKRPEILKHEMKVFFVKYND |
| | PIYVKLEKLDIMIRLASQANIAQVLAELKEYATEVDVDFVRK |
| | AVRAIGRCAIKVEQSAERCVSTLLDLIQTKVNYVVQEAIVVI |
| | KDIFRKYPNKYESVIATLCENLDSLDEPEARAAMIWIVGEYA |
| | ERIDNADELLESFLEGFHDESTQVQLQLLTAIVKLFLKKPTET |
| | QELVQQVLSLATQDSDNPDLRDRGYIYWRLLSTDPVAAKEV |
| | VLAEKPLISEETDLIEPTLLDELICYIGTLASVYHKPPSAFVEG |
| | GRGVVHKSLPPRTASSESAESPETAPTGAPPGEQPDVIPAQG |
| | DLLGDLLNLDLGPPVSGPPLATSSVQMGAVDLLGGGLDSLIG |
| | GTNFVAPPTAAVPANLGAPIGSGLSDLFDLTSGVGTLSGSYV |
| | APKAVGSISMDLQLTNKALQVMTDFAIQFNRNSFGLAPATPL |
| | QVHAPLSPNQTVEISLPLSTVGSVMKMEPLNNLQVAVKNNI |
| | DVFYFSTLYPLHILFVEDGKMDRQMFLATWKDIPNENEAQF |
| | QIRDCPLNAEAASSKLQSSNIFTVAKRNVEGQDMLYQSLKLT |
| | NGIWVLAELRIQPGNPSCTLSLKCRAPEVSQHVYQAYETILK |
| | N |
| AP-1 Complex | MSASAVFILDVKGKPLISRNYKGDVAMSKIEHFMPLLVQREE |
| Subunit mu-2 | EGALAPLLSHGQVHFLWIKHSNLYLVATTSKNANASLVYSF |
| (AP1M2), isoform 1, | LYKTIEVFCEYFKELEEESIRDNFVIVYELLDELMDFGFPQTT |
| UniProtKB | DSKILQEYITQQSNKLETGKSRVPPTVTNAVSWRSEGIKYKK |
| Accession No. | NEVFIDVIESVNLLVNANGSVLLSEIVGTIKLKVFLSGMPELR |
| Q9Y6Q5-1 | LGLNDRVLFELTGRSKNKSVELEDVKFHQCVRLSRFDNDRTI |
| SEQ ID NO: 223 | SFIPPDGDFELMSYRLSTQVKPLIWIESVIEKFSHSRVEIMVKA |
| | KGQFKKQSVANGVEISVPVPSDADSPRFKTSVGSAKYVPER |
| | NVVIWSIKSFPGGKEYLMRAHFGLPSVEKEEVEGRPPIGVKF |
| | EIPYFTVSGIQVRYMKIIEKSGYQALPWVRYITQSGDYQLRTS |
| AP-1 Complex | MSASAVFILDVKGKPLISRNYKGDVAMSKIEHFMPLLVQREE |
| Subunit mu-2 | EGALAPLLSHGQVHFLWIKHSNLYLVATTSKNANASLVYSF |
| (AP1M2), isoform 2, | LYKTIEVFCEYFKELEEESIRDNFVIVYELLDELMDFGFPQTT |
| UniProtKB | DSKILQEYITQQSNKLETGKSRVPPTVTNAVSWRSEGIKYKK |
| Accession No. | NEVFIDVIESVNLLVNANGSVLLSEIVGTIKLKVFLSGMPELR |
| Q9Y6Q5-2 | LGLNDRVLFELTGLSGSKNKSVELEDVKFHQCVRLSRFDND |
| SEQ ID NO: 224 | RTISFIPPDGDFELMSYRLSTQVKPLIWIESVIEKFSHSRVEIM |
| | VKAKGQFKKQSVANGVEISVPVPSDADSPRFKTSVGSAKYV |
| | PERNVVIWSIKSFPGGKEYLMRAHFGLPSVEKEEVEGRPPIG |
| | VKFEIPYFTVSGIQVRYMKIIEKSGYQALPWVRYITQSGDYQ |
| | LRTS |
| AP-1 Complex | MVVPSLKLQDLIEEIRGAKTQAQEREVIQKECAHIRASFRDG |
| Subunit gamma-2 | DPVHRHRQLAKLLYVHMLGYPAHFGQMECLKLIASSRFTDK |
| (AP1G2), isoform 1, | RVGYLGAMLLLDERHDAHLLITNSIKNDLSQGIQPVQGLALC |
| UniProtKB | TLSTMGSAEMCRDLAPEVEKLLLQPSPYVRKKAILTAVHMI |
| Accession No. | RKVPELSSVFLPPCAQLLHERHHGILLGTITLITELCERSPAAL |
| 075843-1 | RHFRKVVPQLVHILRTLVTMGYSTEHSISGVSDPFLQVQILRL |
| SEQ ID NO: 225 | LRILGRNHEESSETMNDLLAQVATNTDTSRNAGNAVLFETV |
| | LTIMDIRSAAGLRVLAVNILGRFLLNSDRNIRYVALTSLLRLV |
| | QSDHSAVQRHRPTVVECLRETDASLSRRALELSLALVNSSNV |
| | RAMMQELQAFLESCPPDLRADCASGILLAAERFAPTKRWHI |
| | DTILHVLTTAGTHVRDDAVANLTQLIGGAQELHAYSVRRLY |
| | NALAEDISQQPLVQVAAWCIGEYGDLLLAGNCEEIEPLQVDE |
| | EEVLALLEKVLQSHMSLPATRGYALTALMKLSTRLCGDNNR |
| | IRQVVSIYGSCLDVELQQRAVEYDTLFRKYDHMRAAILEKM |
| | PLVERDGPQADEEAKESKEAAQLSEAAPVPTEPQASQLLDLL |
| | DLLDGASGDVQHPPHLDPSPGGALVHLLDLPCVPPPPAPIPD |
| | LKVFEREGVQLNLSFIRPPENPALLLITITATNFSEGDVTHFIC |
| | QAAVPKSLQLQLQAPSGNTVPARGGLPITQLFRILNPNKAPL |
| | RLKLRLTYDHFHQSVQEIFEVNNLPVESWQ |
| BTB and CNC | MSVDEKPDSPMYVYESTVHCTNILLGLNDQRKKDILCDVTLI |
| homolog 2 | VERKEFRAHRAVLAACSEYFWQALVGQTKNDLVVSLPEEV |
| (BACH2), isoform | TARGFGPLLQFAYTAKLLLSRENIREVIRCAEFLRMHNLEDS |
| 1, UniProtKB | CFSFLQTQLLNSEDGLFVCRKDAACQRPHEDCENSAGEEED |
| Accession No. | EEEETMDSETAKMACPRDQMLPEPISFEAAAIPVAEKEEALL |
| Q9BYV9-1 | PEPDVPTDTKESSEKDALTQYPRYKKYQLACTKNVYNASSH |
| SEQ ID NO: 226 | STSGFASTFREDNSSNSLKPGLARGQIKSEPPSEENEEESITLC |
| | LSGDEPDAKDRAGDVEMDRKQPSPAPTPTAPAGAACLERSR |
| | SVASPSCLRSLFSITKSVELSGLPSTSQQHFARSPACPFDKGIT |
| | QGDLKTDYTPFTGNYGQPHVGQKEVSNFTMGSPLRGPGLEA |
| | LCKQEGELDRRSVIFSSSACDQVSTSVHSYSGVSSLDKDLSEP |
| | VPKGLWVGAGQSLPSSQAYSHGGLMADHLPGRMRPNTSCP |
| | VPIKVCPRSPPLETRTRTSSSCSSYSYAEDGSGGSPCSLPLCEF |
| | SSSPCSQGARFLATEHQEPGLMGDGMYNQVRPQIKCEQSYG |
| | TNSSDESGSFSEADSESCPVQDRGQEVKLPFPVDQITDLPRND |
| | FQMMIKMHKLTSEQLEFIHDVRRRSKNRIAAQRCRKRKLDCI |
| | QNLECEIRKLVCEKEKLLSERNQLKACMGELLDNFSCLSQEV |
| | CRDIQSPEQIQALHRYCPVLRPMDLPTASSINPAPLGAEQNIA |
| | ASQCAVGENVPCCLEPGAAPPGPPWAPSNTSENCTSGRRLE |
| | GTD |
| | PGTFSERGPPLEPRSQTVTVDFCQEMTDKCTTDEQPRKDYT |
| Transcription factor | MPQLDSGGGGAGGGDDLGAPDELLAFQDEGEEQDDKSRDS |
| 7 (TCF7; also known | AAGPERDLAELKSSLVNESEGAAGGAGIPGVPGAGAGARGE |
| as T-cell factor 1 | AEALGREHAAQRLFPDKLPEPLEDGLKAPECTSGMYKETVY |
| (TCF-1)), isoform | SAFNLLMHYPPPSGAGQHPQPQPPLHKANQPPHGVPQLSLY |
| 4L, UniProtKB | EHFNSPHPTPAPADISQKQVHRPLQTPDLSGFYSLTSGSMGQ |
| Accession No. | LPHTVSWFTHPSLMLGSGVPGHPAAIPHP AIVPPSGKQELQPF |
| P36402-1 | DR |
| SEQ ID NO: 227 | NLKTQAESKAEKEAKKPTIKKPLNAFMLYMKEMRAKVIAEC |
| | TLKESAAINQILGRRWHALSREEQAKYYELARKERQLHMQL |
| | YPGWSARDNYGKKKRRSREKHQESTTETNWPRELKDGNGQ |
| | ESLSMSSSSSPA |
| Transcription factor | MYKETVYSAFNLLMHYPPPSGAGQHPQPQPPLHKANQPPHG |
| 7 (TCF7; also known | VPQLSLYEHFNSPHPTPAPADISQKQVHRPLQTPDLSGFYSLT |
| as T-cell factor 1 | SGSMGQLPHTVSWFTHPSLMLGSGVPGHPAAIPHPAIVPPSG |
| (TCF-1)), isoform | KQELQPFDRNLKTQAESKAEKEAKKPTIKKPLNAFMLYMKE |
| 4S, UniProtKB | MRAKVIAECTLKESAAINQILGRRWHALSREEQAKYYELAR |
| Accession No. | KERQLHMQLYPGWSARDNYGKKKRRSREKHQESTTETNWP |
| P36402-2 | RELKDGNGQESLSMSSSSSPA |
| SEQ ID NO: 228 | |
| Transcription factor | MPQLDSGGGGAGGGDDLGAPDELLAFQDEGEEQDDKSRDS |
| 7 (TCF7; also known | AAGPERDLAELKSSLVNESEGAAGGAGIPGVPGAGAGARGE |
| as T-cell factor 1 | AEALGREHAAQRLFPDKLPEPLEDGLKAPECTSGMYKETVY |
| (TCF-1)), isoform | SAFNLLMHYPPPSGAGQHPQPQPPLHKANQPPHGVPQLSLY |
| 1L, UniProtKB | EHFNSPHPTPAPADISQKQVHRPLQTPDLSGFYSLTSGSMGQ |
| Accession No. | LPHTVSWFTHPSLMLGSGVPGHPAAIPHPAIVPPSGKQELQPF |
| P36402-3 | DR |
| SEQ ID NO: 229 | NLKTQAESKAEKEAKKPTIKKPLNAFMLYMKEMRAKVIAEC |
| | TLKESAAINQILGRRWHALSREEQAKYYELARKERQLHMQL |
| | YPGWSARDNYGKKKRRSREKHQESTTDPGSPKKCRARFGL |
| | NQQTDWCGPCRRKKKCIRYLPGEGRCPSPVPSDDSALGCPG |
| | SPAPQDSPSYHLLPRFPTELLTSPAERHLHPQVSPLLSASQPQ |
| | GPHRPPAAPCRAHRYSNRNLRDRWPSRHRTPGRLQEPTP |
| Transcription factor | MYKETVYSAFNLLMHYPPPSGAGQHPQPQPPLHKANQPPHG |
| 7 (TCF7; also known | VPQLSLYEHFNSPHPTPAPADISQKQVHRPLQTPDLSGFYSLT |
| as T-cell factor 1 | SGSMGQLPHTVSWFTHPSLMLGSGVPGHPAAIPHPAIVPPSG |
| (TCF-1)), isoform | KQELQPFDRNLKTQAESKAEKEAKKPTIKKPLNAFMLYMKE |
| 1S, UniProtKB | MRAKVIAECTLKESAAINQILGRRWHALSREEQAKYYELAR |
| Accession No. | KERQLHMQLYPGWSARDNYGKKKRRSREKHQESTTDPGSP |
| P36402-4 | KKCRARFGLNQQTDWCGPCRRKKKCIRYLPGEGRCPSPVPS |
| SEQ ID NO: 230 | DDSALGCPGSPAPQDSPSYHLLPRFPTELLTSPAERHLHPQVS |
| | PLLSASQPQGPHRPPAAPCRAHRYSNRNLRDRWPSRHRTPG |
| | RLQEPTP |
| Transcription factor | MPQLDSGGGGAGGGDDLGAPDELLAFQDEGEEQDDKSRDS |
| 7 (TCF7; also known | AAGPERDLAELKSSLVNESEGAAGGAGIPGVPGAGAGARGE |
| as T-cell factor 1 | AEALGREHAAQRLFPDKLPEPLEDGLKAPECTSGMYKETVY |
| (TCF-1)), isoform | SAFNLLMHYPPPSGAGQHPQPQPPLHKANQPPHGVPQLSLY |
| 5L, UniProtKB | EHFNSPHPTPAPADISQKQVHRPLQTPDLSGFYSLTSGSMGQ |
| Accession No. | LPHTVSWFTHPSLMLGSGVPGHPAAIPHPAIVPPSGKQELQPF |
| P36402-9 | DR |
| SEQ ID NO: 231 | NLKTQAESKAEKEAKKPTIKKPLNAFMLYMKEMRAKVIAEC |
| | TLKESAAINQILGRRWHALSREEQAKYYELARKERQLHMQL |
| | YPGWSARDNYGKKKRRSREKHQESTTDNSLHYS |
| Transcription factor | MYKETVYSAFNLLMHYPPPSGAGQHPQPQPPLHKANQPPHG |
| 7 (TCF7; also known | VPQLSLYEHFNSPHPTPAPADISQKQVHRPLQTPDLSGFYSLT |
| as T-cell factor 1 | SGSMGQLPHTVSWFTHPSLMLGSGVPGHPAAIPHPAIVPPSG |
| (TCF-1)), isoform | KQELQPFDRNLKTQAESKAEKEAKKPTIKKPLNAFMLYMKE |
| 5S, UniProtKB | MRAKVIAECTLKESAAINQILGRRWHALSREEQAKYYELAR |
| Accession No. | KERQLHMQLYPGWSARDNYGKKKRRSREKHQESTTDNSLH |
| P36402-10 | YS |
| SEQ ID NO: 232 | |
| Transcription factor | MPQLDSGGGGAGGGDDLGAPDELLAFQDEGEEQDDKSRDS |
| 7 (TCF7; also known | AAGPERDLAELKSSLVNESEGAAGGAGIPGVPGAGAGARGE |
| as T-cell factor 1 | AEALGREHAAQRLFPDKLPEPLEDGLKAPECTSGMYKETVY |
| (TCF-1)), isoform | SAFNLLMHYPPPSGAGQHPQPQPPLHKANQPPHGVPQLSLY |
| 6L, UniProtKB | EHFNSPHPTPAPADISQKQVHRPLQTPDLSGFYSLTSGSMGQ |
| Accession No. | LPHTVSWFTHPSLMLGSGVPGHPAAIPHPAIVPPSGKQELQPF |
| P36402-11 | DR |
| SEQ ID NO: 233 | NLKTQAESKAEKEAKKPTIKKPLNAFMLYMKEMRAKVIAEC |
| | TLKESAAINQILGRRWHALSREEQAKYYELARKERQLHMQL |
| | YPGWSARDNYGKKKRRSREKHQESTTDPGSPKKCRARFGL |
| | NQQTDWCGPCRKKKCIRYLPGEGRCPSPVPSDDSALGCPGSP |
| | APQDSPSYHLLPRFPTELLTSPAERHLHPQVSPLLSASQPQGP |
| | HRPPAAPCRAHRYSNRNLRDRWPSRHRTPGRLQEPTP |
| Transcription factor | MYKETVYSAFNLLMHYPPPSGAGQHPQPQPPLHKANQPPHG |
| 7 (TCF7; also known | VPQLSLYEHFNSPHPTPAPADISQKQVHRPLQTPDLSGFYSLT |
| as T-cell factor 1 | SGSMGQLPHTVSWFTHPSLMLGSGVPGHPAAIPHPAIVPPSG |
| (TCF-1)), isoform | KQELQPFDRNLKTQAESKAEKEAKKPTIKKPLNAFMLYMKE |
| 6S, UniProtKB | MRAKVIAECTLKESAAINQILGRRWHALSREEQAKYYELAR |
| Accession No. | KERQLHMQLYPGWSARDNYGKKKRRSREKHQESTTDPGSP |
| P36402-12 | KKCRARFGLNQQTDWCGPCRKKKCIRYLPGEGRCPSPVPSD |
| SEQ ID NO: 234 | DSALGCPGSPAPQDSPSYHLLPRFPTELLTSPAERHLHPQVSP |
| | LLSASQPQGPHRPPAAPCRAHRYSNRNLRDRWPSRHRTPGR |
| | LQEPTP |
| Transcription factor | MPQLDSGGGGAGGGDDLGAPDELLAFQDEGEEQDDKSRDS |
| 7 (TCF7; also known | AAGPERDLAELKSSLVNESEGAAGGAGIPGVPGAGAGARGE |
| as T-cell factor 1 | AEALGREHAAQRLFPDKLPEPLEDGLKAPECTSGMYKETVY |
| (TCF-1)), isoform | SAFNLLMHYPPPSGAGQHPQPQPPLHKANQPPHGVPQLSLY |
| 7L, UniProtKB | EHFNSPHPTPAPADISQKQVHRPLQTPDLSGFYSLTSGSMGQ |
| Accession No. | LPHTVSWFTHPSLMLGSGVPGHPAAIPHP AIVPPSGKQELQPF |
| P36402-13 | DR |
| SEQ ID NO: 235 | NLKTQAESKAEKEAKKPTIKKPLNAFMLYMKEMRAKVIAEC |
| | TLKESAAINQILGRRWHALSREEQAKYYELARKERQLHMQL |
| | YPGWSARDNYGKKKRRSREKHQESTTDGIPACTILSP |
| Transcription factor | MYKETVYSAFNLLMHYPPPSGAGQHPQPQPPLHKANQPPHG |
| 7 (TCF7; also known | VPQLSLYEHFNSPHPTPAPADISQKQVHRPLQTPDLSGFYSLT |
| as T-cell factor 1 | SGSMGQLPHTVSWFTHPSLMLGSGVPGHPAAIPHPAIVPPSG |
| (TCF-1)), isoform | KQELQPFDRNLKTQAESKAEKEAKKPTIKKPLNAFMLYMKE |
| 7S, UniProtKB | MRAKVIAECTLKESAAINQILGRRWHALSREEQAKYYELAR |
| Accession No. | KERQLHMQLYPGWSARDNYGKKKRRSREKHQESTTDGIPA |
| P36402-14 | CTILSP |
| SEQ ID NO: 236 | |
| Transcription factor | MPQLDSGGGGAGGGDDLGAPDELLAFQDEGEEQDDKSRDS |
| 7 (TCF7; also known | AAGPERDLAELKSSLVNESEGAAGGAGIPGVPGAGAGARGE |
| as T-cell factor 1 | AEALGREHAAQRLFPDKLPEPLEDGLKAPECTSGMYKETVY |
| (TCF-1)), isoform | SAFNLLMHYPPPSGAGQHPQPQPPLHKANQPPHGVPQLSLY |
| 8L, UniProtKB | EHFNSPHPTPAPADISQKQVHRPLQTPDLSGFYSLTSGSMGQ |
| Accession No. | LPHTVSWFTHPSLMLGSGVPGHPAAIPHP AIVPPSGKQELQPF |
| P36402-15 | DR |
| SEQ ID NO: 237 | NLKTQAESKAEKEAKKPTIKKPLNAFMLYMKEMRAKVIAEC |
| | TLKESAAINQILGRRWHALSREEQAKYYELARKERQLHMQL |
| | YPGWSARDNYGKKKRRSREKHQESTTQLEDWDGWARKP |
| Transcription factor | MPQLDSGGGGAGGGDDLGAPDELLAFQDEGEEQDDKSRDS |
| 7 (TCF7; also known | AAGPERDLAELKSSLVNESEGAAGGAGIPGVPGAGAGARGE |
| as T-cell factor 1 | AEALGREHAAQRLFPDKLPEPLEDGLKAPECTSGMYKETVY |
| (TCF-1)), isoform | SAFNLLMHYPPPSGAGQHPQPQPPLHKANQPPHGVPQLSLY |
| 2L, UniProtKB | EHFNSPHPTPAPADISQKQVHRPLQTPDLSGFYSLTSGSMGQ |
| Accession No. | LPHTVSWFTHPSLMLGSGVPGHPAAIPHPAIVPPSGKQELQPF |
| P36402-5 | DR |
| SEQ ID NO: 239 | NLKTQAESKAEKEAKKPTIKKPLNAFMLYMKEMRAKVIAEC |
| | TLKESAAINQILGRRWHALSREEQAKYYELARKERQLHMQL |
| | YPGWSARDNYGKKKRRSREKHQESTTGGKRNAFGTYPEKA |
| | AAPAPFLPMTVL |
| Transcription factor | MYKETVYSAFNLLMHYPPPSGAGQHPQPQPPLHKANQPPHG |
| 7 (TCF7; also known | VPQLSLYEHFNSPHPTPAPADISQKQVHRPLQTPDLSGFYSLT |
| as T-cell factor 1 | SGSMGQLPHTVSWFTHPSLMLGSGVPGHPAAIPHPAIVPPSG |
| (TCF-1)), isoform | KQELQPFDRNLKTQAESKAEKEAKKPTIKKPLNAFMLYMKE |
| 2S, UniProtKB | MRAKVIAECTLKESAAINQILGRRWHALSREEQAKYYELAR |
| Accession No. | KERQLHMQLYPGWSARDNYGKKKRRSREKHQESTTGGKR |
| P36402-6 | NAFGTYPEKAAAPAPFLPMTVL |
| SEQ ID NO: 240 | |
| Transcription factor | MPQLDSGGGGAGGGDDLGAPDELLAFQDEGEEQDDKSRDS |
| 7 (TCF7; also known | AAGPERDLAELKSSLVNESEGAAGGAGIPGVPGAGAGARGE |
| as T-cell factor 1 | AEALGREHAAQRLFPDKLPEPLEDGLKAPECTSGMYKETVY |
| (TCF-1)), isoform | SAFNLLMHYPPPSGAGQHPQPQPPLHKANQPPHGVPQLSLY |
| 3L, UniProtKB | EHFNSPHPTPAPADISQKQVHRPLQTPDLSGFYSLTSGSMGQ |
| Accession No. | LPHTVSWFTHPSLMLGSGVPGHPAAIPHP AIVPPSGKQELQPF |
| P36402-7 | DR |
| SEQ ID NO: 241 | NLKTQAESKAEKEAKKPTIKKPLNAFMLYMKEMRAKVIAEC |
| | TLKESAAINQILGRRWHALSREEQAKYYELARKERQLHMQL |
| | YPGWSARDNYGKKKRRSREKHQESTTDPGSPKKCRARFGL |
| | NQQTDWCGPCR |
| Transcription factor | MYKETVYSAFNLLMHYPPPSGAGQHPQPQPPLHKANQPPHG |
| 7 (TCF7; also known | VPQLSLYEHFNSPHPTPAPADISQKQVHRPLQTPDLSGFYSLT |
| as T-cell factor 1 | SGSMGQLPHTVSWFTHPSLMLGSGVPGHPAAIPHP AIVPPSG |
| (TCF-1)), isoform | KQELQPFDRNLKTQAESKAEKEAKKPTIKKPLNAFMLYMKE |
| 3S, UniProtKB | MRAKVIAECTLKESAAINQILGRRWHALSREEQAKYYELAR |
| Accession No. | KERQLHMQLYPGWSARDNYGKKKRRSREKHQESTTDPGSP |
| P36402-8 | KKCRARFGLNQQTDWCGPCR |
| SEQ ID NO: 242 | |
| Forkhead box | MMQESGTETKSNGSAIQNGSGGSNHLLECGGLREGRSNGET |
| protein P1 (FoxP1), | PAVDIGAADLAHAQQQQQQALQVARQLLLQQQQQQQVSGL |
| isoform 1, | KSPKRNDKQPALQVPVSVAMMTPQVITPQQMQQILQQQVLS |
| UniProKB | PQQLQVLLQQQQALMLQQQQLQEFYKKQQEQLQLQLLQQQ |
| Accession No. | HAGKQPKEQQQVATQQLAFQQQLLQMQQLQQQHLLSLQR |
| Q9H334-1 | QGLLTIQPGQPALPLQPLAQGMIPTELQQLWKEVTSAHTAEE |
| SEQ ID NO: 244 | TTGNNHSSLDLTTTCVSSSAPSKTSLIMNPHASTNGQLSVHTP |
| | KRESLSHEEHPHSHPLYGHGVCKWPGCEAVCEDFQSFLKHL |
| | NSEHALDDRSTAQCRVQMQVVQQLELQLAKDKERLQAMM |
| | THLHVKSTEPKAAPQPLNLVSSVTLSKSASEASPQSLPHTPTT |
| | PTAPLTPVTQGPSVITTTSMHTVGPIRRRYSDKYNVPISSADI |
| | AQNQEFYKNAEVRPPFTYASLIRQAILESPEKQLTLNEIYNWF |
| | TRMFAYFRRNAATWKNAVRHNLSLHKCFVRVENVKGAVW |
| | TVDEVEFQKRRPQKISGNPSLIKNMQSSHAYCTPLNAALQAS |
| | MAENSIPLYTTASMGNPTLGNLASAIREELNGAMEHTNSNES |
| | DSSPGRSPMQAVHPVHVKEEPLDPEEAEGPLSLVTTANHSPD |
| | FDHDRDYEDEPVNEDME |
| Forkhead box | MFQCVFSSSVLQPHSTSCLFKHLFYHSATPASQKQPEPIYSKK |
| protein P1 (FoxP1), | TEIQRQTVRAPFAKLFIFSALQVARQLLLQQQQQQQVSGLKS |
| isoform 3, | PKRNDKQPALQQQQVATQQLAFQQQLLQMQQLQQQHLLSL |
| UniProKB | QRQGLLTIQPGQPALPLQPLAQGMIPTELQQLWKEVTSAHTA |
| Accession No. | EETTGNNHSSLDLTTTCVSSSAPSKTSLIMNPHASTNGQLSV |
| Q9H334-3 | HTPKRESLSHEEHPHSHPLYGHGVCKWPGCEAVCEDFQSFL |
| SEQ ID NO: 245 | KHLNSEHALDDRSTAQCRVQMQVVQQLELQLAKDKERLQA |
| | MMTHLHVKSTEPKAAPQPLNLVSSVTLSKSASEASPQSLPHT |
| | PTTPTAPLTPVTQGPSVITTTSMHTVGPIRRRYSDKYNVPISS |
| | ADIAQNQEFYKNAEVRPPFTYASLIRQAILESPEKQLTLNEIY |
| | NWFTRMFAYFRRNAATWKNAVRHNLSLHKCFVRVENVKG |
| | AVWTVDEVEFQKRRPQKISGNPSLIKNMQSSHAYCTPLNAA |
| | LQ |
| | ASMAENSIPLYTTASMGNPTLGNLASAIREELNGAMEHTNS |
| | NESDSSPGRSPMQAVHPVHVKEEPLDPEEAEGPLSLVTTANH |
| | SPDFDHDRDYEDEPVNEDME |
| Forkhead box | MFQCVFSSSVLQPHSTSCLFKHLFYHSATPASQKQPEPIYSKK |
| protein P1 (FoxP1), | TEIQRQTVRAPFAKLFIFSALQVARQLLLQQQQQQQVSGLKS |
| isoform 4, | PKRNDKQPALQVPVSVAMMTPQVITPQQMQQILQQQVLSPQ |
| UniProKB | QLQVLLQQQQALMLQQQQLQEFYKKQQEQLQLQLLQQQH |
| Accession No. | AGKQPKEQQQVATQQLAFQQQLLQMQQLQQQHLLSLQRQ |
| Q9H334-4 | GLLTIQPGQPALPLQPLAQGMIPTELQQLWKEVTSAHTAEET |
| SEQ ID NO: 246 | TGNNHSSLDLTTTCVSSSAPSKTSLIMNPHASTNGQLSVHTP |
| | KRESLSHEEHPHSHPLYGHGVCKWPGCEAVCEDFQSFLKHL |
| | NSEHALDDRSTAQCRVQMQVVQQLELQLAKDKERLQAMM |
| | THLHVKSTEPKAAPQPLNLVSSVTLSKSASEASPQSLPHTPTT |
| | PTAPLTPVTQGPSVITTTSMHTVGPIRRRYSDKYNVPISSADI |
| | AQNQEFYKNAEVRPPFTYASLIRQAILESPEKQLTLNEIYNWF |
| | TRM |
| | FAYFRRNAATWKNAVRHNLSLHKCFVRVENVKGAVWTVD |
| | EVEFQKRRPQKISGNPSLIKNMQSSHAYCTPLNAALQASMAE |
| | NSIPLYTTASMGNPTLGNLASAIREELNGAMEHTNSNESDSS |
| | PGRSPMQAVHPVHVKEEPLDPEEAEGPLSLVTTANHSPDFD |
| | HDRDYEDEPVNEDME |
| Forkhead box | MMQESGTETKSNGSAIQNGSGGSNHLLECGGLREGRSNGET |
| protein P1 (FoxP1), | PAVDIGAADLAHAQQQQQQWHLINHQPSRSPSSWLKRLISSP |
| isoform 5, | WELEVLQVPLWGAVAETKMSGPVCQPNPSPF |
| UniProKB | |
| Accession No. | |
| Q9H334-5 | |
| SEQ ID NO: 247 | |
| Forkhead box | MMQESGTETKSNGSAIQNGSGGSNHLLECGGLREGRSNGET |
| protein P1 (FoxP1), | PAVDIGAADLAHAQQQQQQALQVARQLLLQQQQQQQVSGL |
| isoform 6, | KSPKRNDKQPALQQQQVATQQLAFQQQLLQMQQLQQQHLL |
| UniProKB | SLQRQGLLTIQPGQPALPLQPLAQGMIPTELQQLWKEVTSAH |
| Accession No. | TAEETTGNNHSSLDLTTTCVSSSAPSKTSLIMNPHASTNGQLS |
| Q9H334-6 | VHTPKRESLSHEEHPHSHPLYGHGVCKWPGCEAVCEDFQSF |
| SEQ ID NO: 248 | LKHLNSEHALDDRSTAQCRVQMQVVQQLELQLAKDKERLQ |
| | AMMTHLHVKSTEPKAAPQPLNLVSSVTLSKSASEASPQSLPH |
| | TPTTPTAPLTPVTQGPSVITTTSMHTVGPIRRRYSDKYNVPISS |
| | ADIAQNQEFYKNAEVRPPFTYASLIRQAILESPEKQLTLNEIY |
| | NWFTRMFAYFRRNAATWKNAVRHNLSLHKCFVRVENVKG |
| | AVWTVDEVEFQKRRPQKISGNPSLIKNMQSSHAYCTPLNAA |
| | LQASMAENSIPLYTTASMGNPTLGNLASAIREELNGAMEHT |
| | NSNESDSSPGRSPMQAVHPVHVKEEPLDPEEAEGPLSLVTTA |
| | NHSPDFDHDRDYEDEPVNEDME |
| Forkhead box | MMQESGTETKSNGSAIQNGSGGSNHLLECGGLREGRSNGET |
| protein P1 (FoxP1), | PAVDIGAADLAHAQQQQQQALQVARQLLLQQQQQQQVSGL |
| isoform 7, | KSPKRNDKQPALQVPVSVAMMTPQVITPQQMQQILQQQVLS |
| UniProKB | PQQLQVLLQQQQALMLQQQQLQEFYKKQQEQLQLQLLQQQ |
| Accession No. | HAGKQPKEQQQVATQQLAFQQQLLQMQQLQQQHLLSLQ |
| | RQGLLTIQPGQPALPLQPLAQGMIPTELQQLWKEVTSAHTAE |
| | ETTGNNHSSLDLTTTCVSSSAPSKTSLIMNPHASTNGQLSVH |
| | TPKRESLSHEEHPHSHPLYGHGVCKWPGCEAVCEDFQSFLK |
| | HLNSEHALDDRSTAQCRVQMQVVQQLELQLAKDKERLQA |
| | MMTHLHVKSTEPKAAPQPLNLVSSVTLSKSASEASPQSLPHT |
| | PTTPTAPLTPVTQGPSVITTTSMHTVGPIRRRYSDKYNVPISS |
| | D |
| Q9H334-7 | IAQNQEFYKNAEVRPPFTYASLIRQAILESPEKQLTLNEIYNW |
| SEQ ID NO: 249 | FTRMFAYFRRNAATWKNAVRHNLSLHKCFVRVENVKGAV |
| | WTVDEVEFQKRRPQKISGNPSLIKNMQSSHAYCTPLNAALQ |
| | ASMAENSIPLYTTASMGNPTLGNLASAIREELNGAMEHTNS |
| | NESDSSPGRSPMQAVHPVHVKEEPLDPEEAEGPLSLVTTANH |
| | SPDFDHDRDYEDEPVNEDME |
| Forkhead box | MMQESGTETKSNGSAIQNGSGGSNHLLECGGLREGRSNGET |
| protein P1 (FoxP1), | PAVDIGAADLAHAQQQQQQALQVARQLLLQQQQQQQVSGL |
| isoform 8, | KSPKRNDKQPALQVPVSVAMMTPQVITPQQMQQILQQQVLS |
| UniProKB | PQQLQVLLQQQQALMLQQQQLQEFYKKQQEQLQLQLLQQQ |
| Accession No. | HAGKQPKEQQQVATQQLAFQQQLLQMQQLQQQHLLSLQR |
| Q9H334-8 | QGLLTIQPGQPALPLQPLAQGMIPTELQQLWKEVTSAHTAEE |
| SEQ ID NO: 250 | TTGNNHSSLDLTTTCVSSSAPSKTSLIMNPHASTNGQLSVHTP |
| | KRESLSHEEHPHSHPLYGHGVCKWPGCEAVCEDFQSFLKHL |
| | NSEHALDDRSTAQCRVQMQVVQQLELQLAKDKERLQAMM |
| | THLHVKSTEPKAAPQPLNLVSSVTLSKSASEASPQSLPHTPTT |
| | PTAPLTPVTQGPSVITTTSMHTVGPIRRRYSDKYNVPISSADI |
| | AQNQEFYKNAEVRPPFTYASLIRQAILESPEKQLTLNEIYNWF |
| | TRMFAYFRRNAATWKGAIRTNLSLHK CFIRVEDEFGSFWTV |
| | DDEEFKRGRHIQRGRPRKYCPDENFDELVAHNPSLIKNMQSS |
| | HAYCTPLNAALQASMAENSIPLYTTASMGNPTLGNLASAIRE |
| | ELNGAMEHTNSNESDSSPGRSPMQAVHPVHVKEEPLDPEEA |
| | EGPLSLVTTANHSPDFDHDRDYEDEPVNEDME |
| Forkhead box | MPNPRPGKPSAPSLALGPSPGASPSWRAAPKASDLLGARGPG |
| protein P1 (FoxP3), | GTFQGRDLRGGAHASSSSLNPMPPSQLQLPTLPLVMVAPSG |
| isoform 1, | ARLGPLPHLQALLQDRPHFMHQLSTVDAHARTPVLQVHPLE |
| UniProKB | SPAMISLTPPTTATGVFSLKARPGLPPGINVASLEWVSREPAL |
| Accession No. | LCTFPNPSAPRKDSTLSAVPQSSYPLLANGVCKWPGCEKVFE |
| Q9BZS1-1 | EPEDFLKHCQADHLLDEKGRAQCLLQREMVQSLEQQLVLE |
| SEQ ID NO: 251 | K |
| | EKLSAMQAHLAGKMALTKASSVASSDKGSCCIVAAGSQGP |
| | VVPAWSGPREAPDSLFAVRRHLWGSHGNSTFPEFLHNMDYF |
| | KFHNMRPPFTYATLIRWAILEAPEKQRTLNEIYHWFTRMFAF |
| | FRNHPATWKNAIRHNLSLHKCFVRVES |
| | EKGAVWTVDELEFRKKRSQRPSRCSNPTPGP |
| Forkhead box | MPNPRPGKPSAPSLALGPSPGASPSWRAAPKASDLLGARGPG |
| protein P1 (FoxP3), | GTFQGRDLRGGAHASSSSLNPMPPSQLQLSTVDAHARTPVL |
| isoform 2, | QVHPLESPAMISLTPPTTATGVFSLKARPGLPPGINVASLEWV |
| UniProKB | SREPALLCTFPNPSAPRKDSTLSAVPQSSYPLLANGVCKWPG |
| Accession No. | CEKVFEEPEDFLKHCQADHLLDEKGRAQCLLQREMVQSLEQ |
| Q9BZS1-2 | QLVLEKEKLSAMQAHLAGKMALTKASSVASSDKGSCCIVA |
| SEQ ID NO: 252 | AGSQGPVVPAWSGPREAPDSLFAVRRHLWGSHGNSTFPEFL |
| | HNMDYFKFHNMRPPFTYATLIRWAILEAPEKQRTLNEIYHW |
| | FTRMFAFFRNHPATWKNAIRHNLSLHKCFVRVESEKGAVWT |
| | VDELEFRKKRSQRPSRCSNPTPGP |
| Forkhead box | MPNPRPGKPSAPSLALGPSPGASPSWRAAPKASDLLGARGPG |
| protein P1 (FoxP3), | GTFQGRDLRGGAHASSSSLNPMPPSQLQLSTVDAHARTPVL |
| isoform 3, | QVHPLESPAMISLTPPTTATGVFSLKARPGLPPGINVASLEWV |
| UniProKB | SREPALLCTFPNPSAPRKDSTLSAVPQSSYPLLANGVCKWPG |
| Accession No. | CEKVFEEPEDFLKHCQADHLLDEKGRAQCLLQREMVQSLEQ |
| Q9BZS1-3 | QLVLEKEKLSAMQAHLAGKMALTKASSVASSDKGSCCIVA |
| SEQ ID NO: 253 | AGSQGPVVPAWSGPREAPDSLFAVRRHLWGSHGNSTFPEFL |
| | HNMDYFKFHNMRPPFTYATLIRWAILEAPEKQRTLNEIYHW |
| | FTRMFAFFRNHPATWKVSSSEVAVTGMASSAIAAQSGQAW |
| | VWAHRHIGEERDVGCWWWLLASEVDAHLLPVPGLPQNAIR |
| | HNLSLHKCFVRVESEKGAVWTVDELEFRKKRSQRPSRCSNP |
| | TPGP |
| Forkhead box | MPNPRPGKPSAPSLALGPSPGASPSWRAAPKASDLLGARGPG |
| protein P1 (FoxP3), | GTFQGRDLRGGAHASSSSLNPMPPSQLQLPTLPLVMVAPSG |
| isoform 4, | ARLGPLPHLQALLQDRPHFMHQLSTVDAHARTPVLQVHPLE |
| UniProKB | SPAMISLTPPTTATGVFSLKARPGLPPGINVASLEWVSREPAL |
| Accession No. | LCTFPNPSAPRKDSTLSAVPQSSYPLLANGVCKWPGCEKVFE |
| Q9BZS1-4 | EPEDFLKHCQADHLLDEKGRAQCLLQREMVQSLEQQASSD |
| SEQ ID NO: 254 | K |
| | GSCCIVAAGSQGPVVPAWSGPREAPDSLFAVRRHLWGSHGN |
| | STFPEFLHNMDYFKFHNMRPPFTYATLIRWAILEAPEKQRTL |
| | NEIYHWFTRMFAFFRNHPATWKNAIRHNLSLHK CFVRVESE |
| | KGAVWTVDELEFRKKRSQRPSRCSNPTPGP |
| C/EBP-homologous | MAAESLPFSFGTLSSWELEAWYEDLQEVLSSDENGGTYVSP |
| protein (CHOP), | PGNEEEESKIFTTLDPASLAWLTEEEPEPAEVTSTSQSPHSPDS |
| isoform 1, | SQSSLAQEEEEEDQGRTRKRKQSGHSPARAGKQRMKEKEQE |
| UniProKB | NERKVAQLAEENERLKQEIERLTREVEATRRALIDRMVNLH |
| Accession No. | QA |
| P35638-1 | |
| SEQ ID NO: 255 | |
| C/EBP-homologous | MELVPATPHYPADVLFQTDPTAEMAAESLPFSFGTLSSWELE |
| protein (CHOP), | AWYEDLQEVLSSDENGGTYVSPPGNEEEESKIFTTLDPASLA |
| isoform 2, | WLTEEEPEPAEVTSTSQSPHSPDSSQSSLAQEEEEEDQGRTRK |
| UniProKB | RKQSGHSPARAGKQRMKEKEQENERKVAQLAEENERLKQE |
| Accession No. | IERLTREVEATRRALIDRMVNLHQA |
| P35638-2 | |
| SEQ ID NO: 256 | |
| Nuclear factor of | MNAPERQPQPDGGDAPGHEPGGSPQDELDFSILFDYEYINPNEEEPNAHK |
| activated T-cells, | VASPPSGPAYPDDVLDYGLKPYSPLASLSGEPPGRFGEPDRVGPQKFLSA |
| cytoplasmic 2 | AKPAGASGLSPRIEITPSHELIQAVGPLRMRDAGLLVEQPPLAGVAASPR |
| (NFATC2), isoform | FTLPVPGFEGYREPLCLSPASSGSSASFISDTFSPYTSPCVSPNNGGPDD |
| 1, UniProKB | LCPQFQNIPAHYSPRISPIMSPRTSLAEDSCLGRHSPVPRPASRSSSPGA |
| Accession No. | KRRHSCAEALVALPPGASPQRSRSPSPQPSSHVAPQDHGSPAGYPPVAGS |
| Q13469-1 | AVIMDALNSLATDSPCGIPPKMWKTSPDPSPVSAAPSKAGLPRHIYPAVE |
| SEQ ID NO: 257 | FLGPCEQGERRNSAPESILLVPPTWPKPLVPAIPICSIPVTASLPPLEWP |
| | LSSQSGSYELRIEVQPKPHHRAHYETEGSRGAVKAPTGGHPVVQLHGYME |
| | NKPLGLQIFIGTADERILKPHAFYQVHRITGKTVTTTSYEKIVGNTKVLE |
| | IPLEPKNNMRATIDCAGILKLRNADIELRKGETDIGRKNTRVRLVERVHI |
| | PESSGRIVSLQTASNPIECSQRSAHELPMVERQDTDSCLVYGGQQMILTG |
| | QNFTSESKVVFTEKTTDGQQIWEMEATVDKDKSQPNMLFVEIPEYRNKHI |
| | RTPVKVNFYVINGKRKRSQPQHFTYHPVPAIKTEPTDEYDPTLICSPTHG |
| | GLGSQPYYPQHPMVAESPSCLVATMAPCQQFRTGLSSPDARYQQQNPAAV |
| | LYQRSKSLSPSLLGYQQPALMAAPLSLADAHRSVIVHAGSQGQSSALLHP |
| | SPINQQASPVIHYSPINQQLRCGSHQEFQHIMYCENFAPGTTRPGPPPVS |
| | QGQRLSPGSYPTVIQQQNATSQRAAKNGPPVSDQKEVIPAGVTIKQEQNL |
| | DQTYLDDVNEIIRKEFSGPPARNQT |
| Nuclear factor of | MPSDFISLLSADLDLESPKSLYSRESVYDLLPKELQLPPSRETSVASMSQ |
| activated T-cells 5 | TSGGEAGSPPPAVVAADASSAPSSSSMGGACSSFTTSSSPTIYSTSVTDS |
| (NFAT5), isoform | KAMQVESCSSAVGVSNRGVSEKQLTSNTVQQHPSTPKRHTVLYISPPPED |
| 1, UniProKB | LLDNSRMSCQDEGCGLESEQSCSMWMEDSPSNFSNMSTSSYNDNTEVPRK |
| Accession No. | SRKRNPKQRPGVKRRDCEESNMDIFDADSAKAPHYVLSQLTTDNKGNSKA |
| 094916-1 | GNGTLENQKGTGVKKSPMLCGQYPVKSEGKELKIVVQPETQHRARYLTEG |
| SEQ ID NO: 258 | SRGSVKDRTQQGFPTVKLEGHNEPVVLQVFVGNDSGRVKPHGFYQACRVT |
| | GRNTTPCKEVDIEGTTVIEVGLDPSNNMTLAVDCVGILKLRNADVEARIG |
| | IAGSKKKSTRARLVFRVNIMRKDGSTLTLQTPSSPILCTQPAGVPEILKK |
| | SLHSCSVKGEEEVFLIGKNFLKGTKVIFQENVSDENSWKSEAEIDMELFH |
| | QNHLIVKVPPYHDQHITLPVSVGIYVVTNAGRSHDVQPFTYTPDPAAAGA |
| | LNVNVKKEISSPARPCSFEEAMKAMKTTGCNLDKVNIIPNALMTPLIPSS |
| | MIKSEDVTPMEVTAEKRSSTIFKTTKSVGSTQQTLENISNIAGNGSFSSP |
| | SSSHLPSENEKQQQIQPKAYNPETLTTIQTQDISQPGTFPAVSASSQLPN |
| | SDALLQQATQFQTRETQSREILQSDGTVVNLSQLTEASQQQQQSPLQEQA |
| | QTLQQQISSNIFPSPNSVSQLQNTIQQLQAGSFTGSTASGSSGSVDLVQQ |
| | VLEAQQQLSSVLFSAPDGNENVQEQLSADIFQQVSQIQSGVSPGMFSSTE |
| | PTVHTRPDNLLPGRAESVHPQSENTLSNQQQQQQQQQQVMESSAAMVMEM |
| | QQSICQAAAQIQSELFPSTASANGNLQQSPVYQQTSHMMSALSTNEDMQM |
| | QCELFSSPPAVSGNETSTTTTQQVATPGTTMFQTSSSGDGEETGTQAKQI |
| | QNSVFQTMVQMQHSGDNQPQVNLFSSTKSMMSVQNSGTQQQGNGIFQQGN |
| | EMMSLQSGNFLQQSSHSQAQLFHPQNPIADAQNLSQETQGSLFHSPNPIV |
| | HSQTSTTSSEQMQPPMFHSQSTIAVLQGSSVPQDQQSTNIELSQSPMNNL |
| | QTNTVAQEAFFAAPNSISPLQSTSNSEQQAAFQQQAPISHIQTPMLSQEQ |
| | AQPPQQGLFQPQVALGSLPPNPMPQSQQGTMFQSQHSIVAMQSNSPSQEQ |
| | QQQQQQQQQQQQQQQQSILFSNQNTNATMASPKQPPPNMIFNPNQNPMAN |
| | QEQQNQSIFHQQSNMAPMNQEQQPMQFQSQSTVSSLQNPGPTQSESSQTP |
| | LFHSSPQIQLVQGSPSSQEQQVTLFLSPASMSALQTSINQQDMQQSPLYS |
| | PQNNMPGIQGATSSPQPQATLFHNTAGGTMNQLQNSPGSSQQTSGMFLFG |
| | IQNNCSQLLTSGPATLPDQLMAISQPGQPQNEGQPPVTILLSQQMPENSP |
| | LASSINTNQNIEKIDLLVSLQNQGNNLTGSF |
| Nuclear factor of | MPSTSFPVPSKFPLGPAAAVFGRGETLGPAPRAGGTMKSAEEEHYGYASS |
| activated T-cells, | NVSPALPLPTAHSTLPAPCHNLQTSTPGIIPPADHPSGYGAALDGGPAGY |
| cytoplasmic 1 | FLSSGHIRPDGAPALESPRIEITSCLGLYHNNNQFFHDVEVEDVIPSSKR |
| (NFATC1), isoform | SPSTATLSLPSLEAYRDPSCLSPASSLSSRSCNSEASSYESNYSYPYASP |
| 1, UniProKB | QTSPWQSPCVSPKTTDPEEGFPRGLGACTLLGSPRHSPSTSPRASVTEES |
| Accession No. | WLGARSSRPASPCNKRKYSLNGRQPPYSPHHSPTPSPHGSPRVSVIDDSW |
| 095644-1 | IGNTTQYTSSAIVAAINALTTDSSLDLGDGVPVKSRKTTLEQPPSVALKV |
| SEQ ID NO: 259 | EPVGEDLGSPPPPADFAPEDYSSFQHIRKGGFCDQYLAVPQHPYQWAKPK |
| | PLSPTSYMSPTLPALDWQLPSHSGPYELRIEVQPKSHHRAHYETEGSRGA |
| | VKASAGGHPIVQLHGYLENEPLMLQLFIGTADDRLLRPHAFYQVHRITGK |
| | TVSTTSHEAILSNIKVLEIPLLPENSMRAVIDCAGILKLRNSDIELRKGE |
| | TDIGRKNTRVRLVFRVHVPQPSGRTLSLQVASNPIECSQRSAQELPLVEK |
| | QSTDSYPVVGGKKMVLSGHNFLQDSKVIFVEKAPDGHHVWEMEAKTDRDL |
| | CKPNSLVVEIPPERNQRITSPVHVSFYVQNGKRKRSQYQRFTYLPANVPI |
| | IKTEPTDDYEPAPTCGPVSQGLSPLPRPYYSQQLAMPPDPSSCLVAGFPP |
| | CPQRSTLMPAAPGVSPKLHDLSPAAYTKGVASPGHCHLGLPQPAGEAPAV |
| | QDVPRPVATHPGSPGQPPPALLPQQVSAPPSSSCPPGLEHSLCPSSPSPP |
| | LPPATQEPTCLQPCSPACPPATGRPQHLPSTVRRDESPTAGPRLLPEVHE |
| | DGSPNLAPIPVTVKREPEELDQLYLDDVNEIIRNDLSSTSTHS |
| Nuclear factor of | MGAASCEDEELEFKLVFGEEKEAPPLGAGGLGEELDSEDAPPCCRLALGE |
| activated T-cells, | PPPYGAAPIGIPRPPPPRPGMHSPPPRPAPSPGTWESQPARSVRLGGPGG |
| cytoplasmic 4 | GAGGAGGGRVLECPSIRITSISPTPEPPAALEDNPDAWGDGSPRDYPPPE |
| (NFATC4), isoform 1, | GFGGYREAGGQGGGAFFSPSPGSSSLSSWSFFSDASDEAALYAACDEVES |
| UniProKB Accession | ELNEAASRFGLGSPLPSPRASPRPWTPEDPWSLYGPSPGGRGPEDSWILL |
| No. Q14934-1 | SAPGPTPASPRPASPCGKRRYSSSGTPSSASPALSRRGSLGEEGSEPPPP |
| SEQ ID NO: 260 | PPLPLARDPGSPGPFDYVGAPPAESIPQKTRRTSSEQAVALPRSEEPASC |
| | NGKLPLGAEESVAPPGGSRKEVAGMDYLAVPSPLAWSKARIGGHSPIFRT |
| | SALPPLDWPLPSQYEQLELRIEVQPRAHHRAHYETEGSRGAVKAAPGGHP |
| | VVKLLGYSEKPLTLQMFIGTADERNLRPHAFYQVHRITGKMVATASYEAV |
| | VSGTKVLEMTLLPENNMAANIDCAGILKLRNSDIELRKGETDIGRKNTRV |
| | RLVFRVHVPQGGGKVVSVQAASVPIECSQRSAQELPQVEAYSPSACSVRG |
| | GEELVITGSNFLPDSKVVFIERGPDGKLQWEEEATVNRLQSNEVTLTLTV |
| | PEYSNKRVSRPVQVYFYVSNGRRKRSPTQSFRFLPVICKEEPLPDSSLRG |
| | FPSASATPFGTDMDFSPPRPPYPSYPHEDPACETPYLSEGEGYGMPPLYP |
| | QTGPPPSYRPGLRMFPETRGTTGCAQPPAVSFLPRPFPSDPYGGRGSSES |
| | LGLPFSPPAPFRPPPLPASPPLEGPFPSQSDVHPLPAEGYNKVGPGYGPG |
| | EGAPEQEKSRGGYSSGERDSVPIQGITLEEVSEIIGRDLSGFPAPPGEEP |
| | PA |
| Nuclear factor of | MITANCGAHDELDFKLVFGEDGAPAPPPPGSRPADLEPDDCASIYIFNVD |
| activated T-cells, | PPPSTLTTPLCLPHHGLPSHSSVLSPSFQLQSHKNYEGTCEIPESKYSPL |
| cytoplasmic 3 | GGPKPFECPSIQITSISPNCHQELDAHEDDLQINDPEREFLERPSRDHLY |
| (NFATC3), isoform 1, | LPLEPSYRESSLSPSPASSISSRSWFSDASSCESLSHIYDDVDSELNEAA |
| UniProKB Accession | ARFTLGSPLTSPGGSPGGCPGEETWHQQYGIGHSLSPRQSPCHSPRSSVT |
| No. Q12968-1 | DENWLSPRPASGPSSRPTSPCGKRRHSSAEVCYAGSLSPHHSPVPSPGHS |
| SEQ ID NO: 261 | PRGSVTEDTWLNASVHGGSGLGPAVFPFQYCVETDIPLKTRKTSEDQAAI |
| | LPGKLELCSDDQGSLSPARETSIDDGLGSQYPLKKDSCGDQFLSVPSPFT |
| | WSKPKPGHTPIFRISSLPPLDWPLPAHFGQCELKIEVQPKTHHRAHYETE |
| | GSRGAVKASTGGHPVVKLLGYNEKPINLQMFIGTADDRYLRPHAFYQVHR |
| | ITGKTVATASQEIIIASTKVLEIPLLPENNMSASIDCAGILKLRNSDIEL |
| | RKGETDIGRKNTRVRLVERVHIPQPSGKVLSLQIASIPVECSQRSAQELP |
| | HIEKYSINSCSVNGGHEMVVTGSNFLPESKIIFLEKGQDGRPQWEVEGKI |
| | IREKCQGAHIVLEVPPYHNPAVTAAVQVHFYLCNGKRKKSQSQRFTYTPV |
| | LMKQEHREEIDLSSVPSLPVPHPAQTQRPSSDSGCSHDSVLSGQRSLICS |
| | IPQTYASMVTSSHLPQLQCRDESVSKEQHMIPSPIVHQPFQVTPTPPVGS |
| | SYQPMQTNVVYNGPTCLPINAASSQEFDSVLFQQDATLSGLVNLGCQPLS |
| | SIPFHSSNSGSTGHLLAHTPHSVHTLPHLQSMGYHCSNTGQRSLSSPVAD |
| | QITGQPSSQLQPITYGPSHSGSATTASPAASHPLASSPLSGPPSPQLQPM |
| | PYQSPSSGTASSPSPATRMHSGQHSTQAQSTGQGGLSAPSSLICHSLCDP |
| | ASFPPDGATVSIKPEPEDREPNFATIGLQDITLDDVNEIIGRDMSQISVS |
| | QGAGVSRQAPLPSPESLDLGRSDGL |
| Von Hippel-Lindau | MPRRAENWDEAEVGAEEAGVEEYGPEEDGGEESGAEESGPEESGPEELGA |
| Tumor Suppressor | EEEMEAGRPRPVLRSVNSREPSQVIFCNRSPRVVLPVWLNEDGEPQPYPT |
| (VHL), isoform 1, | LPPGTGRRIHSYRGHLWLFRDAGTHDGLLVNQTELFVPSLNVDGQPIFAN |
| UniProKB Accession | ITLPVYTLKERCLQVVRSLVKPENYRRLDIVRSLYEDLEDHPNVQKDLER |
| No. P40337-1 | LTQERIAHQRMGD |
| SEQ ID NO: 262 | |
| Cytokine-inducible | MVLCVQGPRPLLAVERTGQRPLWAPSLELPKPVMQPLPAGAFLEEVAEGT |
| SH2-containing | PAQTESEPKVLDPEEDLLCIAKTFSYLRESGWYWGSITASEARQHLQKMP |
| protein (CISH), | EGTFLVRDSTHPSYLFTLSVKTTRGPINVRIEYADSSFRLDSNCLSRPRI |
| isoform 1, UniProKB | LAFPDVVSLVQHYVASCTADTRSDSPDPAPTPALPMPKEDAPSDPALPAP |
| Accession No. | PPATAVHLKLVQPFVRRSSARSLQHLCRLVINRLVADVDCLPLPRRMADY |
| Q9NSE2-1 | LRQYPFQL |
| SEQ ID NO: 263 | |
| Suppressor of | MVAHNQVAADNAVSTAAEPRRRPEPSSSSSSSPAAPARPRPCPAVPAPAPGD |
| cytokine signaling 1 | THERTFRSHADYRRITRASALLDACGFYWGPLSVHGAHERLRAEPVGTFLVR |
| (SOCS1), isoform 1, | DSRQRNCFFALSVKMASGPTSIRVHFQAGRFHLDGSRESFDCLFELLEHYVA |
| UniProKB Accession | APRRMLGAPLRQRRVRPLQELCRQRIVATVGRENLARIPLNPVLRDYLSSEP |
| No. 015524-1 | FQI |
| SEQ ID NO: 264 | |
| Suppressor of | MTLRCLEPSGNGGEGTRSQWGTAGSAEEPSPQAARLAKALRELGQTGWYWGS |
| cytokine signaling 2 | MTVNEAKEKLKEAPEGTFLIRDSSHSDYLLTISVKTSAGPTNLRIEYQDGKF |
| (SOCS2), isoform 1, | RLDSIICVKSKLKQFDSVVHLIDYYVQMCKDKRTGPEAPRNGTVHLYLTKPL |
| UniProKB Accession | YTSAPSLQHLCRLTINKCTGAIWGLPLPTRLKDYLEEYKFQV |
| No. 014508-1 | |
| SEQ ID NO: 265 | |
| Suppressor of | MVTHSKFPAAGMSRPLDTSLRLKTFSSKSEYQLVVNAVRKLQESGFYWSAVT |
| cytokine signaling 3 | GGEANLLLSAEPAGTFLIRDSSDQRHFFTLSVKTQSGTKNLRIQCEGGSFSL |
| (SOCS3), isoform 1, | QSDPRSTQPVPRFDCVLKLVHHYMPPPGAPSFPSPPTEPSSEVPEQPSAQPL |
| UniProKB Accession | PGSPPRRAYYIYSGGEKIPLVLSRPLSSNVATLQHLCRKTVNGHLDSYEKVT |
| No. 014543-1 | QLPGPIREFLDQYDAPL |
| SEQ ID NO: 266 | |
| Suppressor of | MAENNENISKNVDVRPKTSRSRSADRKDGYVWSGKKLSWSKKSESYSDAETV |
| cytokine signaling 4 | NGIEKTEVSIRNQERKHSCSSIELDLDHSCGHRFLGRSLKQKLQDAVGQCFP |
| (SOCS4), isoform 1, | IKNCSSRHSSGLPSKRKIHISELMLDKCPFPPRSDLAFRWHFIKRHTAPINS |
| UniProKB Accession | KSDEWVSTDLSQTELRDGQLKRRNMEENINCFSHINVQPCVITTDNALCREG |
| No. Q8WXH5-1 | PMTGSVMNLVSNNSIEDSDMDSDDEILTLCTSSRKRNKPKWDLDDEILQLET |
| SEQ ID NO: 267 | PPKYHTQIDYVHCLVPDLLQINNNPCYWGVMDKYAAEALLEGKPEGTFLLRD |
| | SAQEDYLFSVSFRRYSRSLHARIEQWNHNFSFDAHDPCVFHSPDITGLLEHY |
| | KDPSACMFFEPLLSTPLIRTFPFSLQHICRTVICNCTTYDGIDALPIPSSMK |
| | LYLKEYHYKSKVRVLRIDAPEQQC |
| Suppressor of | MDKVGKMWNNFKYRCQNLEGHEGGSRSENVDMNSNRCLSVKEKNISIGDSTP |
| cytokine signaling 5 | QQQSSPLRENIALQLGLSPSKNSSRRNQNCATEIPQIVEISIEKDNDSCVTP |
| (SOCS5), isoform 1, | GTRLARRDSYSRHAPWGGKKKHSCSTKTQSSLDADKKFGRTRSGLQRRERRY |
| UniProKB Accession | GVSSVHDMDSVSSRTVGSRSLRQRLQDTVGLCFPMRTYSKQSKPLFSNKRKI |
| No. 075159-1 | HISELMLEKCPFPAGSDLAQKWHLIKQHTAPVSPHSTFEDTFDPSLVSTEDE |
| SEQ ID NO: 268 | EDRIRERRRISIEEGVDPPPNAQIHTFEATAQVNPLYKLGPKLAPGMTEISG |
| | DSSAIPQANCDSEEDTTTLCLQSRRQKQRQISGDSHTHVSRQGAWKVHTQID |
| | YIHCLVPDLLQITGNPCYWGVMDRYEAEALLEGKPEGTFLLRDSAQEDYLES |
| | VSFRRYNRSLHARIEQWNHNFSFDAHDPCVFHSSTVTGLLEHYKDPSSCMFF |
| | EPLLTISLNRTFPFSLQYICRAVICRCTTYDGIDGLPLPSMLQDFLKEYHYK |
| | QKVRVRWLEREPVKAK |
| Suppressor of | MKKISLKTLRKSFNLNKSKEETDEMVVQQPSLASDFGKDDSLFGSCYGKDMA |
| cytokine signaling 6 | SCDINGED |
| (SOCS6), isoform 1, | EKGGKNRSKSESIMGTLKRRLSAKQKSKGKAGTPSGSSADEDTFSSSSAPIV |
| UniProKB Accession | FKDVRAQR |
| No. 014544-1 | PIRSTSLRSHHYSPAPWPLRPINSEETCIKMEVRVKALVHSSSPSPALNGVR |
| SEQ ID NO: 269 | KDFHDLQS |
| | ETTCQEQANSLKSSASHNGDLHLHLDEHVPVVIGIMPQDYIQYTVPIDEGMY |
| | PLEGSRSY |
| | CLDSSSPMEVSAVPPQVGGRAFPEDESQVDQDLVVAPEIFVDQSVNGLLIGT |
| | TGVMLQSP |
| | RAGHDDVPPLSPLLPPMQNNQIQRNFSGLIGTEAHVAESMRCHINFDPNSAP |
| | GVARVYDS |
| | VQSSGPMVVTSLTEELKKLAKQGWYWGPITRWEAEGKLANVPDGSFLVRDSS |
| | DDRYLLSL |
| | SFRSHGKTLHTRIEHSNGRFSFYEQPDVEGHTSIVDLIEHSIRDSENGAFCY |
| | SRSRLPGS |
| | ATYPVRLTNPVSRFMQVRSLQYLCRFVIRQYTRIDLIQKLPLPNKMKDYLQE |
| | KHY |
| Suppressor of | MVFRNVGRPPEEEDVEAAPEPGPSELLCPRHRCALDPKALPPGLALERTWGP |
| cytokine signaling 7 | AAGLEAQLAALGLGQPAGPGVKTVGGGCCPCPCPPQPPPPQPQPPAAAPQAG |
| (SOCS7), isoform 1, | EDPTETSDALLVLEGLESEAESLEINSCSEEELSSPGRGGGGGGRLLLQPPG |
| UniProKB Accession | PELPPVPFPLQDLVPLGRLSRGEQQQQQQQQPPPPPPPPGPLRPLAGPSRKG |
| No. 014512-1 | SFKIRLSRLFRTKSCNGGSGGGDGTGKRPSGELAASAASLTDMGGSAGRELD |
| SEQ ID NO: 270 | AGRKPKLTRTQSAFSPVSFSPLFTGETVSLVDVDISQRGLTSPHPPTPPPPP |
| | RRSISLIDDISGTLPTSVLVAPMGSSLQSFPLPPPPPPHAPDAFPRIAPIRA |
| | AESLHSQPPQHLQCPLYRPDSSSFAASLRELEKCGWYWGPMNWEDAEMKLKG |
| | KPDGSFLVRDSSDPRYILSLSFRSQGITHHTRMEHYRGTFSLWCHPKFEDRC |
| | QSVVEFIKRAIMHSKNGKFLYFLRSRVPGLPPTPVQLLYPVSRFSNVKSLQH |
| | LCRFRIRQLVRIDHIPDLPLPKPLISYIRKFYYYDPQEEVYLSLKEAQLISK |
| | QKQEVEPST |
| Tyrosine-protein | MPTTIEREFEELDTQRRWQPLYLEIRNESHDYPHRVAKFPENRNRNRYRDVS |
| phosphatase non- | PYDHSRVKLQNAENDYINASLVDIEEAQRSYILTQGPLPNTCCHFWLMVWQQ |
| receptor type 2 | KTKAVVMLNRIVEKESVKCAQYWPTDDQEMLFKETGFSVKLLSEDVKSYYTV |
| (PTPN2), isoform | HILQLENINSGETRTISHFHYTTWPDFGVPESPASFLNFLFKVRESGSINPD |
| 1, UniProKB | HGPAVIHCSAGIGRSGTFSLVDTCLVLMEKGDDINIKQVLLNMRKYRMGLIQ |
| Accession | TPDQLRFSYMAIIEGAKCIKGDSSIQKRWKELSKEDLSPAFDHSPNKIMTEK |
| No.P17706-1 | YNGNRIGLEEEKLIGDRCTGLSSKMQDTMEENSESALRKRIREDRKATTAQK |
| SEQ ID NO: 271 | VQQMKQRINENERKRKRWLYWQPILTKMGFMSVILVGAFVGWILFFQQNAL |
| Protein-tyrosine | MVRWFHRDISGIDAETLLKGRGVHGSFLARPSRKNQGDFSLSVRVGDQVTHI |
| phosphatase SHP-1 | RIQNSGDFYDLYGGEKFATLTELVEYYTQQQGVLQDRDGTIIHLKYPLNCSD |
| (SHP1), isoform 1, | PTSERWYHGHMSGGQAETLLQAKGEPWTFLVRESLSQPGDFVLSVLSDQPKA |
| UniProKB Accession | GPGSPLRVTHIKVMCEGGRYTVGGLETFDSLIDLVEHFKKTGIEEASGAFVY |
| No. P29350-1 | LRQPYYATRVNAADIENRVLELNKKQESEDTAKAGFWEEFESLQKQEVKNLH |
| SEQ ID NO: 272 | QRLEGQRPENKGKNRYKNILPFDHSRVILQGRDSNIPGSDYINANYIKNQLL |
| | GPDENAKTYIASQGCLEATVNDFWQMAWQENSRVIVMTTREVEKGRNKCVPY |
| | WPEVGMQRAYGPYSVINCGEHDTTEYKLRTLQVSPLDNGDLIREIWHYQYLS |
| | WPDHGVPSEPGGVLSFLDQINQRQESLPHAGPIIVHCSAGIGRIGTIIVIDM |
| | LMENISTKGLDCDIDIQKTIQMVRAQRSGMVQTEAQYKFIYVAIAQFIETTK |
| | KKLEVLQSQKGQESEYGNITYPPAMKNAHAKASRTSSKHKEDVYENLHTKNK |
| | REEKVKKQRSADKEKSKGSLKRK |
| Protein-tyrosine | MTSRRWFHPNITGVEAENLLLTRGVDGSFLARPSKSNPGDFTLSVRRNGA |
| phosphatase (SHP2), | VTHIKIQNTGDYYDLYGGEKFATLAELVQYYMEHHGQLKEKNGDVIELKY |
| isoform 1, UniProKB | PLNCADPTSERWFHGHLSGKEAEKLLTEKGKHGSFLVRESQSHPGDEVIS |
| Accession No. | VRIGDDKGESNDGKSKVTHVMIRCQELKYDVGGGERFDSLTDLVEHYKKN |
| Q06124-2 | PMVETLGTVLQLKQPLNTTRINAARIESRVRELSKLAETTDKVKQGEWEE |
| SEQ ID NO: 273 | FETLQQQECKLLYSRKEGQRQENKNKNRYKNILPFDHTRVVLHDGDPNEP |
| | VSDYINANIIMPEFETKCNNSKPKKSYIATQGCLQNTVNDFWRMVFQENS |
| | RVIVMTTKEVERGKSKCVKYWPDEYALKEYGVMRVRNVKESAAHDYTIRE |
| | LKLSKVGQGNTERTVWQYHFRTWPDHGVPSDPGGVLDFLEEVHHKQESIM |
| | DAGPVVVHCSAGIGRIGTFIVIDILIDIIREKGVDCDIDVPKTIQMVRSQ |
| | RSGMVQTEAQYRFIYMAVQHYIETLQRRIEEEQKSKRKGHEYTNIKYSLA |
| | DQTSGDQSPLPPCTPTPPCAEMREDSARVYENVGLMQQQKSER |
| GRB2-related adapter | MEAVAKFDFTASGEDELSFHTGDVLKILSNQEEWFKAELGSQEGYVPKNF |
| protein 2 (GRAP2; | IDIQFPKWFHEGLSRHQAENLIMGKEVGFFIIRASQSSPGDFSISVRHED |
| also known as | DVQHFKVMRDNKGNYFLWTEKFPSINKLVDYYRINSISRQKQIFLRDRTR |
| GADS), isoform 1, | EDQGHRGNSLDRRSQGGPHLSGAVGEEIRPSMNRKLSDHPPTLPLQQHQH |
| UniProKB Accession | QPQPPQYAPAPQQLQQPPQQRYLQHHHFHQERRGGSLDINDGHCGTGLGS |
| No. 075791-1 | EMNAALMHRRHTDPVQLQAAGRVRWARALYDFEALEDDELGFHSGEVVEV |
| SEQ ID NO: 274 | LDSSNPSWWTGRLHNKLGLFPANYVAPMTR |
| Growth factor | MEAIAKYDFKATADDELSFKRGDILKVINEECDQNWYKAELNGKDGFIPK |
| receptor-bound | NYIEMKPHPWFFGKIPRAKAEEMLSKQRHDGAFLIRESESAPGDFSLSVK |
| protein 2 (Grb2), | FGNDVQHFKVLRDGAGKYFLWVVKENSLNELVDYHRSTSVSRNQQIFLRD |
| isoform 1, UniProKB | IHQVPQQPTYVQALFDEDPQEDGELGFRRGDFIHVMDNSDPNWWKGACHG |
| Accession No. | QTGMFPRNYVTPVNRNV |
| P62993-1 | |
| SEQ ID NO: 275 | |
| 1-phosphatidylinositol | MAGAASPCANGCGPGAPSDAEVLHLCRSLEVGTVMTLFYSKKSQRPERKT |
| 4,5-bisphosphate | FQVKLETRQITWSRGADKIEGAIDIREIKEIRPGKTSRDFDRYQEDPAFR |
| phosphodiesterase | PDQSHCFVILYGMEFRLKTLSLQATSEDEVNMWIKGLTWLMEDTLQAPTP |
| gamma-1 (PLCy1), | LQIERWLRKQFYSVDRNREDRISAKDLKNMLSQVNYRVPNMRFLRERLTD |
| isoform 1, UniProKB | LEQRSGDITYGQFAQLYRSLMYSAQKTMDLPFLEASTLRAGERPELCRVS |
| Accession No. | LPEFQQFLLDYQGELWAVDRLQVQEFMLSFLRDPIREIEEPYFFLDEFVT |
| P19174-1 | FLFSKENSVWNSQLDAVCPDTMNNPLSHYWISSSHNTYLTGDQFSSESSL |
| SEQ ID NO: 276 | EAYARCLRMGCRCIELDCWDGPDGMPVIYHGHTLTTKIKFSDVLHTIKEH |
| | AFVASEYPVILSIEDHCSIAQQRNMAQYFKKVLGDTLLTKPVEISADGLP |
| | SPNQLKRKILIKHKKLAEGSAYEEVPTSMMYSENDISNSIKNGILYLEDP |
| | VNHEWYPHYFVLTSSKIYYSEETSSDQGNEDEEEPKEVSSSTELHSNEKW |
| | FHGKLGAGRDGRHIAERLLTEYCIETGAPDGSFLVRESETFVGDYTLSFW |
| | MRLSEPVPQTNAHESKEWYHASLTRAQAEHMLMRVPRDGAFLVRKRNEPN |
| | SYAISFRAEGKIKHCRVQQEGQTVMLGNSEFDSLVDLISYYEKHPLYRKM |
| | KLRYPINEEALEKIGTAEPDYGALYEGRNPGFYVEANPMPTFKCAVKALF |
| | DYKAQREDELTFIKSAIIQNVEKQEGGWWRGDYGGKKQLWFPSNYVEEMV |
| | NPVALEPEREHLDENSPLGDLLRGVIDVPACQIAIRPEGKNNRLFVFSIS |
| | MASVAHWSLDVAADSQEELQDWVKKIREVAQTADARLTEGKIMERRKKIA |
| | LELSELVVYCRPVPFDEEKIGTERACYRDMSSFPETKAEKYVNKAKGKKE |
| | LQYNRLQLSRIYPKGQRLDSSNYDPLPMWICGSQLVALNFQTPDKPMQMN |
| | QALFMTGRHCGYVLQPSTMRDEAFDPFDKSSLRGLEPCAISIEVLGARHL |
| | PKNGRGIVCPFVEIEVAGAEYDSTKQKTEFVVDNGLNPVWPAKPFHFQIS |
| | NPEFAFLRFVVYEEDMESDQNFLAQATFPVKGLKTGYRAVPLKNNYSEDL |
| | ELASLLIKIDIFPAKENGDLSPFSGTSLRERGSDASGQLFHGRAREGSFE |
| | SRYQQPFEDFRISQEHLADHEDSRERRAPRRTRVNGDNRL |
| Linker for activation | MEEAILVPCVIGLLLLPILAMLMALCVHCHRLPGSYDSTSSDSLYPRGIQ |
| of T-cells family | FKRPHTVAPWPPAYPPVTSYPPLSQPDLLPIPRSPQPLGGSHRTPSSRRD |
| member 1 (LAT), | SDGANSVASYENEGASGIRGAQAGWGVWGPSWTRLTPVSLPPEPACEDAD |
| isoform 1, UniProKB | EDEDDYHNPGYLVVLPDSTPATSTAAPSAPALSTPGIRDSAFSMESIDDY |
| Accession No. | VNVPESGESAEASLDGSREYVNVSQELHPGAAKTEPAALSSQEAEEVEEE |
| 043561-1 | GAPDYENLQELN |
| SEQ ID NO: 277 | |
| SH2 domain- | MALRNVPFRSEVLGWDPDSLADYFKKLNYKDCEKAVKKYHIDGARFLNLT |
| containing leukocyte | ENDIQKFPKLRVPILSKLSQEINKNEERRSIFTRKPQVPRFPEETESHEE |
| protein of 76 kDa | DNGGWSSFEEDDYESPNDDQDGEDDGDYESPNEEEEAPVEDDADYEPPPS |
| (SLP76), isoform 1, | NDEEALQNSILPAKPFPNSNSMYIDRPPSGKTPQQPPVPPQRPMAALPPP |
| UniProKB Accession | PAGRNHSPLPPPQTNHEEPSRSRNHKTAKLPAPSIDRSTKPPLDRSLAPF |
| No. Q13094-1 | DREPFTLGKKPPFSDKPSIPAGRSLGEHLPKIQKPPLPPTTERHERSSPL |
| SEQ ID NO: 278 | PGKKPPVPKHGWGPDRRENDEDDVHQRPLPQPALLPMSSNTFPSRSTKPS |
| | PMNPIPSSHMPGAFSESNSSFPQSASLPPYFSQGPSNRPPIRAEGRNFPL |
| | PLPNKPRPPSPAEEENSLNEEWYVSYITRPEAEAALRKINQDGTFLVRDS |
| | SKKTTTNPYVLMVLYKDKVYNIQIRYQKESQVYLIGTGLRGKEDFLSVSD |
| | IIDYFRKMPLLLIDGKNRGSRYQCTLTHAAGYP |
| Tyrosine-protein | MGCGCSSHPEDDWMENIDVCENCHYPIVPLDGKGTLLIRNGSEVRDPLVT |
| kinase Lck (Lck), | YEGSNPPASPLQDNLVIALHSYEPSHDGDLGFEKGEQLRILEQSGEWWKA |
| isoform 1, UniProKB | QSLTTGQEGFIPFNFVAKANSLEPEPWFFKNLSRKDAERQLLAPGNTHGS |
| Accession No. | FLIRESESTAGSFSLSVRDFDQNQGEVVKHYKIRNLDNGGFYISPRITFP |
| P06239-1 | GLHELVRHYTNASDGLCTRLSRPCQTQKPQKPWWEDEWEVPRETLKIVER |
| SEQ ID NO: 279 | LGAGQFGEVWMGYYNGHTKVAVKSLKQGSMSPDAFLAEANLMKQLQHQRL |
| | VRLYAVVTQEPIYIITEYMENGSLVDFLKTPSGIKLTINKLLDMAAQIAE |
| | GMAFIEERNYIHRDLRAANILVSDTLSCKIADFGLARLIEDNEYTAREGA |
| | KFPIKWTAPEAINYGTFTIKSDVWSFGILLTEIVTHGRIPYPGMINPEVI |
| | QNLERGYRMVRPDNCPEELYQLMRLCWKERPEDRPTFDYLRSVLEDFFTA |
| | TEGQYQPQP |
| Interleukin-2- | MNNFILLEEQLIKKSQQKRRTSPSNFKVRFFVLTKASLAYFEDRHGKKRT |
| inducible T-cell kinase | LKGSIELSRIKCVEIVKSDISIPCHYKYPFQVVHDNYLLYVFAPDRESRQ |
| (Itk), isoform 1, | RWVLALKEETRNNNSLVPKYHPNFWMDGKWRCCSQLEKLATGCAQYDPTK |
| UniProKB Accession | NASKKPLPPTPEDNRRPLWEPEETVVIALYDYQTNDPQELALRRNEEYCL |
| No. Q08881-1 | IDSSEIHWWRVQDRNGHEGYVPSSYLVEKSPNNLETYEWYNKSISRDKAE |
| SEQ ID NO: 280 | KLLIDTGKEGAFMVRDSRTAGTYTVSVETKAVVSENNPCIKHYHIKETND |
| | NPKRYYVAEKYVFDSIPLLINYHQHNGGGLVTRLRYPVCFGRQKAPVTAG |
| | LRYGKWVIDPSELTFVQEIGSGQFGLVHLGYWLNKDKVAIKTIREGAMSE |
| | EDFIEEAEVMMKLSHPKLVQLYGVCLEQAPICLVFEFMEHGCLSDYLRTQ |
| | RGLFAAETLLGMCLDVCEGMAYLEEACVIHRDLAARNCLVGENQVIKVSD |
| | FGMTRFVLDDQYTSSTGTKFPVKWASPEVESFSRYSSKSDVWSFGVLMWE |
| | VFSEGKIPYENRSNSEVVEDISTGFRLYKPRLASTHVYQIMNHCWKERPE |
| | DRPAFSRLLRQLAEIAESGL |
| B-cell progenitor | MAAVILESIFLKRSQQKKKTSPLNFKKRLFLLTVHKLSYYEYDFERGRRG |
| kinase (Btk), isoform | SKKGSIDVEKITCVETVVPEKNPPPERQIPRRGEESSEMEQISIIEREPY |
| 1, UniProKB | PFQVVYDEGPLYVFSPTEELRKRWIHQLKNVIRYNSDLVQKYHPCFWIDG |
| Accession No. | QYLCCSQTAKNAMGCQILENRNGSLKPGSSHRKTKKPLPPTPEEDQILKK |
| Q06187-1 | PLPPEPAAAPVSTSELKKVVALYDYMPMNANDLQLRKGDEYFILEESNLP |
| SEQ ID NO: 281 | WWRARDKNGQEGYIPSNYVTEAEDSIEMYEWYSKHMTRSQAEQLLKQEGK |
| | EGGFIVRDSSKAGKYTVSVFAKSTGDPQGVIRHYVVCSTPQSQYYLAEKH |
| | LFSTIPELINYHQHNSAGLISRLKYPVSQQNKNAPSTAGLGYGSWEIDPK |
| | DLTFLKELGTGQFGVVKYGKWRGQYDVAIKMIKEGSMSEDEFIEEAKVMM |
| | NLSHEKLVQLYGVCTKQRPIFIITEYMANGCLLNYLREMRHRFQTQQLLE |
| | MCKDVCEAMEYLESKQFLHRDLAARNCLVNDQGVVKVSDFGLSRYVLDDE |
| | YTSSVGSKFPVRWSPPEVIMYSKFSSKSDIWAFGVLMWEIYSLGKMPYER |
| | FINSETAEHIAQGLRLYRPHLASEKVYTIMYSCWHEKADERPTFKILLSN |
| | ILDVMDEES |
| BET family | |
| Ten-eleven | MSRSRHARPSRLVRKEDVNKKKKNSQLRKTTKGANKNVASVKTLSPGKLKQLIQ |
| translocation 1 | ERDVKKKTEPKPPVPVRSLLTRAGAARMNLDRTEVLFQNPESLTCNGFTMALRS |
| (TET1), isoform 1, | TSLSRRLSQPPLVVAKSKKVPLSKGLEKQHDCDYKILPALGVKHSENDSVPMQD |
| UniProKB Accession | TQVLPDIETLIGVQNPSLLKGKSQETTQFWSQRVEDSKINIPTHSGPAAEILPG |
| No. Q8NFU7-1 | PLEGTRCGEGLFSEETINDTSGSPKMFAQDTVCAPFPQRATPKVTSQGNPSIQL |
| SEQ ID NO: 282 | EELGSRVESIKLSDSYLDPIKSEHDCYPTSSLNKVIPDLNLRNCLALGGSTSPT |
| | SVIKFLLAGSKQATLGAKPDHQEAFEATANQQEVSDTTSELGQAFGAIPHQWEL |
| | PGADPVHGEALGETPDLPEIPGAIPVQGEVFGTILDQQETLGMSGSVVPDLPVE |
| | LPVPPNPIATFNAPSKWPEPQSTVSYGLAVQGAIQILPLGSGHTPQSSSNSEKN |
| | SLPPVMAISNVENEKQVHISFLPANTQGFPLAPERGLFHASLGIAQLSQAGPSK |
| | SDRGSSQVSVTSTVHVVNTTVVTMPVPMVSTSSSSYTTLLPTLEKKKRKRCGVC |
| | EPCQQKTNCGECTYCKNRKNSHQICKKRKCEELKKKPSVVVPLEVIKENKRPQR |
| | EKKPKVLKADFDNKPVNGPKSESMDYSRCGHGEEQKLELNPHTVENVTKNEDSM |
| | TGIEVEKWTQNKKSQLTDHVKGDFSANVPEAEKSKNSEVDKKRTKSPKLFVQTV |
| | RNGIKHVHCLPAETNVSFKKFNIEEFGKTLENNSYKFLKDTANHKNAMSSVATD |
| | MSCDHLKGRSNVLVFQQPGENCSSIPHSSHSIINHHASIHNEGDQPKTPENIPS |
| | KEPKDGSPVQPSLLSLMKDRRLTLEQVVAIEALTQLSEAPSENSSPSKSEKDEE |
| | SEQRTASLLNSCKAILYTVRKDLQDPNLQGEPPKLNHCPSLEKQSSCNTVVENG |
| | QTTTLSNSHINSATNQASTKSHEYSKVINSLSLFIPKSNSSKIDTNKSIAQGII |
| | TLDNCSNDLHQLPPRNNEVEYCNQLLDSSKKLDSDDLSCQDATHTQIEEDVATQ |
| | LTQLASIIKINYIKPEDKKVESTPTSLVTCNVQQKYNQEKGTIQQKPPSSVHNN |
| | HGSSLTKQKNPTQKKTKSTPSRDRRKKKPTVVSYQENDRQKWEKLSYMYGTICD |
| | IWIASKFQNFGQFCPHDFPTVEGKISSSTKIWKPLAQTRSIMQPKTVFPPLTQI |
| | KLQRYPESAEEKVKVEPLDSLSLFHLKTESNGKAFTDKAYNSQVQLTVNANQKA |
| | HPLTQPSSPPNQCANVMAGDDQIRFQQVVKEQIMHQRLPTLPGISHETPLPESA |
| | LTLRNVNVVCSGGITVVSTKSEEEVCSSSFGTSEFSTVDSAQKNENDYAMNFFT |
| | NPTKNIVSITKDSELPTCSCLDRVIQKDKGPYYTHLGAGPSVAAVREIMENRYG |
| | QKGNAIRIEIVVYTGKEGKSSHGCPIAKWVLRRSSDEEKVLCLVRQRTGHHCPT |
| | AVMVVLIMVWDGIPLPMADRLYTELTENLKSYNGHPTDRRCTLNENRTCTCQGI |
| | DPETCGASFSFGCSWSMYFNGCKFGRSPSPRRFRIDPSSPLHEKNLEDNLQSLA |
| | TRLAPIYKQYAPVAYQNQVEYENVARECRLGSKEGRPESGVTACLDECAHPHRD |
| | IHNMNNGSTVVCTLTREDNRSIGVIPQDEQLHVLPLYKLSDTDEFGSKEGMEAK |
| | IKSGAIEVLAPRRKKRTCFTQPVPRSGKKRAAMMTEVLAHKIRAVEKKPIPRIK |
| | RKNNSTTTNNSKPSSLPTLGSNTETVQPEVKSETEPHFILKSSDNTKTYSLMPS |
| | APHPVKEASPGFSWSPKTASATPAPLKNDATASCGFSERSSTPHCTMPSGRLSG |
| | ANAAAADGPGISQLGEVAPLPTLSAPVMEPLINSEPSTGVTEPLTPHQPNHQPS |
| | FLTSPQDLASSPMEEDEQHSEADEPPSDEPLSDDPLSPAEEKLPHIDEYWSDSE |
| | HIFLDANIGGVAIAPAHGSVLIECARRELHATTPVEHPNRNHPTRLSLVFYQHK |
| | NINKPQHGFELNKIKFEAKEAKNKKMKASEQKDQAANEGPEQSSEVNELNQIPS |
| | HKALTLTHDNVVTVSPYALTHVAGPYNHWV |
| Ten-eleven | MEQDRTNHVEGNRLSPFLIPSPPICQTEPLATKLQNGSPLPERAHPEVNGDTKW |
| translocation 2 | HSFKSYYGIPCMKGSQNSRVSPDFTQESRGYSKCLQNGGIKRTVSEPSLSGLLQ |
| (TET2), isoform 1, | IKKLKQDQKANGERRNFGVSQERNPGESSQPNVSDLSDKKESVSSVAQENAVKD |
| UniProKB Accession | FTSFSTHNCSGPENPELQILNEQEGKSANYHDKNIVLLKNKAVLMPNGATVSAS |
| No. Q6N021-1 | SVEHTHGELLEKTLSQYYPDCVSIAVQKTTSHINAINSQATNELSCEITHPSHT |
| SEQ ID NO: 283 | SGQINSAQTSNSELPPKPAAVVSEACDADDADNASKLAAMLNTCSFQKPEQLQQ |
| | QKSVFEICPSPAENNIQGTTKLASGEEFCSGSSSNLQAPGGSSERYLKQNEMNG |
| | AYFKQSSVFTKDSFSATTTPPPPSQLLLSPPPPLPQVPQLPSEGKSTINGGVLE |
| | EHHHYPNQSNTTLLREVKIEGKPEAPPSQSPNPSTHVCSPSPMLSERPQNNCVN |
| | RNDIQTAGTMTVPLCSEKTRPMSEHLKHNPPIFGSSGELQDNCQQLMRNKEQEL |
| | KGRDKEQTRDLVPPTQHYLKPGWIELKAPRFHQAESHLKRNEASLPSILQYQPN |
| | LSNQMTSKQYTGNSNMPGGLPRQAYTQKTTQLEHKSQMYQVEMNQGQSQGTVDQ |
| | HLQFQKPSHQVHFSKTDHLPKAHVQSLCGTRFHFQQRADSQTEKLMSPVLKQHL |
| | NQQASETEPFSNSHLLQHKPHKQAAQTQPSQSSHLPQNQQQQQKLQIKNKEEIL |
| | QTFPHPQSNNDQQREGSFFGQTKVEECFHGENQYSKSSEFETHNVQMGLEEVQN |
| | INRRNSPYSQTMKSSACKIQVSCSNNTHLVSENKEQTTHPELFAGNKTQNLHHM |
| | QYFPNNVIPKQDLLHRCEQEQEQKSQQASVLQGYKNRNQDMSGQQAAQLAQQRY |
| | LIHNHANVEPVPDQGGSHTQTPPQKDTQKHAALRWHLLQKQEQQQTQQPQTESC |
| | HSQMHRPIKVEPGCKPHACMHTAPPENKTWKKVTKQENPPASCDNVQQKSIIET |
| | MEQHLKQFHAKSLEDHKALTLKSQKQVKVEMSGPVTVLTRQTTAAELDSHTPAL |
| | EQQTTSSEKTPTKRTAASVINNFIESPSKLLDTPIKNLLDTPVKTQYDFPSCRC |
| | VEQIIEKDEGPFYTHLGAGPNVAAIREIMEERFGQKGKAIRIERVIYTGKEGKS |
| | SQGCPIAKWVVRRSSSEEKLLCLVRERAGHTCEAAVIVILILVWEGIPLSLADK |
| | LYSELTETLRKYGTLINRRCALNEERTCACQGLDPETCGASFSFGCSWSMYYNG |
| | CKFARSKIPRKFKLLGDDPKEEEKLESHLQNLSTLMAPTYKKLAPDAYNNQIEY |
| | EHRAPECRLGLKEGRPFSGVTACLDFCAHAHRDLHNMQNGSTLVCTLTREDNRE |
| | EGGKPEDEQLHVLPLYKVSDVDEFGSVEAQEEKKRSGAIQVLSSFRRKVRMLAE |
| | PVKTCRQRKLEAKKAAAEKLSSLENSSNKNEKEKSAPSRTKQTENASQAKQLAE |
| | LLRLSGPVMQQSQQPQPLQKQPPQPQQQQRPQQQQPHHPQTESVNSYSASGSTN |
| | PYMRRPNPVSPYPNSSHTSDIYGSTSPMNFYSTSSQAAGSYLNSSNPMNPYPGL |
| | LNQNTQYPSYQCNGNLSVDNCSPYLGSYSPQSQPMDLYRYPSQDPLSKLSLPPI |
| | HTLYQPREGNSQSFTSKYLGYGNQNMQGDGFSSCTIRPNVHHVGKLPPYPTHEM |
| | DGHFMGATSRLPPNLSNPNMDYKNGEHHSPSHIIHNYSAAPGMENSSLHALHLQ |
| | NKENDMLSHTANGLSKMLPALNHDRTACVQGGLHKLSDANGQEKQPLALVQGVA |
| | SGAEDNDEVWSDSEQSFLDPDIGGVAVAPTHGSILIECAKRELHATTPLKNPNR |
| | NHPTRISLVFYQHKSMNEPKHGLALWEAKMAEKAREKEEECEKYGPDYVPQKSH |
| | GKKVKREPAEPHETSEPTYLRFIKSLAERTMSVITDSTVTTSPYAFTRVTGPYN |
| | RYI |
| (DNA (cytosine-5)- | MPAMPSSGPGDTSSSAAEREEDRKDGEEQEEPRGKEERQEPSTTARKVGRPGRK |
| methyltransferase 3A) | RKHPPVESGDTPKDPAVISKSPSMAQDSGASELLPNGDLEKRSEPQPEEGSPAG |
| (DNMT3a), isoform 1, | GQKGGAPAEGEGAAETLPEASRAVENGCCTPKEGRGAPAEAGKEQKETNIESMK |
| UniProKB Accession | MEGSRGRLRGGLGWESSL |
| No. Q9Y6K1-1 | RQRPMPRLTFQAGDPYYISKRKRDEWLARWKREAEKKAKVIAGMNAVEENQGPG |
| SEQ ID NO: 284 | ESQKVEEASPPAVQQPTDPASPTVATTPEPVGSDAGDKNATKAGDDEPEYEDGR |
| | GFGIGELVWGKLRGFSWWPGRIVSWWMTGRSRAAEGTRWVMWFGDGKFSVVCVE |
| | KLMPLSSFCSAFHQATYNKQPMYRKAIYEVLQVASSRAGKLFPVCHDSDESDTA |
| | KAVEVQNKPMIEWALGGFQPSGPKGLEPPEEEKNPYKEVYTDMWVEPEAAAYAP |
| | PPPAKKPRKSTAEKPKVKEIIDERTRERLVYEVRQKCRNIEDICISCGSINVTL |
| | EHPLFVGGMCQNCKNCFLECAYQYDDDGYQSYCTICCGGREVLMCGNNNCCRCF |
| | CVECVDLLVGPGAAQAAIKEDPWNCYMCGHKGTYGLLRRREDWPSRLQMFFANN |
| | HDQEFDPPKVYPPVPAEKRKPIRVLSLFDGIATGLLVLKDLGIQVDRYIASEVC |
| | EDSITVGMVRHQGKIMYVGDVRSVTQKHIQEWGPFDLVIGGSPCNDLSIVNPAR |
| | KGLYEGTGRIFFEFYRLLHDARPKEGDDRPFFWLFENVVAMGVSDKRDISRFLE |
| | SNPVMIDAKEVSAAHRARYFWGNLPGMNRPLASTVNDKLELQECLEHGRIAKFS |
| | KVRTITTRSNSIKQGKDQHFPVEMNEKEDILWCTEMERVFGFPVHYTDVSNMSR |
| | LARQRLLGRSWSVPVIRHLFAPLKEYFACV |
| (DNA (cytosine-5)- | MKGDTRHLNGEEDAGGREDSILVNGACSDQSSDSPPILEAIRTPEIRGRRSSSR |
| methyltransferase 3B) | LSKREVSSLLSYTQDLTGDGDGEDGDGSDTPVMPKLFRETRTRSESPAVRTRNN |
| (DNMT3b), isoform | NSVSSRERHRPSPRSTRGRQGRNHVDESPVEFPATRSLRRRATASAGTPWPSPP |
| 1, UniProKB | SSYLTIDLTDDTEDTHGTPQSSSTPYARLAQDSQQGGMESPQVEADSGDGDSSE |
| Accession No. | YQDGKEFGIGDLVWGKIKGFSWWPAMVVSWKATSKRQAMSGMRWVQWEGDGKFS |
| Q9UBC3-1 | EVSADKLVALGLFSQHENLATENKLVSYRKAMYHALEKARVRAGKTFPSSPGDS |
| SEQ ID NO: 285 | LEDQLKPMLEWAHGGFKPTGIEGLKPNNTQPVVNKSKVRRAGSRKLESRKYENK |
| | TRRRTADDSATSDYCPAPKRLKTNCYNNGKDRGDEDQSREQMASDVANNKSSLE |
| | DGCLSCGRKNPVSFHPLFEGGLCQTCRDRFLELFYMYDDDGYQSYCTVCCEGRE |
| | LLLCSNTSCCRCFCVECLEVLVGTGTAAEAKLQEPWSCYMCLPQRCHGVLRRRK |
| | DWNVRLQAFFTSDTGLEYEAPKLYPAIPAARRRPIRVLSLEDGIATGYLVLKEL |
| | GIKVGKYVASEVCEESIAVGTVKHEGNIKYVNDVRNITKKNIEEWGPEDLVIGG |
| | SPCNDLSNVNPARKGLYEGTGRIFFEFYHLINYSRPKEGDDRPFFWMFENVVAM |
| | KVGDKRDISRFLECNPVMIDAIKVSAAHRARYFWGNLPGMNRPVIASKNDKLEL |
| | QDCLEYNRIAKLKKVQTITTKSNSIKQGKNQLFPVVMNGKEDVLWCTELERIFG |
| | FPVHYTDVSNMGRGARQKLLGRSWSVPVIRHLFAPLKDYFACE |
| Neurogenic locus | MPPLLAPLLCLALLPALAARGPRCSQPGETCLNGGKCEAANGTEACVCGGAFVG |
| notch homolog protein | PRCQDPNPCLSTPCKNAGTCHVVDRRGVADYACSCALGFSGPLCLTPLDNACLT |
| 1 (NOTCH1), isoform | NPCRNGGTCDLLTITEYKCRCPPGWSGKSCQQADPCASNPCANGGQCLPFEASY |
| 1, UniProKB | ICHCPPSFHGPTCRQDVNECGQKPGLCRHGGTCHNEVGSYRCVCRATHTGPNCE |
| Accession No. | RPYVPCSPSPCQNGGTCRPTGDVTHECACLPGFTGQNCEENIDDCPGNNCKNGG |
| Q9UBC3-1 | ACVDGVNTYNCRCPPEWTGQYCTEDVDECQLMPNACQNGGTCHNTHGGYNCVCV |
| SEQ ID NO: 286 | NGWTGEDCSENIDDCASAACFHGATCHDRVASFYCECPHGRIGLLCHLNDACIS |
| | NPCNEGSNCDINPVNGKAICTCPSGYTGPACSQDVDECSLGANPCEHAGKCINT |
| | LGSFECQCLQGYTGPRCEIDVNECVSNPCQNDATCLDQIGEFQCICMPGYEGVH |
| | CEVNTDECASSPCLHNGRCLDKINEFQCECPTGETGHLCQYDVDECASTPCKNG |
| | AKCLDGPNTYTCVCTEGYTGTHCEVDIDECDPDPCHYGSCKDGVATFTCLCRPG |
| | YTGHHCETNINECSSQPCRHGGTCQDRDNAYLCFCLKGTTGPNCEINLDDCASS |
| | PCDSGTCLDKIDGYECACEPGYTGSMCNINIDECAGNPCHNGGTCEDGINGFTC |
| | RCPEGYHDPTCLSEVNECNSNPCVHGACRDSLNGYKCDCDPGWSGINCDINNNE |
| | CESNPCVNGGTCKDMTSGYVCTCREGESGPNCQTNINECASNPCLNQGTCIDDV |
| | AGYKCNCLLPYTGATCEVVLAPCAPSPCRNGGECRQSEDYESFSCVCPTGWQGQ |
| | TCEVDINECVLSPCRHGASCQNTHGGYRCHCQAGYSGRNCETDIDDCRPNPCHN |
| | GGSCTDGINTAFCDCLPGFRGTFCEEDINECASDPCRNGANCTDCVDSYTCTCP |
| | AGFSGIHCENNTPDCTESSCENGGTCVDGINSFTCLCPPGFTGSYCQHDVNECD |
| | SQPCLHGGTCQDGCGSYRCTCPQGYTGPNCQNLVHWCDSSPCKNGGKCWQTHTQ |
| | YRCECPSGWTGLYCDVPSVSCEVAAQRQGVDVARLCQHGGLCVDAGNTHHCRCQ |
| | AGYTGSYCEDLVDECSPSPCQNGATCTDYLGGYSCKCVAGYHGVNCSEEIDECL |
| | SHPCQNGGTCLDLPNTYKCSCPRGTQGVHCEINVDDCNPPVDPVSRSPKCENNG |
| | TCVDQVGGYSCTCPPGFVGERCEGDVNECLSNPCDARGTQNCVQRVNDEHCECR |
| | AGHTGRRCESVINGCKGKPCKNGGTCAVASNTARGFICKCPAGFEGATCENDAR |
| | TCGSLRCLNGGTCISGPRSPTCLCLGPFTGPECQFPASSPCLGGNPCYNQGTCE |
| | PTSESPFYRCLCPAKENGLLCHILDYSFGGGAGRDI |
| | PPPLIEEACELPECQEDAGNKVCSLQCNNHACGWDGGDCSLNENDPWKNCTQSL |
| | QCWKYFSDGHCDSQCNSAGCLFDGFDCQRAEGQCNPLYDQYCKDHFSDGHCDQG |
| | CNSAECEWDGLDCAEHVPERLAAGTLVVVVLMPPEQIRNSSFHFLRELSRVLHT |
| | NVVFKRDAHGQQMIFPYYGREEELRKHPIKRAAEGWAAPDALLGQVKASLLPGG |
| | SEGGRRRRELDPMDVRGSIVYLEIDNRQCVQASSQCFQSATDVAAFLGALASLG |
| | SLNIPYKIEAVQSETVEPPPPAQLHEMYVAAAAFVLLFFVGCGVLLSRKRRRQH |
| | GQLWFPEGFKVSEASKKKRREPLGEDSVGLKPLKNASDGALMDDNQNEWGDEDL |
| | ETKKERFEEPVVLPDLDDQTDHRQWTQQHLDAADLRMSAMAPTPPQGEVDADCM |
| | DVNVRGPDGFTPLMIASCSGGGLETGNSEEEEDAPAVISDFIYQGASLHNQTDR |
| | TGETALHLAARYSRSDAAKRLLEASADANIQDNMGRTPLHAAVSADAQGVEQIL |
| | IRNRATDLDARMHDGTTPLILAARLAVEGMLEDLINSHADVNAVDDLGKSALHW |
| | AAAVNNVDAAVVLLKNGANKDMQNNREETPLFLAAREGSYETAKVLLDHFANRD |
| | ITDHMDRLPRDIAQERMHHDIVRLLDEYNLVRSPQLHGAPLGGTPTLSPPLCSP |
| | NGYLGSLKPGVQGKKVRKPSSKGLACGSKEAKDLKARRKKSQDGKGCLLDSSGM |
| | LSPVDSLESPHGYLSDVASPPLLPSPFQQSPSVPLNHLPGMPDTHLGIGHLNVA |
| | AKPEMAALGGGGRLAFETGPPRLSHLPVASGTSTVLGSSSGGALNFTVGGSTSL |
| | NGQCEWLSRLQSGMVPNQYNPLRGSVAPGPLSTQAPSLQHGMVGPLASSLAASA |
| | LSQMMSYQGLPSTRLATQPHLVQTQQVQPQNLQMQQQNLQPANIQQQQSLQPPP |
| | PPQPHLGVSSAASGHLGRSFLSGEPSQADVQPLGPSSLAVHTILPQESPALPTS |
| | LPSSLVPPVTAAQFLTPPSQHSYSSPVDNTPSHQLQVPEHPELTPSPESPDQWS |
| | SSSPHSNVSDWSEGVSSPPTSMQSQIARIPEAFK |

TABLE 1
Full vector insert examples

| ID | Description |
|---|---|
| AIO1 (SEQ ID NO: 95) | All-in-one Unidirectional-reverse |
| AIO2 (SEQ ID NO: 96) | All-in-one Unidirectional-forward |
| AIO3 (SEQ ID NO: 97) | All-in-one Bidirectional |
| IPV1 (SEQ ID NO: 98) | synPA-tagBFP-MND-bGHpA-sfGFP-minCMV-5xGal4RE |
| IPV2 (SEQ ID NO: 99) | synPA-tagBFP-MND-bGHpA-EGFP-minCMV-5xGal4RE |
| IPV3 (SEQ ID NO: 100) | synPA-tagBFP-MND-bGHpA-EGFP-YB_TATA-5xGal4RE |
| IPV4 (SEQ ID NO: 101) | synPA-tagBFP-MND-bGHpA-EGFP-minIL2-5xGal4RE |
| IPV5 (SEQ ID NO: 102) | synPA-tagBFP-MND-bGHpA-EGFP-huBG-5xGal4RE |
| IPV6 (SEQ ID NO: 103) | synPA-tagBFP-MND-bGHpA-EGFP-TRE3G-5xGal4RE |
| IPV7 (SEQ ID NO: 104) | synPA-tagBFP-hPGK-bGHpA-EGFP-huBG-5xGal4RE |
| IPV8 (SEQ ID NO: 105) | 5xGal4RE-YB_TATA-EGFP-SV40pA-MND-tagBFP |
| IPV9 (SEQ ID NO: 106) | 6xHIVRE-YB_TATA-EGFP-SV40pA-MND-tagBFP |
| IPV10 (SEQ ID NO: 107) | 6xZF1RE-YB_TATA-EGFP-SV40pA-MND-tagBFP |
| IPV11 (SEQ ID NO: 108) | 6xZF2RE-YB_TATA-EGFP-SV40pA-MND-tagBFP |
| IPV12 (SEQ ID NO: 109) | 6xZF3v1RE-YB_TATA-EGFP-SV40pA-MND-tagBFP |
| IPV13 (SEQ ID NO: 110) | 6xZF3v3RE-YB_TATA-EGFP-SV40pA-MND-tagBFP |
| IPV14 (SEQ ID NO: 111) | 12xHIVRE-YB_TATA-EGFP-SV40pA-MND-tagBFP |
| IPV15 (SEQ ID NO: 112) | 12xZF3v3RE-YB_TATA-EGFP-SV40pA-MND-tagBFP |
| TFV1 (SEQ ID NO: 113) | MND-Gal4DBD-NS3a-T2a-mCherry-P2a-DNCR2-VPR |
| TFV2 (SEQ ID NO: 114) | MND-mCherry-T2a-Gal4DBD-NS3a-P2a-DNCR2-VPR |
| TFV3 (SEQ ID NO: 115) | MND-NS3a-VPR-T2a-mCherry-P2a-Gal4DBD-DNCR2 |
| TFV4 (SEQ ID NO: 116) | MND-NS3a-ZFHIV2-T2a-mCherry-P2a-DNCR2-VPRmini |
| TFV5 (SEQ ID NO: 117) | MND-NS3a-ZFHIV2-T2a-mCherry-P2a-DNCR2-VP64- |
| | RTAmini |
| TFV6 (SEQ ID NO: 118) | MND-NS3a-ZFHIV2-T2a-mCherry-P2a-DNCR2-p65mini- |
| | HSF1 |
| TFV7 (SEQ ID NO: 119) | MND-NS3a-ZFHIV2-T2a-mCherry-P2a-DNCR2-p65mini |
| TFV8 (SEQ ID NO: 120) | MND-NS3a-ZF1-T2a-mCherry-P2a-DNCR2-VPRmini |
| TFV9 (SEQ ID NO: 121) | MND-NS3a-ZF1-T2a-mCherry-P2a-DNCR2-VP64-RTAmini |
| TFV10 (SEQ ID NO: 122) | MND-NS3a-ZF1-T2a-mCherry-P2a-DNCR2-p65mini-HSF1 |
| TFV11 (SEQ ID NO: 123) | MND-NS3a-ZF1-T2a-mCherry-P2a-DNCR2-p65mini |
| TFV12 (SEQ ID NO: 124) | MND-NS3a-ZF2-T2a-mCherry-P2a-DNCR2-VPRmini |
| TFV13 (SEQ ID NO: 125) | MND-NS3a-ZF2-T2a-mCherry-P2a-DNCR2-VP64-RTAmini |
| TFV14 (SEQ ID NO: 126) | MND-NS3a-ZF2-T2a-mCherry-P2a-DNCR2-p65mini-HSF1 |
| TFV15 (SEQ ID NO: 127) | MND-NS3a-ZF3-T2a-mCherry-P2a-DNCR2-VPRmini |
| TFV16 (SEQ ID NO: 128) | MND-NS3a-ZF3-T2a-mCherry-P2a-DNCR2-VP64-RTAmini |
| TFV17 (SEQ ID NO: 129) | MND-NS3a-ZF3-T2a-mCherry-P2a-DNCR2-p65mini-HSF1 |
| TFV18 (SEQ ID NO: 130) | MND-NS3a-ZF3-T2a-mCherry-P2a-DNCR2-p65mini |
| TFV19 (SEQ ID NO: 131) | MND-NS3a-LZ-ZFHIV2-T2a-mCherry-P2a-DNCR2-VPRmini |
| TFV20 (SEQ ID NO: 132) | MND-NS3a-LZ-ZF3-T2a-mCherry-P2a-DNCR2-VPRmini |

TABLE 2
IPV and TFV vectors for testing DNA binding domains
and transcriptional activation domains.

| ID | Description |
|---|---|
| IPV8 (SEQ ID NO: 105) | 5xGal4RE-YB_TATA-EGFP-SV40pA-MND-tagBFP |
| IPV9 (SEQ ID NO: 106) | 6xHIVRE-YB_TATA-EGFP-SV40pA-MND-tagBFP |
| IPV10 (SEQ ID NO: 107) | 6xZF1RE-YB_TATA-EGFP-SV40pA-MND-tagBFP |
| IPV11 (SEQ ID NO: 108) | 6xZF2RE-YB_TATA-EGFP-SV40pA-MND-tagBFP |
| IPV12 (SEQ ID NO: 109) | 6xZF3v1RE-YB_TATA-EGFP-SV40pA-MND-tagBFP |
| IPV13 (SEQ ID NO: 110) | 6xZF3v3RE-YB_TATA-EGFP-SV40pA-MND-tagBFP |
| IPV14 (SEQ ID NO: 111) | 12xHIVRE-YB_TATA-EGFP-SV40pA-MND-tagBFP |
| IPV15 (SEQ ID NO: 112) | 12xZF3v3RE-YB_TATA-EGFP-SV40pA-MND-tagBFP |
| TFV4 (SEQ ID NO: 116) | MND-NS3a-ZFHIV2-T2a-mCherry-P2a-DNCR2-VPRmini |
| TFV5 (SEQ ID NO: 117) | MND-NS3a-ZFHIV2-T2a-mCherry-P2a-DNCR2-VP64-RTAmini |
| TFV6 (SEQ ID NO: 118) | MND-NS3a-ZFHIV2-T2a-mCherry-P2a-DNCR2-p65mini-HSF1 |
| TFV7 (SEQ ID NO: 119) | MND-NS3a-ZFHIV2-T2a-mCherry-P2a-DNCR2-p65mini |
| TFV8 (SEQ ID NO: 120) | MND-NS3a-ZF1-T2a-mCherry-P2a-DNCR2-VPRmini |
| TFV19 (SEQ ID NO: 131) | MND-NS3a-LZ-ZFHIV2-T2a-mCherry-P2a-DNCR2-VPRmini |
| TFV20 (SEQ ID NO: 132) | MND-NS3a-LZ-ZF3-T2a-mCherry-P2a-DNCR2-VPRmini |

TABLE 3
IPV and TFV vectors for optimizing the two-vector system.

| ID | Description |
|---|---|
| IPV16 (SEQ ID | 5xGal4RE-huBG-EGFP |
| NO: 144) | |
| IPV17 (SEQ ID | 5xGal4RE-huBG-EGFP-P2a-Gal4DBD-KRAB |
| NO: 145) | |
| IPV18 (SEQ ID | 5xGal4RE-huBG-EGFP-T2a-ANR-SPOP |
| NO: 146) | |
| IPV19 (SEQ ID | 5xGal4RE-huBG-EGFP-P2a-DHD37-2A-SPOP |
| NO: 147) | |
| TFV21 (SEQ ID | MND-Gal4DBD-NS3a-T2a-P2a-DNCR2-VPR |
| NO: 148) | |
| TFV22 (SEQ ID | MND-Gal4DBD-NS3a-T2a-Gal4DBD-KRAB-P2a- |
| NO: 149) | DNCR2-VPR |
| TFV23 (SEQ ID | MND-Gal4DBD-NS3a-T2a-ANR-SPOP-P2a-DNCR2- |
| NO: 150) | VPR |
| TFV24 (SEQ ID | MND-Gal4DBD-NS3a-DHD37-2B-T2a-RFP-P2a- |
| NO: 151) | DNCR2-VPR |

TABLE 4

| Disease or disorder | One or more Genes Targeted |
|---|---|
| Autoimmune: | ABCC8, ADIPOQ, ADRB3, AGPAT2, AKT2, ALMS1, ANGPTL8, APPL1, |
| | AQP2, AVP, AVPR2, BANK1, BCAR1, BLK, BSCL2, C4A, C4B, CAPN10, |
| | CAV1, CAVIN1, CCR5, CD38, CDKAL1, CEL, CELA2A, CISD2, CLEC16A, |
| | CLPS, CR2, CTLA4, DCAF17, DMXL2, DNAJC3, DNASE1, DNASE1L3, |
| | DYRK1B, EIF2AK3, ENPP1, FCGR2B, FOXP3, GCGR, GCK, GLIS3, GSK3A, |
| | GSK3B, GYS1, HNF1B, HNF4A, IER3IP1, IFIH1, IL2RA, INPPL1, INS, INSR, |
| | IRF5, IRS1, ITGAM, KCNJ11, KCNQ1, KLF11, LEP, LIPE, LTK, MAFA, |
| | MAPK8IP1, MBP, MCF2L2, MT-ND1, NEUROD1, PAX4, PDCD1, PDX1, |
| | PLAGL1, PPARG, PPP1R15B, PPP1R3A, PTF1A, PTPN22, PTPRN, PTPRN2, |
| | RASGRP1, RETN, RFX6, SH2B3, SLC16A11, SLC16A13, SLC19A2, SLC2A4, |
| | SLC30A8, SSB, STAT3, STAT4, SUMO4, TBC1D4, TCF7L2, TLR5, TNFSF4, |
| | TREX1, TRMT10A, UCP1, UCP3, WFS1, XRCC5, XRCC6, ZFP57 |
| Blood | ACSL4, ADA, AK1, ALDOA, AMMECR1, ANK1, ATP11C, BPGM, BRCA1, |
| | BRCA2, BRIP1, CD59, CDAN1, CDIN1, CPOX, CYBA, CYBB, CYBC1, EPB41, |
| | EPB42, ERCC4, F8, F9, FANCA, FANCB, FANCC, FANCD2, FANCE, FANCF, |
| | FANCG, FANCI, FANCL, G6PD, GCLC, GPI, GSR, GSS, HBA1, HBA2, HBB, |
| | KCNE5, KCNN4, KLF1, LPIN2, MAD2L2, NCF1, NCF2, NCF4, PALB2, PGK1, |
| | PIEZO1, PKLR, RAD51, RAD51C, RFWD3, RHAG, RPL11, RPL15, RPL18, |
| | RPL26, RPL27, RPL35, RPL35A, RPL5, RPS10, RPS15A, RPS17, RPS19, |
| | RPS24, RPS26, RPS27, RPS28, RPS29, RPS7, SEC23B, SLC2A1, SLC4A1, |
| | SLX4, SPTA1, SPTB, TPI1, TSR2, UBE2T, XRCC2 |
| Bone | ANO5, BMP1, CA2, CLCN7, COL1A1, COL1A2, CREB3L1, CRTAP, FKBP10, |
| | IFITM5, IKBKG, LRP5, MBTPS2, MESD, MITF, OSTM1, P3H1, P4HB, |
| | PLEKHM1, PLOD2, PPIB, SEC24D, SERPINF1, SERPINH1, SNX10, SP7, |
| | SPARC, SPG7, TCIRG1, TENT5A, TMEM38B, TNFRSF11A, TNFSF11, WNT1 |
| Neurological | AARS1, AARS2, ABCA2, ABCA7, ABHD12, ACO2, ACOX1, ACTL6B, |
| | ADAM10, ADAM22, ADPRS, ADRA2B, ADSL, AFG3L2, AGTPBP1, AIFM1, |
| | ALDH18A1, ALDH7A1, ALG13, ALS2, AMPD2, ANG, ANO10, ANXA11, |
| | AP1S1, AP2M1, AP3B2, AP4B1, AP4E1, AP4M1, AP4S1, AP5Z1, APLP1, |
| | APOA1, APOE, APP, APTX, AR, ARHGEF9, ARL6IP1, ARSA, ARSB, ARV1, |
| | ARX, ASAH1, ASCC1, ATG5, ATIC, ATL1, ATL3, ATM, ATN1, ATP13A2, |
| | ATP1A1, ATP2A2, ATP2B3, ATP6AP2, ATP6V1A, ATP7A, ATXN1, ATXN10, |
| | ATXN2, ATXN3, ATXN7, B4GALNT1, BCKDK, BEAN1, BICD2, BRAT1, |
| | BSCL2, C12orf65, C19orf12, C1orf194, C9orf72, CACNA1A, CACNA1B, |
| | CACNA1D, CACNA1E, CACNA1G, CACNA1H, CACNA2D2, CACNB4, CAD, |
| | CAPN1, CASR, CCDC88A, CCDC88C, CCT5, CDK19, CDK5, CDKL5, CERS1, |
| | CHCHD10, CHCHD2, CHD2, CHMP1A, CHMP2B, CHP1, CHRNA2, |
| | CHRNA4, CHRNB2, CILK1, CLCN2, CLN3, CLN5, CLN6, CLN8, CLP1, CLPB, |
| | CNNM2, CNPY3, CNTN2, CNTNAP1, CNTNAP2, COA7, COASY, COQ2, |
| | COQ8A, COX6A1, CPA6, CPLX1, CPT1C, CRAT, CSF1R, CSNK2B, CSTB, |
| | CTDP1, CTSD, CTSF, CUX2, CWF19L1, CYFIP2, CYP2U1, CYP7B1, DAB1, |
| | DAGLA, DALRD3, DBN1, DCAF8, DCTN1, DCX, DDHD1, DDHD2, DEAF1, |
| | DENND5A, DEPDC5, DGUOK, DHDDS, DHTKD1, DHX16, DIAPH1, DIAPH3, |
| | DLL1, DMXL2, DNAJB2, DNAJC13, DNAJC3, DNAJC6, DNM1, DNM2, |
| | DNMT1, DOCK7, DPP6, DST, DSTYK, DYNC1H1, ECHS1, EEF1A2, EEF2, |
| | EFHC1, EGR2, EIF2S3, EIF4G1, ELOVL4, ELOVL5, ELP1, ELP3, EMC1, |
| | EML1, ENTPD1, EPM2A, EPRS1, ERBB4, ERLIN1, ERLIN2, EXOSC3, |
| | EXOSC8, EXOSC9, EXT2, FA2H, FAR1, FARS2, FARSB, FAT2, FBLN5, |
| | FBXO38, FBXO7, FDXR, FGD4, FGF12, FGF14, FGGY, FIG4, FLVCR1, |
| | FOLR1, FRRS1L, FTL, FUS, GABBR2, GABRA1, GABRA2, GABRA5, GABRB1, |
| | GABRB2, GABRB3, GABRD, GABRG2, GAL, GAN, GARS1, GBA, GBA2, |
| | GBE1, GDAP1, GDAP2, GIGYF2, GJB1, GJC2, GLS, GNAO1, GNB4, GOSR2, |
| | GOT2, GRIA2, GRID2, GRIN2A, GRIN2B, GRIN2D, GRM1, GRM7, GRN, |
| | GUF1, HACE1, HARS1, HCN1, HEXA, HEXB, HINT1, HIP1, HK1, HNRNPA1, |
| | HNRNPU, HSD17B10, HSPB1, HSPB3, HSPB8, HSPD1, HTRA2, HTT, IARS2, |
| | IBA57, IER3IP1, IGHMBP2, INF2, IREB2, IRF2BPL, ITM2B, ITPA, ITPR1, |
| | KARS1, KCNA2, KCNB1, KCNC1, KCNC3, KCND2, KCND3, KCNH1, KCNJ10, |
| | KCNK4, KCNMA1, KCNQ2, KCNQ3, KCNT1, KCNT2, KCTD7, KIDINS220, |
| | KIF1A, KIF1B, KIF1C, KIF5A, KLC2, L1CAM, LAGE3, LGI1, LITAF, LMNA, |
| | LMNB2, LNPK, LRRK2, LRSAM1, MAG, MAPK10, MAPT, MARCHF6, |
| | MARS1, MARS2, MATR3, MCM3AP, MDH1, MDH2, MED25, MEF2C, |
| | MFN2, MFSD8, MME, MORC2, MPV17, MPV17, MPZ, MT-ATP6, MT- |
| | CO1, MT-CO3, MT-CYB, MTHFS, MTMR2, MT-ND1, MT-ND2, MT-ND4, |
| | MT-ND4L, MT-ND5, MT-ND6, MTOR, MTPAP, MYH14, NACC1, NAGA, |
| | NAGLU, NALCN, NAXD, NAXE, NDRG1, NECAP1, NEFH, NEFL, NEK1, |
| | NEUROD2, NGF, NHLRC1, NHLRC2, NIPA1, NKX6-2, NOP56, |
| | NOTCH2NLC, NPRL2, NPRL3, NRROS, NT5C2, NTRK2, NUP107, NUP133, |
| | OPA1, OPTN, OSGEP, OTOF, OTUD6B, OXR1, P4HTM, PACS2, PAK1, |
| | PANK2, PARK7, PARS2, PCDH12, PCDH19, PCLO, PCNA, PCYT2, PDK3, |
| | PDXK, PDYN, PFN1, PHACTR1, PHF21A, PHF6, PIGA, PIGB, PIGH, PIGK, |
| | PIGN, PIGP, PIGQ, PIGS, PIGT, PIGU, PIK3R5, PINK1, PLA2G6, PLCB1, |
| | PLD3, PLEKHG5, PLP1, PLPBP, PMP2, PMP22, PMPCA, PMPCB, PNKP, |
| | PNPLA6, PNPO, POLG, PPP2R2B, PPP3CA, PPP5C, PPT1, PRDM12, |
| | PRDM12, PRDM8, PRICKLE1, PRICKLE2, PRICKLE3, PRKCG, PRKN, PRPH, |
| | PRPS1, PRRT2, PRUNE1, PRX, PSAP, PSEN1, PSEN2, PTPN23, PUM1, |
| | QARS1, RAB10, RAB7A, RAPGEF2, RARS2, REEP1, REEP2, RELN, REPS1, |
| | RETREG1, RFC1, RHOBTB2, RNF13, ROGDI, RORA, RORB, RPIA, RRM2B, |
| | RTN2, RUBCN, SACS, SAMD12, SARS1, SBF1, SBF2, SBF2, SCARB2, |
| | SCN11A, SCN1A, SCN1B, SCN2A, SCN3A, SCN8A, SCN9A, SCYL1, |
| | SELENOI, SEMA6B, SEPSECS, SERPINI1, SETD1A, SETX, SH3TC2, |
| | SIGMAR1, SIK1, SIRT2, SLC12A1, SLC12A5, SLC12A6, SLC13A5, SLC1A2, |
| | SLC1A4, SLC25A19, SLC25A22, SLC25A46, SLC2A1, SLC30A10, SLC33A1, |
| | SLC35A2, SLC35A3, SLC39A14, SLC44A1, SLC45A1, SLC5A6, SLC5A7, |
| | SLC6A1, SLC6A3, SLC9A1, SLC9A6, SMC1A, SMN1, SMN2, SMPD1, |
| | SNAP29, SNCA, SNCAIP, SNIP1, SNX14, SOD1, SORD, SORL1, SPART, |
| | SPAST, SPATA5, SPG11, SPG21, SPG7, SPTAN1, SPTBN2, SPTBN4, |
| | SPTLC1, SPTLC2, SQSTM1, SRPX2, ST3GAL3, ST3GAL5, STUB1, STX1B, |
| | STXBP1, SUMF1, SUOX, SURF1, SYN1, SYNE1, SYNJ1, SYT14, SZT2, |
| | TANGO2, TARDBP, TBC1D24, TBCD, TBCE, TBK1, TBP, TCF4, TDP1, TDP2, |
| | TECPR2, TFG, TGM6, THG1L, TIMM50, TMEM106B, TMEM175, |
| | TMEM230, TMEM240, TMX2, TNRC6A, TOE1, TP53RK, TPP1, TPRKB, |
| | TRAK1, TRAPPC2L, TRAPPC6B, TREM2, TREX1, TRIM2, TRIP4, TRPC3, |
| | TRPM7, TRPV4, TSC1, TSC2, TSEN2, TSEN34, TSEN54, TTBK2, TTR, |
| | TUBA4A, TUBGCP2, TWNK, TXN2, TYMP, UBA1, UBA5, UBAP1, UBQLN2, |
| | UBQLN4, UBTF, UCHL1, UGDH, UGP2, UNC5C, UNC80, VAC14, VAMP1, |
| | VAPB, VARS1, VCP, VPS13A, VPS13C, VPS13D, VPS35, VPS37A, VPS53, |
| | VRK1, VWA3B, WARS1, WASF1, WASHC5, WDR4, WDR45, WDR45B, |
| | WDR73, WNK1, WWOX, XRCC1, YARS1, YEATS2, YWHAG, ZEB2, |
| | ZFYVE26, ZFYVE27, ZNHIT3 |
| Cardiovascular | AARS2, ABCC9, ACADVL, ACTC1, ACTN2, AGK, ALPK3, BAG3, BRAF, |
| | CALR3, CAV3, CDH2, CRYAB, CSRP3, CTNNA3, DES, DMD, DNAJC19, |
| | DSC2, DSG2, DSP, DTNA, EMD, EYA4, FKRP, FKTN, FLNC, GATA4, |
| | GATAD1, GJA5, GRM7, GTPBP3, JPH2, JUP, KRAS, LAMA4, LDB3, LMNA, |
| | MAP2K1, MAP2K2, MIB1, MT-ATP6, MT-ATP8, MT-CYB, MTO1, MYBPC3, |
| | MYH6, MYH7, MYL2, MYL3, MYLK2, MYO6, MYOZ2, MYPN, NDUFB11, |
| | NEXN, NPPA, OPA1, PKP2, PLN, PPCS, PRDM16, PRKAG2, PSEN1, PSEN2, |
| | RAF1, RBM20, RYR2, SCN5A, SCO2, SDHA, SGCD, SLC25A4, TAZ, TBX20, |
| | TBX5, TCAP, TGFB3, TMEM43, TMPO, TNNC1, TNNI3, TNNI3K, TNNT2, |
| | TPM1, TSFM, TTN, VCL, ZFPM2 |
| Metabolic | AGL, ALDOA, ARSB, BCKDHA, BCKDHB, DBT, ENO3, EPM2A, ETFA, ETFB, |
| | ETFDH, G6PC, GAA, GALNS, GBA, GBE1, GCDH, GCH1, GLB1, GNS, GUSB, |
| | GYG1, GYS2, HGSNAT, HYAL1, IDS, IDUA, LAMP2, LDHA, NAGLU, PAH, |
| | PFKM, PGAM2, PGM1, PHKA1, PHKA2, PHKB, PHKG2, PRKAG2, PSAP, |
| | PTS, PYGL, PYGM, QDPR, SGSH, SUGCT, SUMF1, VPS33A |
| | AAGAB, ANAPC1, AQP5, BMS1, BRAF, CAST, CD151, CDH1, CDH3, |
| | COL11A1, COL17A1, COL7A1, CST6, CTNND1, CTSC, CYP26C1, DDB2, |
| | DPH1, DSG1, DSP, DST, EDA, EDAR, EDARADD, ERCC6, ERCC2, ERCC3, |
| | ERCC4, ERCC5, EVC, EVC2, EXPH5, FGF10, FGFR2, FGFR3, GJA1, GJB2, |
| | GJB3, GJB4, GJB6, GRHL2, HOXC13, IFT122, IFT43, IKBKG, ITGA3, ITGA6, |
| | ITGB4, JUP, KANK2, KDF1, KDSR, KLHL24, KRAS, KREMEN1, KRT1, KRT14, |
| | KRT16, KRT17, KRT5, KRT6A, KRT6B, KRT6C, KRT74, KRT83, KRT85, KRT9, |
| | LAMA3, LAMB3, LAMC2, LORICRIN, MAP2K1, MAP2K2, MBTPS2, MSX1, |
| | NECTIN1, NECTIN4, NFKBIA, NLRP1, PKP1, PLEC, POLH, POMP, PRKD1, |
| | RHBDF2, RHOA, RIPK4, RSPO1, SASH1, SERPINB7, SLURP1, SMARCAD1, |
| | SNAP29, TAT, TP63, TRPM4, TRPV3, TSPEAR, TWIST2, WDR19, WDR35, |
| | WNT10A, XPA, XPC |
| Mitochondrial | AARS2, ACAD9, AGK, AIFM1, ATP5F1A, ATP5F1D, ATP5F1E, ATP5MD, |
| | ATPAF2, BCS1L, BOLA3, C12orf65, C1QBP, CARS2, COA3, COA5, COA6, |
| | COA8, COQ2, COQ4, COQ6, COQ7, COQ8A, COQ9, COX10, COX14, |
| | COX15, COX20, COX411, COX5A, COX6A2, COX6B1, COX8A, CYC1, |
| | DGUOK, DNA2, EARS2, ELAC2, FARS2, FASTKD2, FBXL4, FDX2, FLAD1, |
| | FOXRED1, GATB, GATC, GFER, GFM1, GFM2, GTPBP3, IBA57, ISCA2, |
| | LRPPRC, LYRM4, LYRM7, MARS2, MGME1, MICOS13, MIPEP, MPV17, |
| | MRM2, MRPL12, MRPL3, MRPL44, MRPS14, MRPS16, MRPS2, MRPS22, |
| | MRPS23, MRPS28, MRPS34, MRPS7, MT-ATP6, MT-ATP8, MT-CO1, MT- |
| | CO2, MT-CO3, MT-CYB, MTFMT, MT-ND1, MT-ND2, MT-ND3, MT-ND4, |
| | MT-ND4L, MT-ND5, MT-ND6, MTO1, NARS2, NDUFA1, NDUFA10, |
| | NDUFA11, NDUFA12, NDUFA13, NDUFA2, NDUFA4, NDUFA6, NDUFA9, |
| | NDUFAF1, NDUFAF2, NDUFAF3, NDUFAF4, NDUFAF5, NDUFAF6, |
| | NDUFAF8, NDUFB11, NDUFB3, NDUFB8, NDUFB9, NDUFS1, NDUFS2, |
| | NDUFS3, NDUFS4, NDUFS6, NDUFS7, NDUFS8, NDUFV1, NDUFV2, NFU1, |
| | NSUN3, NUBPL, OPA1, PDHA1, PDSS1, PDSS2, PET100, PET117, PINK1, |
| | PNPLA4, PNPT1, POLG, POLG2, PRICKLE3, PUS1, QRSL1, RMND1, |
| | RNASEH1, RRM2B, SCO1, SCO2, SDHA, SDHAF1, SDHD, SFXN4, |
| | SLC25A10, SLC25A21, SLC25A26, SLC25A4, SUCLA2, SUCLG1, SURF1, |
| | TACO1, TARS2, TFAM, TIMM22, TIMMDC1, TK2, TMEM126B, TMEM70, |
| | TOP3A, TRIT1, TRMT10C, TRMT5, TSFM, TTC19, TUFM, TWNK, TXN2, |
| | TYMP, UQCC2, UQCC3, UQCRB, UQCRC2, UQCRFS1, UQCRQ, VARS2, |
| | WARS2, YARS2 |
| Muscle | ANO5, B3GALNT2, B4GAT1, BVES, CAPN3, CAV3, CHKB, COL12A1, |
| | COL6A1, COL6A2, COL6A3, CRPPA, DAG1, DES, DNAJB6, DPM1, DPM2, |
| | DPM3, DYSF, EMD, FHL1, FKRP, FKTN, GIPC1, GMPPB, HNRNPDL, |
| | INPP5K, ITGA7, LAMA2, LARGE1, LIMS2, LMNA, MYOT, PLEC, POGLUT1, |
| | POMGNT1, POMGNT2, POMK, POMT1, POMT2, POPDC3, PYROXD1, |
| | RXYLT1, SGCA, SGCB, SGCD, SGCG, SYNE1, SYNE2, TCAP, TMEM43, |
| | TNPO3, TOR1AIP1, TRAPPC11, TRIM32, TRIP4, TTN |
| Liver | ABCB11, ABCB4, AKR1D1, AMACR, ATP8B1, CYP7B1, HSD3B7, NR1H4, |
| | SLC25A13, TJP2 |
| Hearing | ABCC1, ABHD12, ABHD5, ACOX1, ACSL4, ACTB, ACTG1, ADAMTS17, |
| | ADCY1, ADGRV1, AIFM1, ALMS1, AMMECR1, ANKH, AP000812.4, |
| | AP1B1, AP1S1, ARSG, ATP1A3, ATP6V1B1, ATP6V1B2, BCAP31, BCS1L, |
| | BDP1, BRAF, BSND, CABP2, CACNA1D, CCDC50, CD151, CD164, CDC14A, |
| | CDH11, CDH23, CEACAM16, CEP250, CEP78, CIB2, CISD2, CLCNKA, |
| | CLCNKB, CLDN14, CLIC5, CLPP, CLRN1, COCH, COL11A1, COL11A2, |
| | COL2A1, COL4A3, COL4A4, COL4A5, COL4A6, COL9A1, COL9A2, COQ6, |
| | CRYM, DCAF17, DCDC2, DCHS1, DIABLO, DIAPH1, DIAPH3, DLX5, |
| | DMXL2, DNAJC3, DNMT1, DSPP, EDN3, EDNRB, ELMOD3, EPS8, EPS8L2, |
| | ERAL1, ERCC2, ERCC3, ERCC5, ERCC6, ERCC8, ESPN, ESRP1, ESRRB, |
| | EXOSC2, EYA1, EYA4, FAT4, FDXR, FGF9, FGFR3, FITM2, FKBP14, FLNA, |
| | FOXC1, GAB1, GATA3, GFER, GIPC3, GJB2, GJB3, GJB6, GPC4, GPRASP2, |
| | GPSM2, GRAP, GRHL2, GRXCR1, GRXCR2, GSDME, HARS1, HARS2, HGF, |
| | HOMER2, HSD17B4, IARS2, IGF1, ILDR1, ITM2B, JAG1, KARS1, KCNE1, |
| | KCNE5, KCNH2, KCNJ10, KCNQ1, KCNQ4, KITLG, KRAS, LARS2, LHFPL5, |
| | LMX1A, LONP1, LOXHD1, LOXL3, MAF, MARS2, MARVELD2, MCM2, |
| | MET, MGP, MITF, MPZ, MPZL2, MSRB3, MT-CO1, MT-CYB, MYH14, |
| | MYH9, MYO15A, MYO1F, MYO3A, MYO6, MYO7A, NARS2, NDP, NF2, |
| | NLRP3, NOG, OPA1, OSBPL2, OTOA, OTOF, OTOG, OTOGL, P2RX2, PAX1, |
| | PAX3, PCDH15, PCNA, PDE1C, PDZD7, PEX1, PEX6, PEX7, PHYH, PIGL, |
| | PISD, PJVK, PLS1, PMP22, PNPT1, POU4F3, PPIP5K2, PPP2R3C, PRPS1, |
| | PTPN11, RAB40AL, RAF1, RDX, REST, RIPOR2, ROR1, RPGR, RPS23, |
| | S1PR2, SALL1, SERAC1, SERPINB6, SIX1, SIX5, SLC17A8, SLC19A2, |
| | SLC26A4, SLC26A5, SLC33A1, SLC44A4, SLC4A11, SLC52A2, SLC52A3, |
| | SLC9A1, SLITRK6, SMPX, SNAI2, SOX10, SPATA5, SPNS2, SPTBN4, STRC, |
| | SYNE4, TBC1D24, TBL1X, TBL1Y, TBX22, TECTA, THRB, TIMM8A, TMC1, |
| | TMEM132E, TMEM67, TMIE, TMPRSS3, TNC, TNFRSF11A, TPRN, |
| | TRAPPC12, TRIOBP, TRMU, TRRAP, TSPEAR, TUBB4B, TWNK, TXNL4A, |
| | TYR, USH1C, USH1G, USH2A, WBP2, WFS1, WHRN |
| Opthalmic | ARMS2, ABCA4, ABCA4, ABHD12, ABHD5, ADGRV1, AGBL1, AGBL5, AGK, |
| | AGPS, AHR, AIPL1, ARHGEF18, ARL6, ARSG, ASB10, BBS2, BEST1, BFSP1, |
| | BFSP2, C2, C3, C8orf37, C9, CA4, CACNA1F, CDH23, CEP290, CERKL, CFB, |
| | CFH, CFI, CHMP4B, CHST6, CIB2, CLCC1, CLPB, CLRN1, CNGA1, CNGA3, |
| | CNGB1, CNGB3, COL11A1, COL18A1, COL2A1, COL8A2, CRB1, CRB2, |
| | CRX, CRYAA, CRYAA2, CRYAB, CRYBA1, CRYBA2, CRYBA4, CRYBB1, |
| | CRYBB2, CRYBB3, CRYGB, CRYGC, CRYGD, CRYGS, CST3, CTDP1, CWC27, |
| | CX3CR1, CYP1B1, CYP27A1, CYP4V2, DCN, DHDDS, DHX38, DMPK, |
| | DNMBP, EBP, ELOVL4, EPG5, EPHA2, ERCC1, ERCC2, ERCC6, ESPN, |
| | EXOSC2, EYS, FAM126A, FAM161A, FAR1, FBLN5, FLVCR1, FOXE3, |
| | FSCN2, FTL, FYCO1, GALK1, GALT, GCNT2, GDF6, GFER, GJA1, GJA3, |
| | GJA8, GLS, GNAT1, GNB3, GNPAT, GPATCH3, GRHL2, GRK1, GRM6, GSN, |
| | GUCA1B, GUCY2D, HARS1, HGSNAT, HK1, HMCN1, HMX1, HSF4, HTRA1, |
| | IARS2, IDH3B, IFT140, IFT172, IFT43, IMPDH1, IMPG2, INPP5K, IQCB1, |
| | KCNA4, KCNJ13, KIAA1549, KIF3B, KIZ, KLHL7, KRT12, KRT3, LCA5, LCAT, |
| | LEMD2, LIM2, LONP1, LOXL1, LRAT, LRIT3, LSS, LTBP2, MAF, MAK, |
| | MBNL1, MERTK, MFRP, MIP, MSMO1, MT-ATP6, MT-CO1, MT-CO3, MT- |
| | CYB, MT-ND1, MT-ND2, MT-ND4, MT-ND4L, MT-ND5, MT-ND6, MVK, |
| | MYH9, MYO7A, MYOC, NEK2, NHS, NMNAT1, NPHP1, NPHP4, NR2E3, |
| | NRL, NTF4, NUP188, NYX, OCRL, OFD1, OPA3, OPTN, OVOL2, PCARE, |
| | PCDH15, PDE6A, PDE6B, PDE6G, PDZD7, PEX7, PHYH, PIK3C2A, PIKFYVE, |
| | PISD, PITX3, PNPLA6, POMGNT1, PRCD, PRICKLE3, PROM1, PRPF3, |
| | PRPF31, PRPF4, PRPF6, PRPF8, PRPH2, PRPS1, RAB3GAP2, RAX2, RBP3, |
| | RD3, RDH11, RDH12, RECQL4, REEP6, RGR, RHO, ROM1, RP1, RP1L1, |
| | RP2, RP9, RPE65, RPGR, RPGRIP1, SAG, SCAPER, SDCCAG8, SEMA4A, |
| | SIPA1L3, SIX6, SLC16A12, SLC24A1, SLC2A1, SLC33A1, SLC4A11, SLC4A4, |
| | SLC7A14, SNRNP200, SPATA7, SRD5A3, TACSTD2, TBK1, TCF4, TDRD7, |
| | TEK, TGFBI, TKFC, TLR4, TMCO1, TMEM67, TOPORS, TRAF3IP1, TRNT1, |
| | TRPM1, TTC8, TUBB4B, TULP1, UBIAD1, UNC45B, USH1C, USH1G, |
| | USH2A, USP45, VCAN, VIM, VSX1, VSX2, WDR19, WDR36, WFS1, WHRN, |
| | ZEB1, ZNF408, ZNF513 |
| Cancer | A2M, AARS2, ABCB1, ABCC1, ABCC2, ABCC3, ABCC5, ABCC6, ABCG2, |
| | ABI1, ABL1, ABL2, ACAP1, ACKR3, ACLY, ACO1, ACP3, ACSL3, ACVR1, |
| | ACVR1B, ACVR2A, ACVR2B, ADAM10, ADAM9, ADAMTS1, ADAMTS14, |
| | ADAMTS18, ADAMTS20, ADAMTS3, ADAMTS4, ADAMTS5, ADAMTS6, |
| | ADAMTS8, ADAMTS9, ADCY1, ADGRB1, ADM, ADNP, ADORA2A, |
| | ADRA1B, AFDN, AFF1, AFF3, AFF4, AFP, AGER, AHNAK2, AHR, AHSG, |
| | AJUBA, AK9, AKAP12, AKAP9, AKR1B1, AKT1, AKT2, AKT3, ALB, ALCAM, |
| | ALDOA, ALDOB, ALDOC, ALK, ALKBH6, ALPK2, ALPL, ALPP, AMER1, |
| | AMPH, ANAPC1, ANG, ANGPT1, ANGPT2, ANK3, ANKRD12, ANXA1, |
| | ANXA11, ANXA2, ANXA4, ANXA7, AOC3, AP2B1, APAF1, APC, APEX1, |
| | APOA1, APOA2, APOBEC3B, APOC1, APOC3, APOD, APOE, APOL2, |
| | APPBP2, AR, AREG, ARG2, ARHGAP26, ARHGAP32, ARHGAP35, |
| | ARHGEF12, ARHGEF6, ARID1A, ARID1B, ARID2, ARID5B, ARNT, ASPH, |
| | ASPM, ASPSCR1, ASXL1, ASXL2, ATF1, ATG13, ATIC, ATM, ATOH1, |
| | ATP1A1, ATP2B3, ATP7B, ATR, ATRX, AURKA, AURKB, AXIN1, AXIN2, |
| | AZGP1, B2M, BAD, BAG1, BAP1, BARD1, BAX, BCL10, BCL11A, BCL11B, |
| | BCL2, BCL2A1, BCL2L1, BCL2L2, BCL2L2-PABPN1, BCL3, BCL6, BCL7A, |
| | BCL9, BCL9L, BCLAF1, BCOR, BCORL1, BCR, BDNF, BHMT2, BIRC2, BIRC3, |
| | BIRC5, BIRC6, BIVM-ERCC5, BLK, BLM, BLMH, BMI1, BMP2, BMP4, |
| | BMPR1A, BNIP3, BNIP3L, BRAF, BRCA1, BRCA2, BRD3, BRD4, BRIP1, |
| | BRMS1, BTG1, BTG2, BTK, BUB1B, C1QBP, C3orf70, C6, C7, CA8, |
| | CACNA1D, CAD, CALCA, CALR, CAMTA1, CANT1, CANX, CAP2, CAPN6, |
| | CARD11, CARM1, CARS1, CASC3, CASP1, CASP10, CASP2, CASP3, CASP4, |
| | CASP5, CASP6, CASP7, CASP8, CASP9, CAST, CAT, CAV1, CBFA2T3, CBFB, |
| | CBL, CBLB, CBLC, CCAR1, CCDC120, CCDC6, CCKBR, CCL11, CCL13, |
| | CCL14, CCL16, CCL18, CCL19, CCL2, CCL21, CCL23, CCL3, CCL4, CCL5, |
| | CCL7, CCL8, CCN2, CCN4, CCNA1, CCNA2, CCNB1, CCNB1IP1, CCNB2, |
| | CCND1, CCND2, CCND3, CCNE1, CCNE2, CCNG1, CCNG2, CCNH, CCR10, |
| | CCR7, CD14, CD1D, CD24, CD27, CD274, CD36, CD38, CD40, CD40LG, |
| | CD44, CD46, CD52, CD59, CD70, CD74, CD79A, CD79B, CD82, CD9, |
| | CDC16, CDC20, CDC25A, CDC25B, CDC25C, CDC27, CDC34, CDC37, |
| | CDC6, CDC73, CDH1, CDH11, CDH17, CDH5, CDK1, CDK12, CDK2, CDK4, |
| | CDK6, CDK7, CDKN1A, CDKN1B, CDKN1C, CDKN2A, CDKN2C, CDX2, |
| | CEACAM5, CEACAM6, CEBPA, CENPF, CEP43, CEP76, CFH, CFHR1, |
| | CFLAR, CFTR, CGA, CHCHD7, CHD4, CHD7, CHD8, CHEK1, CHEK2, CHFR, |
| | CHGA, CHI3L1, CHP2, CIB2, CIC, CIITA, CKB, CKS1B, CKS2, CLDN3, CLDN4, |
| | CLDN7, CLEC3B, CLIC1, CLIP1, CLSTN1, CLTC, CLTCL1, CLU, CNBD1, |
| | CNBP, CNKSR1, CNN1, CNOT3, CNTF, CNTRL, COL11A1, COL17A1, |
| | COL18A1, COL1A1, COL1A2, COL2A1, COL4A2, COL4A3, COL4A4, |
| | COL4A5, COL5A1, COL5A3, COL6A1, COX17, CP, CRABP1, CRADD, |
| | CREB1, CREB3L1, CREB3L2, CREBBP, CRLF2, CRP, CRTC1, CRTC3, CRYAB, |
| | CSDE1, CSE1L, CSF1, CSF1R, CSF2, CSF2RA, CSF3, CSF3R, CSN1S1, |
| | CSNK1E, CSNK2A2, CSNK2B, CST3, CST6, CSTA, CSTB, CTAG1A, CTAG1B, |
| | CTAG2, CTCF, CTNNB1, CTNNBL1, CTNND1, CTSB, CTSD, CTSH, CTSL, |
| | CTTN, CUL1, CUL2, CUL4B, CUL5, CUX1, CXCL1, CXCL10, CXCL13, CXCL2, |
| | CXCL5, CXCL8, CXCL9, CXCR1, CXCR2, CXCR4, CYB5R3, CYLD, CYP19A1, |
| | CYP1A2, CYP2C19, CYP2E1, CYP3A4, CYP3A5, DAD1, DAPK1, DAXX, DBI, |
| | DCC, DCN, DCTN1, DDB2, DDIT3, DDR2, DDX10, DDX3X, DDX5, DDX6, |
| | DEFA1, DEFA1B, DEFA3, DEK, DES, DHFR, DHX9, DIAPH1, DIAPH3, |
| | DICER1, DIS3, DLC1, DMD, DNAH12, DNAJB1, DNAJC2, DNER, DNM2, |
| | DNMT3A, DOCK2, DROSHA, DST, DUSP1, DUSP14, DUSP4, DVL3, |
| | DYNLL1, DYRK2, E2F1, E2F3, E2F5, EBAG9, EBF1, EDN1, EEF1A1, EEF2, |
| | EFNA1, EFNA2, EFNA5, EFNB1, EFNB2, EFNB3, EGF, EGFR, EGR1, EI24, |
| | EIF2S2, EIF3E, EIF3H, EIF4A2, EIF4E, EIF4EBP1, EIF4G1, EIF4H, EIF5A, |
| | ELANE, ELF3, ELF4, ELK3, ELK4, ELL, EML4, ENC1, ENG, ENO1, ENO2, |
| | ENPP2, EP300, EPAS1, EPCAM, EPHA1, EPHA2, EPHA3, EPHA4, EPHA7, |
| | EPHA8, EPHB2, EPHB3, EPHB4, EPHX1, EPO, EPOR, EPS15, ERBB2, |
| | ERBB3, ERBB4, ERC1, ERCC1, ERCC2, ERCC3, ERCC4, ERCC5, ERCC6, ERG, |
| | ESR1, ESR2, ETNK1, ETV1, ETV4, ETV5, ETV6, EWSR1, EXT1, EXT2, EZH1, |
| | EZH2, EZR, F13A1, F13B, F2, F3, FABP1, FABP2, FABP4, FABP5, FADD, |
| | FAF1, FAM166A, FANCA, FANCC, FANCD2, FANCE, FANCF, FANCG, FAP, |
| | FAS, FASLG, FASN, FAT1, FAT4, FBN2, FBXO11, FBXO6, FBXW7, FCER2, |
| | FCGR2B, FCRL4, FEN1, FES, FEV, FGA, FGB, FGF1, FGF17, FGF18, FGF19, |
| | FGF2, FGF23, FGF3, FGF4, FGF6, FGF7, FGF8, FGF9, FGFBP1, FGFR1, |
| | FGFR2, FGFR3, FGFR4, FGG, FH, FHIT, FIP1L1, FKBP5, FKBP8, FLCN, FLG, |
| | FLI1, FLT1, FLT3, FLT4, FMO5, FN1, FOLH1, FOS, FOSL1, FOXA1, FOXA2, |
| | FOXJ1, FOXL2, FOXM1, FOXO1, FOXO3, FOXO4, FOXP1, FOXQ1, FRMD7, |
| | FSCN1, FSHB, FST, FSTL3, FTH1, FTL, FUBP1, FUS, FZD1, FZD2, G6PD, |
| | GADD45A, GADD45G, GAS1, GAS7, GAST, GATA1, GATA2, GATA3, |
| | GCLM, GDF15, GDNF, GH1, GH2, GJA1, GJB5, GLO1, GMNN, GNA11, |
| | GNA13, GNAI1, GNAQ, GNAS, GNB1, GNPTAB, GOLGA5, GOPC, GOT1, |
| | GOT2, GPA33, GPC3, GPHN, GPI, GPS2, GPX1, GPX2, GRB10, GRB2, |
| | GRB7, GRIN2A, GSK3A, GSN, GSR, GSTM1, GSTM3, GSTP1, GTF2H1, |
| | GUSB, H2AC6, H3-3A, H3-3B, H3C2, H4C9, HDAC10, HDAC2, HDAC5, |
| | HERPUD1, HEY1, HGF, HGFAC, HIF1A, HIP1, HIP1R, HK1, HK2, HLA-A, |
| | HLA-B, HLA-G, HLF, HMGA1, HMGA2, HMGXB4, HMOX1, HNF1A, |
| | HNRNPA2B1, HOOK3, HOXA11, HOXA13, HOXA5, HOXA9, HOXC11, |
| | HOXC13, HOXD11, HOXD13, HP, HPGD, HPN, HRAS, HSF1, HSP90AA1, |
| | HSP90AB1, HSP90B1, HSPA1L, HSPA2, HSPA4, HSPA8, HSPB1, HSPD1, |
| | HSPE1, HSPH1, HUWE1, IBSP, ICAM1, ID1, ID2, ID3, IDH1, IDH2, IDO1, |
| | IFNA1, IFNA13, IFNAR1, IFNAR2, IFNB1, IFNG, IGF1R, IGF2, IGF2R, |
| | IGFBP2, IGFBP3, IKBKB, IKZF1, IL10, IL11, IL12A, IL13, IL13RA2, IL15, |
| | IL16, IL17A, IL17B, IL18, IL1A, IL1B, IL1R1, IL1R2, IL1RN, IL2, IL21R, IL24, |
| | IL2RA, IL2RB, IL2RG, IL4, IL4R, IL5, IL6, IL6R, IL6ST, IL7, IL7R, IL9, ILF3, |
| | ILK, ING1, INHBA, INHBB, INPPL1, INS, INTS12, IPO7, IRF1, IRF4, IRF6, |
| | IRS2, IRS4, ITGA1, ITGA2, ITGA2B, ITGA3, ITGA4, ITGA5, ITGA6, ITGAM, |
| | ITGAV, ITGB1, ITGB3, ITGB4, ITGB5, ITGB6, ITGB7, ITGB8, ITIH4, ITK, |
| | ITPKB, JAK1, JAK2, JAK3, JKAMP, JTB, JUN, JUND, JUP, KALRN, KAT2B, |
| | KAT6A, KAT6B, KCNJ5, KDM5A, KDM5C, KDM6A, KDR, KDSR, KEAP1, |
| | KEL, KIAA1109, KIF2A, KIF2C, KIF5B, KIFC3, KISS1, KIT, KITLG, KLF4, KLF5, |
| | KLF6, KLHL8, KLK10, KLK11, KLK13, KLK14, KLK15, KLK2, KLK3, KLK4, |
| | KLK5, KLK6, KLK7, KLK8, KLK9, KLRK1, KMT2A, KMT2B, KMT2C, KMT2D, |
| | KNL1, KRAS, KRT13, KRT14, KRT15, KRT17, KRT18, KRT19, KRT4, KRT8, |
| | KTN1, LALBA, LAMB1, LAMC1, LASP1, LATS1, LATS2, LCK, LCN1, LCP1, |
| | LCTL, LDHA, LEF1, LEP, LEPR, LGALS3, LGALS3BP, LGALS4, LGI1, LGMN, |
| | LHB, LHX1, LIF, LIFR, LIG4, LIMK1, LMNA, LMO1, LMO2, LPP, LRIG3, |
| | LRP1B, LRP6, LRRK2, LTA, LTA4H, LTB, LTBR, LTF, LUM, LYL1, LYN, LZTR1, |
| | MAD2L1, MAD2L2, MAF, MAFB, MAGEA3, MAGEA4, MAGEA6, |
| | MAGEB5, MAGEB6, MAGEC1, MAGEC2, MAGEC3, MAGED1, MAGED2, |
| | MAGI1, MALT1, MAML2, MAP2K1, MAP2K2, MAP2K4, MAP3K1, |
| | MAP3K13, MAP3K3, MAP3K4, MAP4K3, MAPK1, MAPK14, MAPK3, |
| | MAPK7, MAPK8, MAPK8IP1, MAPKAPK2, MAST2, MATK, MAX, MBD1, |
| | MBD2, MBD4, MCL1, MCM2, MCM3, MCM5, MCM7, MDC1, MDH1, |
| | MDK, MDM2, MDM4, MECOM, MECP2, MED1, MED12, MED13, |
| | MED17, MED23, MEF2A, MEN1, MET, METTL14, MFGE8, MGA, MGMT, |
| | MIA, MIF, MITF, MKI67, MLF1, MLH1, MLH3, MLLT1, MLLT10, MLLT11, |
| | MLLT3, MLLT6, MME, MMP1, MMP10, MMP11, MMP12, MMP13, |
| | MMP14, MMP15, MMP16, MMP2, MMP3, MMP7, MMP8, MMP9, |
| | MN1, MORC4, MPL, MPO, MRE11, MRTFA, MSH2, MSH6, MSI2, MSLN, |
| | MSMB, MSN, MSR1, MST1, MT1A, MT1G, MTA1, MTCP1, MTOR, MUC1, |
| | MUC17, MUTYH, MVP, MXI1, MXRA5, MYB, MYBL2, MYC, MYCL, MYCN, |
| | MYD88, MYH11, MYH9, MYO5A, MYOCD, MYOD1, MYOG, NAB2, NAGA, |
| | NAIP, NAMPT, NAT2, NAV3, NBN, NBPF1, NBPF10, NCAM1, NCOA1, |
| | NCOA2, NCOA3, NCOA4, NCOR1, NCOR2, NDRG1, NEB, NEDD4L, |
| | NEDD8, NEO1, NF1, NF2, NFATC2, NFE2L2, NFIB, NFKB1, NFKB2, |
| | NFKBIA, NFKBIE, NGF, NGFR, NIBAN1, NIN, NKX2-1, NKX3-1, NLRP3, |
| | NME1, NME2, NONO, NOS1, NOS2, NOS3, NOTCH1, NOTCH2, NOTCH3, |
| | NPM1, NQO1, NROB1, NR1H2, NR4A2, NR4A3, NRAS, NRG1, NRG2, |
| | NRG3, NRP1, NRP2, NSD1, NSD2, NSD3, NT5C2, NTF3, NTF4, NTHL1, |
| | NTN1, NTN4, NTRK1, NTRK2, NTRK3, NUCB2, NUDT1, NUMA1, NUMB, |
| | NUP210L, NUP214, NUP93, NUP98, NUTM1, NUTM2B, NUTM2D, |
| | ODAM, OGG1, OLIG2, OMA1, OR4A16, OR51E2, OR52N1, ORM1, OSM, |
| | OTUD7A, P2RY8, PABPC1, PAFAH1B2, PAGE4, PALB2, PAPPA, PARP1, |
| | PARVB, PATZ1, PAX3, PAX5, PAX7, PAX8, PBRM1, PBX1, PCBP1, PCM1, |
| | PCNA, PDAP1, PDCD1LG2, PDCD2L, PDE4DIP, PDGFA, PDGFB, PDGFRA, |
| | PDGFRB, PDSS2, PDZD4, PECAM1, PER1, PF4, PGC, PGF, PGR, PHF20, |
| | PHF6, PHLDA1, PHOX2B, PICALM, PIGR, PIK3CA, PIK3CB, PIK3CG, |
| | PIK3R1, PIK3R2, PIK3R3, PIM1, PIM2, PIM3, PIN1, PIP4K2B, PIP5K1A, |
| | PKM, PLAG1, PLAT, PLAU, PLAUR, PLCG1, PLCG2, PLEC, PLG, PLK1, PLP1, |
| | PMEPA1, PML, PMP22, PMS1, PMS2, PNMT, POLD1, POLE, POLQ, |
| | POMC, PON1, POSTN, POT1, POTEF, POU2AF1, POU2F2, POU5F1, PPA2, |
| | PPARG, PPARGC1A, PPFIBP1, PPM1D, PPP1R15A, PPP2R1A, PPP6C, PPY, |
| | PRCC, PRDM1, PRDM13, PRDM16, PRDX2, PRDX4, PREX2, PRF1, |
| | PRKACA, PRKAR1A, PRKCA, PRKCB, PRKCD, PRKCE, PRKCH, PRKCI, |
| | PRKCQ, PRKDC, PRL, PROC, PRPF8, PRRX1, PRSS1, PSCA, PSEN1, PSIP1, |
| | PSMD4, PTCH1, PTCH2, PTEN, PTGS1, PTGS2, PTH, PTHLH, PTK2, PTK6, |
| | PTN, PTPN11, PTPN13, PTPRB, PTPRC, PTPRK, PTPRO, PTPRT, PTTG1, |
| | PURA, PZP, QKI, RAB11FIP3, RAB18, RAB25, RAB40A, RABEP1, RAC1, |
| | RAD21, RAD23A, RAD23B, RAD51, RAD51B, RAD51D, RAD52, RAD54B, |
| | RAF1, RANBP2, RANBP3, RAP1GDS1, RARA, RARB, RARG, RASA1, RB1, |
| | RBBP4, RBL1, RBL2, RBM10, RBM15, RBM6, RBMX, RBP4, RECQL4, REL, |
| | RELA, RELB, RET, RHEB, RHOA, RHOB, RHOC, RHOH, RIT1, RMC1, RMI2, |
| | RNF213, RNF43, ROS1, RPA2, RPGR, RPL10, RPL22, RPL27, RPL5, RPN1, |
| | RPS15, RPS2, RPS3, RPS6KA1, RPS6KA3, RSBN1L, RSPO2, RSPO3, RUNX1, |
| | RUNX1T1, RXRA, RXRB, RXRG, S100A1, S100A2, S100A4, S100A6, |
| | S100A7, S100A8, S100A9, S100B, S1PR1, SACS, SALL4, SART1, SBDS, |
| | SCGB1A1, SCGB1D2, SCGB2A1, SCGB2A2, SDC1, SDC4, SDHA, SDHAF2, |
| | SDHB, SDHC, SDHD, SELE, SELL, SELP, SEMA3B, SEPTIN2, SERPINA1, |
| | SERPINA3, SERPINA5, SERPINB13, SERPINB2, SERPINB3, SERPINB4, |
| | SERPINE1, SERPINF1, SET, SETBP1, SETD2, SETDB1, SF3B1, SFN, SFPQ, |
| | SFRP4, SGK1, SH2B3, SH3GL1, SHBG, SIN3A, SIRT2, SIRT4, SIX1, SKP2, |
| | SLC19A1, SLC1A3, SLC26A3, SLC2A1, SLC34A2, SLC3A2, SLC44A3, |
| | SLC45A3, SLC4A5, SLPI, SMAD1, SMAD2, SMAD3, SMAD4, SMARCA4, |
| | SMARCB1, SMARCD1, SMARCE1, SMC1A, SMC3, SMO, SMYD3, SND1, |
| | SNX25, SOCS1, SOD1, SOD2, SOS1, SOX1, SOX17, SOX2, SOX9, SP1, |
| | SPARC, SPARCL1, SPATA6, SPEN, SPINK1, SPINT1, SPINT2, SPOP, SPP1, |
| | SPRR1B, SPRR3, SPRY1, SRC, SRD5A1, SRD5A2, SRSF2, SRSF3, SS18, |
| | SS18L1, SST, SSX1, SSX2, SSX2B, SSX4, ST14, STAG2, STARD3, STAT3, |
| | STAT4, STAT5A, STAT5B, STAT6, STEAP1, STIL, STK11, STK19, STMN1, |
| | STRAP, STRN, STT3A, STX2, SUFU, SULT1E1, SUZ12, SYK, SYNE1, TAF1, |
| | TAF15, TAGLN, TAL1, TAL2, TAP1, TBC1D12, TBL1XR1, TBX3, TCEA1, |
| | TCF12, TCF3, TCF7, TCF7L2, TCL1A, TCP11L2, TDRD10, TDRD6, TEK, |
| | TENT5C, TERT, TET1, TET2, TF, TFAP2B, TFDP1, TFDP2, TFE3, TFEB, TFF1, |
| | TFF2, TFF3, TFG, TFRC, TG, TGFA, TGFB2, TGFB3, TGFBR2, TGFBR3, |
| | TGIF1, TGM4, TGM7, THBS1, THBS2, THBS4, THPO, THRA, THRB, TIE1, |
| | TIMM17A, TIMP1, TIMP2, TIMP3, TJP2, TK1, TLX1, TLX3, TMEM127, |
| | TMF1, TMPRSS2, TMPRSS3, TNC, TNF, TNFAIP2, TNFAIP3, TNFRSF10A, |
| | TNFRSF10B, TNFRSF10C, TNFRSF10D, TNFRSF11B, TNFRSF12A, |
| | TNFRSF14, TNFRSF17, TNFRSF1A, TNFRSF1B, TNFRSF4, TNFRSF8, |
| | TNFRSF9, TNFSF10, TNFSF11, TNFSF13, TNFSF13B, TNFSF4, TNFSF8, |
| | TNK2, TOM1, TOP1, TOP2A, TOP3A, TP53, TP53BP1, TP53BP2, TP63, |
| | TPD52, TPI1, TPM1, TPM2, TPM3, TPM4, TPR, TPX2, TRAF1, TRAF2, |
| | TRAF3, TRAF4, TRAF7, TRIM23, TRIM24, TRIM25, TRIM27, TRIM33, |
| | TRIM7, TRIO, TRIP11, TRIP4, TRO, TRRAP, TSC1, TSC2, TSG101, TSHR, |
| | TSPAN8, TSPO, TTLL9, TTR, TUBA1A, TUSC2, TWIST1, TXLNA, TXNDC8, |
| | TXNIP, TXNRD1, TYMP, TYMS, TYRO3, U2AF1, UBA1, UBE2C, UBE2I, |
| | UBE2N, UBR5, UGT1A1, UGT1A10, UGT1A3, UGT1A4, UGT1A9, |
| | UHRF1BP1L, USH1C, USP6, USP8, VAMP3, VCAM1, VEGFA, VEGFB, |
| | VEGFC, VEGFD, VHL, VIL1, VIP, VTN, VWF, WAS, WASF3, WDCP, WEE1, |
| | WFDC2, WIF1, WNT1, WNT2, WRN, WT1, WWTR1, XBP1, XIAP, XIRP2, |
| | XPA, XPC, XPO1, XRCC1, XRCC2, XRCC3, XRCC4, XRCC5, XRCC6, YBX1, |
| | YWHAB, YWHAE, YWHAH, ZBTB16, ZFHX3, ZFP36L1, ZFP36L2, ZMYM2, |
| | ZNF132, ZNF180, ZNF300, ZNF331, ZNF384, ZNF471, ZNF483, ZNF521, |
| | ZNF620, ZNF750, ZNF814, ZNF844, ZNF91, ZRANB3, ZRSR2 |
| Genetic | AGPAT2, AGRN, AIPL1, ALG1, ALG11, ALG12, ALG13, ALG14, ALG2, |
| | ALG3, ALG6, ALG8, ALG9, ATP6AP1, ATP6AP2, B3GALNT2, B3GLCT, |
| | B4GALT1, B4GAT1, BPGM, BSCL2, CACNA1F, CAD, CAV1, CAVIN1, |
| | CCDC115, CDAN1, CDIN1, CEP290, CHAT, CHKB, CHRNA1, CHRNB1, |
| | CHRND, CHRNE, CNGA3, COG1, COG2, COG5, COG6, COG7, COG8, |
| | COL12A1, COL13A1, COL6A1, COL6A2, COL6A3, COLQ, CRB1, CRPPA, |
| | CRX, CYP11B1, CYP17A1, CYP21A2, DAG1, DDOST, DOK7, DOLK, |
| | DPAGT1, DPM1, DPM2, DPM3, DUOX2, DUOXA2, EGLN1, EPAS1, EPO, |
| | EPOR, FCSK, FKRP, FKTN, FOXE1, FUT8, GALNT2, GDF6, GFPT1, GIPC1, |
| | GLIS3, GMPPB, GNAT1, GNB3, GRK1, GRM6, GUCY2D, HBB, HSD3B2, |
| | IGSF1, IMPDH1, INPP5K, IQCB1, IRS4, ITGA7, IYD, KCNJ13, KCNJ6, KLF1, |
| | LAMA2, LARGE1, LCA5, LMNA, LPIN2, LRAT, LRIT3, LRP4, MAGT1, |
| | MGAT2, MPDU1, MPI, MUSK, MYO7A, MYO9A, NKX2-1, NMNAT1, |
| | NPHP1, NPHP4, NUS1, NKX2-5, NYX, PAX8, PDE6B, PGM1, PMM2, |
| | POMGNT1, POMGNT2, POMK, POMT1, POMT2, POR, PREPL, RAPSN, |
| | RD3, RDH12, RFT1, RHO, RPE65, RPGRIP1, RXYLT1, SAG, SCN4A, |
| | SDCCAG8, SEC23B, SLC18A3, SLC24A1, SLC25A1, SLC35A1, SLC35A2, |
| | SLC35C1, SLC39A8, SLC5A5, SLC5A7, SNAP25, SPATA7, SRD5A3, SSR4, |
| | STAR, STT3A, STT3B, SYT2, TBL1X, TG, THRA, TMEM165, TMEM199, |
| | TPO, TRAF3IP1, TRHR, TRIP4, TRPM1, TSHR, TUBB4B, TULP1, USP45, |
| | VAMP1, VHL, WDR19 |

### EXAMPLES

### Methods

[0652] Expression vectors for targeted regulation of gene expression were evaluated using lentiviral transduction of T cells and flow cytometry analysis. The Jurkat cell line was obtained from American Type Culture Collection (Manassas VA) and maintained in RPMI 1640 media with Glutamax (Gibco) containing 10% fetal calf serum (Gibco). For lentiviral transduction, Jurkat cells were incubated with lentivirus in complete media plus LentiBOOST at the manufacturers recommended concentration (Sirion Biotech). Eighteen hours after transduction, lentivirus and LentiBOOST were diluted by the addition of 3 volumes of fresh media.

[0653] Pre-selected, cryopreserved primary human CD4 T cells from normal donors were obtained from Bloodworks (Seattle WA). Human T cells were cultured in OpTimizer medium (Thermo Fisher) supplemented with Immune Cell Serum Replacement (Thermo Fisher), 2 mM L-glutamine (Gibco), 2 mM Glutamax (Gibco), 2001 U/ml IL-2 (R&D systems), 120 IU/ml IL-7 (R&D systems), and 20 IU/ml IL-15 (R&D systems).

[0654] Lentivirus was produced using standard protocols in a HEK293T suspension line. Viral supernatant was concentrated 10× using Lenti-X (Takara Bio) following the manufacturer's protocol.

[0655] For lentiviral transduction, T cells were stimulated with a 1:100 dilution of T cell TransAct (Miltenyi) for 30 hours. Virus was then added to T cells for 18-24 hours. Stimulation and viral infection were then terminated by addition of 7 volumes of fresh media without TransAct, and cells were cultured for 3-7 additional days before analysis.

[0656] Flow cytometry was performed on a Ze5 cytometer (Biorad). Cells were induced with danoprevir or equal volume DMSO for 24 hours prior to analysis. To determine expression of fluorescent proteins, between 1×10⁵-2×10⁵ total cells were transferred to a U-bottom 96 well culture dish (Corning). Cells were washed twice with flow cytometry staining buffer (eBioscience), then stained with eFluor-780 Fixable viability dye at 1:1000 dilution (eBioscience). After staining, cells were washed twice with flow cytometry staining buffer and analyzed immediately. Flow cytometry data was analyzed using FlowJo 10 (Tree Star). Where applicable during analysis, cells were gated on transduction positive cells based on BFP or RFP transduction markers and the GFP gMFI was determined for the live/transduction+/GFP+ cells.

### Inducible and Constitutive Polynucleotides

[0657] An initial split transcription factor comprised the Gal4 DBD fused to NS3a and DNCR2 fused to the VPRmini TAD, expressed under the control of a constitutive promoter (MND). Both of these transcriptional units (constitutive promoter and inducible promoter) were assembled into all-in-one vectors in lentiviral backbones in three different orientations: unidirectional forward, unidirectional reverse, and bidirectional head-to-head. FIG. 4 illustrates a schematic diagram 400 of an example of all-in-one vectors in lentiviral backbones in unidirectional forward (SEQ ID NO: 96), unidirectional reverse (SEQ ID NO: 95), and bidirectional head-to-head (SEQ ID NO: 97) orientations. In this example, the inducible gene expressed is EGFP, which encodes an enhanced GFP protein (EGFP or GFP). The expressed split transcription factor binds to a 5×Gal4-RE repeat to induce expression GFP from a minimal CMV promoter (minCMV).

[0658] FIG. 5A is a plot 500 showing transduction results for the three vector orientations of FIG. 4 using different volumes of 10× concentrated lentivirus in Jurkat cells. The data show that the unidirectional forward vector had a distinct advantage in providing higher titer lentivirus, as seen by the higher percentage of Jurkat cells that were successfully transduced with the virus and expressed GFP upon danoprevir treatment. The bidirectional vector arrangement gave lentivirus of moderate titer, while the unidirectional reverse vector gave low titer virus.

[0659] FIG. 5B is a plot 510 showing titration of danoprevir on Jurkat cells expressing the unidirectional forward or bidirectional vectors of FIG. 4. The data show that the titration of danoprevir on the unidirectional forward and bidirectional vectors gave a similar dose-response of induced GFP expression, with the bidirectional vector exhibiting higher background levels of GFP in the absence of danoprevir, possibly due to the close proximity of the constitutive and inducible promoters.

[0660] The inducible and constitutive transcriptional units (i.e., inducible polynucleotide and constitutive polynucleotide components) can be split across two lentivirus vectors to reduce crosstalk between the promoters and improve viral yields due to the smaller size of the vectors. FIG. 6 illustrates a schematic diagram 600 of an example of a two-vector system with the constitutive transcription factor component and inducible promoter component on separate lentiviral vectors. In this example, the transcription factor vector (TFV1, SEQ ID NO: 113) also encodes a constitutively expressed red fluorescent protein (RFP) as a transduction marker and the inducible promoter vector (IPV1, SEQ ID NO: 98) also encodes a constitutively expressed blue fluorescent protein (BFP) as a transduction marker. The inducible gene expressed in the inducible promoter vector is enhance green fluorescent protein (EGFP or GFP).

[0661] To evaluate the two-vector system, the two lentiviruses were produced separately and co-transduced into Jurkats or primary human CD4+ T cells. The split transcription factor expressed from TFV1 binds to a 5×Gal4-RE repeat on IPV1 to induce GFP expression from a minimal CMV promoter (minCMV).

[0662] FIG. 7A is a plot 700 and a histogram 710 showing GFP intensity in transduction positive Jurkat cells in response to increasing concentrations of danoprevir. Cells were gated on transduction positive cells based on the transduction marker RFP and the EGFP gMFI was determined for the live/transduction+/GFP+ cells. The data show that in Jurkat cells, when gated on transduction positive cells, the median of the GFP peak shifts incrementally as danoprevir concentration increases. This indicates “titratability”, meaning that this system allows the intracellular concentration of a gene product (here GFP) to be modulated by the concentration of the inducer drug on a cell-by-cell basis. This observation contrasts with other small molecule systems (e.g., tet-inducible) that exhibit a binary response on a cell-by-cell basis (Loew, R., et al., Bmc Biotechnology (2010) 10, 81, which is incorporated herein by reference in its entirety).

[0663] FIG. 7B is a plot 715 showing median GFP intensity in primary CD4+ T cells. Cells were gated on transduction positive cells based on the transduction marker BFP and the EGFP gMFI was determined for the live/transduction+/GFP+ cells. The data shows high induction of GFP in primary human CD4+ T cells.

[0664] Background GFP expression was observed in the absence of danoprevir. Hypothesizing that the inducible promoter used had leaky constitutive expression, we sought to reduce this background by testing a panel of minimal promoters in the inducible promoter vector (IPV). The panel of minimal promoter tested included: minCMV (i.e., IPV2, SEQ ID NO: 99), YB_TATA (i.e., IPV3, SEQ ID NO: 100), the minimal IL2 promoter (minIL2) (i.e., IPV4, SEQ ID NO: 101), the minimal human beta globin promoter (huBG) (i.e., IPV5, SEQ ID NO: 102), and the promoter region from the tetracycline inducible system TRE3G (i.e., IPV6, SEQ ID NO: 103) (Ede, C., et al., ACS Synthetic Biology (2016) 5: 395-404, which is incorporated herein by reference in its entirety). Jurkat cells were co-transduced with the transcription factor vector TFV1 (SEQ ID NO: 113) and one of the inducible promoter vectors IPV2-IPV6.

[0665] FIG. 8A is a panel of histogram plots 800 showing EGFP expressed from untransduced Jurkat cells or Jurkat cells co-transduced with the transcription factor vector TFV1 and one of the inducible promoter vectors (IPV2-IPV6) exposed to 500 nM danoprevir. Exposure of untransduced and co-transduced Jurkat cells to DMSO was used as a vehicle control. The data show that all minimal promoters tested induced expression of EGFP in response to danoprevir. The level of EGFP in the DMSO exposed cells indicates the increase in background GFP by the inducible promoter vector over untransduced cells.

[0666] FIG. 8B is a plot 810 and a plot 815 showing maximal EGFP mean fluorescence intensity data (gMFI) and fold induction, respectively, for induction GFP expression in response to 500 nM danoprevir in Jurkat cells co-transduced with the transcription factor vector TFV1 and one of the inducible promoter vectors (IPV2-IPV6). For plot 815, fold induction was computed as EGFP gMFI for danoprevir exposed cells relative to DMSO exposed cells (i.e., danoprevir/DMSO conditions).

[0667] FIG. 8C is a plot 820 and a histogram plot 825 showing EGFP expression levels in response to titration of danoprevir on the weakest minimal promoter, YB_TATA (i.e., IPV3, SEQ ID NO: 100).

[0668] FIG. 8D is a plot 830 and a histogram plot 835 showing EGFP expression levels in response of the strongest minimal promoters minCMV (IPV2, SEQ ID NO: 99), huBG (IPV5, SEQ ID NO: 102), TRE3G (IPV6, SEQ ID NO: 103) to danoprevir titration and EGFP levels for huBG, respectively.

[0669] Referring now to FIG. 8A through FIG. 8D, the data show that the minimal promoters YB_TATA and minIL2 were the weakest in their maximum induction level, with minIL2 showing incomplete activation (i.e., one population with drug-induced expression and the other with leaky constitutive expression). YB_TATA, a synthetic promoter, had an advantage in having the lowest background GFP level and good titratability but had the lowest maximum induction level. Of the three strongest promoters (minCMV, TRE3G, huBG), huBG had the lowest background level, resulting in the highest fold-induction of GFP.

[0670] We further hypothesized that the remaining background GFP levels observed with the YB_TATA and huBG minimal promoters may have been caused by crosstalk with the enhancers of the constitutive MND promoter that was used to drive the expression of BFP as a transduction marker on the inducible promoter vectors. FIG. 9A illustrates a schematic diagram 900 of an example of an inducible promoter vector (IPV5, SEQ ID NO: 102) showing the constitutive promoter MND driving the expression of the transduction marker BFP and the minimal inducible promoter huBG driving expression of EGFP.

[0671] To investigate the possibility that the background GFP levels observed may be caused by crosstalk with the MND promoter, the constitutive MND promoter was replaced with a constitutive hPGK promoter. Jurkat cells were co-transduced with TFV1 (SEQ ID NO: 113) and either IPV5 (SEQ ID NO: 102) or IPV7 (SEQ ID NO: 104), which utilize the MND and hPCK promoters, respectively. Untransduced Jurkat cells and co-transformed Jurkat cells exposed to DMSO were used as controls.

[0672] FIG. 9B is a histogram plot 910 and a histogram plot 915 showing normalized GFP expression levels in Jurkat cells co-transformed with TFV1 and either IPV5 or IPV7, which utilize the MND and hPCK promoters, respectively. A comparison of the DMSO condition to the untransduced Jurkat cells shows that the constitutive hPCK promoter results in less crosstalk with the inducible promoter and lower background GFP levels.

[0673] FIG. 9C is a plot 920 and a histogram plot 925 showing EGFP expression levels in response to titration of danoprevir on the hPGK vector (i.e., IPV7) in Jurkat cells co-transduced with TFV1.

[0674] Referring now to FIG. 9B and FIG. 9C, the data show that replacing the MND promoter with the hPGK promoter decreased background GFP expression. The resulting IPV7 vector exhibited a large dynamic range of GFP expression when co-transduced with the transcription factor vector TFV1. We expect that removing the constitutive promoter and transduction marker from the reporter vector will further reduce leakiness.

### Transcription Factor Component

[0675] In addition to variations in minimal and constitutive promoters, the transcription factor component of the small molecule-inducible gene expression system was optimized. Because the transcription factor is a split transcription factor consisting of two polypeptide chains, the polynucleotide encoding the first fusion protein and the polynucleotide encoding the second fusion protein must be separated by a separation element such as ribosomal skipping sequence (e.g., P2a or T2a), an IRES, or expressed from two separate constitutive promoters. Briefly, primary CD4+ T cells were co-transduced with the inducible promoter vector IPV1 (synPA-tagBFP-MND-bGHpA-sfGFP-minCMV-5×Gal4RE; SEQ ID NO: 98) and either a transcription factor vector that includes:
[0676] (i) two 2a sequences separating a Gal4DBD-NS3a polynucleotide and a DNCR2-TAD polynucleotide (TFV1: ND-Gal4DBD-NS3a-T2a-mCherry-P2a-DNCR2-VPR; SEQ ID NO: 113),
[0677] (ii) a single 2a sequence separating aGal4DBD-NS3a polynucleotide and a DNCR2-TAD polynucleotide (TFV2: MND-mCherry-T2a-Gal4DBD-NS3a-P2a-DNCR2-VPR; SEQ ID NO: 114), or
[0678] (iii) two 2a sequences separating a NS3a-TAD polynucleotide and a Gal4DBD-DNCR2 polynucleotide (TFV3: MND-NS3a-VPR-T2a-mCherry-P2a-Gal4DBD-DNCR2; SEQ ID NO: 115).

[0679] In this example the transcriptional activation domain (TAD) is VPRmini (“VPR”). Co-transduced cells were exposed to 500 nM danoprevir or DMSO (control) and analyzed by flow cytometry for GFP expression.

[0680] FIG. 10 is histogram plots 1000, 1010, and 1015 showing GFP levels in cells co-transduced with IPV1 and either TFV1, TFV2, or TFV3, respectively, and exposed to danoprevir or DMSO. The data show that a single 2a element (TFV2) between the transcription factor components resulted in higher background GFP expression than two 2a elements (TFV1), likely from incomplete translational skipping resulting in some production of fused NS3a-DBD-DNCR2-TAD protein. Additionally, the fusion partners in the transcription factor could be swapped, with DNCR2 fused to Gal4 and NS3a fused to VPRmini (TFV3). TFV3 had two 2a sequences separating the transcription factor components and yielded a similar background GFP level as TFV1 and successful induction of GFP upon danoprevir treatment.

[0681] To generalize the gene expression system to other DNA binding domains (DBDs) and transcriptional activation domains (TADs), a panel of four zinc fingers (ZFs) and four TADs were tested. The four ZFs tested (ZFHIV2, ZF1, ZF2, and ZF3) have been previously described (Lohmueller, J. J., et al., Nucleic Acids Research (2012) 40: 5180-5187; Donahue, P. S. et al., Nature Communications (2020) 11; and Khalil, A. S., et al., Cell (2012) 150: 647-658, which are incorporated herein by reference in their entireties). Each of the four ZFs were fused to NS3a. The NS3a fusion proteins tested were NS3a-ZFHIV2 (SEQ ID NO: 71), NS3a-ZF1 (SEQ ID NO: 68), NS3a-ZF2 (SEQ ID NO: 69), and NS3a-ZF3 (SEQ ID NO: 70). For the inducible promoter vector, six repeats of the ZF response elements HIV2RE (SEQ ID NO: 143), ZF1RE (6×ZFIRE; SEQ ID NO: 85), ZF2RE (6×ZF2RE; SEQ ID NO: 86), ZF3v1RE (6×ZF3v1RE; SEQ ID NO: 87), and ZF3v3RE (SEQ ID NO: 88) were encoded in front of the YB_TATA minimal promoter (SEQ ID NO: 77). Note that two different 6×RE encodings were used for ZF3 in which the nucleotides flanking the RE sequences varied: ZF3v1RE (SEQ ID NO: 87) and ZF3v3RE (SEQ ID NO: 88). The different zinc finger protein fusions were compared to an NS3a-Gal4 DBD fusion protein (Gal4-NS3a SEQ ID NO: 65), with the 5×Gal4RE and YB_TATA minimal promoter vector IPV8 (SEQ ID NO: 105). Briefly, Jurkat cells were co-transduced with an inducible promoter vector (IPV) and its cognate transcription factor vector (TFV). Cells were induced with 500 nM danoprevir or an equal volume of DMSO for 24 hours prior to analysis by flow cytometry. The vectors used are shown in Table 2.

[0682] FIG. 11 is a plot 1100 showing GFP expression (gMFI) for the four zinc finger (ZF) DBD-NS3a fusion proteins and the four DNCR2-TAD fusion proteins in response to treatment with 500 nM danoprevir. All IPVs (IPV8-IPV13) utilize YB_TATA as the minimal promoter and are used with their cognate TFV (TFV4-TFV18). Reporter alone indicates the GFP level from Jurkats transduced with only the inducible promoter vectors. Gal4 with VPRmini is shown for comparison. The data show that ZFHIV2 and ZF3 (with ZF3v3RE) gave the highest induced GFP levels. ZF2 also produced high GFP levels, but its reporter sequence gave high background GFP levels (“reporter alone” condition). VPRmini was the strongest transcriptional activation domain, while VP64-RTA and p65-HSF1 (a TAD composed of all-human components) both showed moderate induction levels. p65 alone was very weak. In comparison, the Gal4 system with VPRmini gave weaker max induction than ZF3 and ZFHIV2, indicating that these human-derived zinc finger sequences offer comparable-or-better gene induction to the yeast-derived Gal4 DBD.

[0683] Additionally, to increase induction of GFP expression, two different strategies were used. In the first strategy, the number of RE repeats was increased from 6× (IPV9, IPV13) to 12× (IPV14, IPV15) for ZFHIV2 or ZF3. A second strategy to increase induction was to dimerize the NS3a-ZF construct with a leucine zipper homodimer sequence (LZ) (TFV19, TFV20).

[0684] FIGS. 12A and 12B are a plot 1200 and a plot 1210 showing GFP expression (gMFI) induced by DNCR2-VPRmini on inducible promoters includes 6×RE or 12×RE for ZFHIV2 or ZF3, respectively. In this example, the zinc fingers were fused directly to NS3a or with a homodimeric leucine zipper (LZ) between the NS3a and ZF domain (TFV19, TFV20). The data show increased induction from ZF3, but lower induction from ZFHIV2. The data show a higher maximal induction for ZFHIV2, but lower induction for ZF3, indicating some dependence of this strategy on the DBD being used.

[0685] To improve encoding of the inducible gene expression system in viral vectors, which are limited in genetic cargo capacity, we used the Rosetta software package to generate new designs that reduce the size of our small molecule induced dimers (Leaver-Fay, A. et al., Methods Enzymology (2011) 487:545-74, which is incorporated herein by reference in its entirety). Specifically, we generated designs that reduce the number and length of the helices in DNCR2 and GNCR1 (sequences DNCR2_1 through DNCR2_34 (SEQ ID NOs: 12 through 45) and G-3rep (SEQ ID NO: 48), G33 (SEQ ID NO: 49), and G38 (SEQ ID NO: 50)), followed by redesigning the amino acid sequence of the regions surrounding these truncations using previously described design methods (Brunette, T. J., et al., Nature (2015) 528(7583):580-4, and Brunette, T. J., et al., PNAS (2020) 117(16) 8870-8875, which are incorporated herein by reference in their entirety).

[0686] A panel of these designs with a range of truncation degrees and sequence diversity were tested for their ability to bind NS3a/danoprevir. The minimized DNCR2 and GNCR1 designs were expressed on the surface of EBY 100 Saccharomyces cerevisiae and analysed by flow cytometry. Briefly, Avi-His6-tagged NS3a was co-expressed with biotin ligase BirA in BL21 E. coli, and biotinylated NS3a was purified from the lysed cells following standard His-tag purification procedures. DNCR2 and GNCR1 designs were expressed on the surface of EBY100 S. cerevisiae via fusion to Aga2p in the standard yeast display vector pETCON with a c-myc tag for expression detection. NS3a complexes were formed in PBS+0.5% w/v BSA with excess danoprevir or grazoprevir (ApexBio). NS3a/drug complexes were incubated with yeast expressing the designs for 1 hr at room temperature, then washed. Yeast cells were incubated with streptavidin-PE (Invitrogen, S866) and anti-myc-AlexaFluor647 (Cell Signaling Technologies, #2233S) for 10 min and washed before analysis on a BioRad ZE5 flow cytometer.

[0687] FIG. 13A is a schematic diagram showing the crystal structure of DNCR2/danoprevir/NS3a and models of D-1 (DNCR2_1; SEQ ID NO: 12), D-9 (DNCR2_9; SEQ ID NO: 20), and D-20 (DNCR2_20; SEQ ID NO: 31) designs. FIG. 13B is a plot 1310 showing the median NS3a binding intensity (PE) for titration of NS3a/danoprevir binding to the four DNCR2 variants displayed on yeast. Designs were displayed on the surface of yeast, and NS3a/danoprevir was titrated on yeast and observed by flow cytometry. A number of DNCR2 minimization designs were considerably smaller than the original DNCR2 (SEQ ID NO: 11) and maintained binding to NS3a/danoprevir. D-1 and D-9 showed equivalent binding as DNCR2, while D-20 (smallest successful design at 57 amino acids) exhibited weaker binding.

[0688] FIG. 14A is a schematic diagram 1400 showing models of GNCR1 (with G-3rep truncation indicated), G-33, and G-38. FIG. 14B is a plot 1410 and a plot 1415 titration of NS3a/grazoprevir binding the GNCR1 and titration of NS3a/grazoprevir on G-3rep, G-33, and G-38 displayed on yeast, respectively. For GNCR1, three designs were identified that retained moderate binding to NS3a (i.e., G-3rep, G33, and G38), albeit with reduced binding compared to the original GNCR1 (SEQ ID NO: 47).

### Two-Vector System Optimization

[0689] To further optimize the two-vector system we sought to: (i) reduce the size of the transcription factor and inducible promoter vector constructs, and (ii) reduce background expression (i.e., “leakiness”) from the inducible promoter construct.

[0690] To reduce the size of the transcription factor and inducible promoter vectors, transduction markers (i.e., RFP and BFP) were removed from both vectors. As described herein above with reference to FIG. 6, the original transcription factor vector TFV1 included a T2a-RFP-P2a sequence separating the transcription factor components and the inducible promoter vector included a constitutive promoter-BFP sequence. IPV and TFV vectors for optimizing the two-vector system are shown in Table 3.

[0691] FIG. 15 illustrates a schematic diagram of an example of a modified two-vector system with transduction markers removed from the constitutive transcription factor and inducible promoter lentiviral vectors. In this example, the transcription factor vector TFV21 includes two sequential 2a ribosome skipping elements without the RFP sequence between them (T2a-P2a) separating the DNA binding domain (Gal4DBD-NS3a) and the transcriptional activation domain (DNCR2-VPRmini) components. The inducible promoter vector IPV16 the inducible promoter (huBG) and EGFP in the forward direction; sequences encoding the constitutive promoter and the BFP transduction marker were removed. Removal of the constitutive promoter-BFP sequences in IPV16 reduced the size of the vector and removed the potential for crosstalk between the constitutive promoter and the inducible promoter, which we have shown could influence background EGFP leakiness (see FIG. 9).

[0692] The modified expression vectors TFV21 and IPV16 were evaluated using lentiviral transduction of T cells (i.e., Jurkat and HEK293T cell lines) and flow cytometry analysis. The Jurkat cell line was obtained from American Type Culture Collection (Manassas VA) and maintained in RPMI 1640 media with Glutamax (Gibco) containing 10% fetal calf serum (Gibco). For lentiviral transduction, Jurkat cells were incubated with lentivirus in complete media plus LentiBOOST at the manufacturer's recommended concentration (Sirion Biotech). Eighteen hours after transduction, lentivirus and LentiBOOST were diluted by the addition of 3 volumes of fresh media. The HEK293T cell line was obtained from American Type Culture Collection (Manassas VA) (catalog number CRL-3216) and maintained in DMEM, high glucose media with Glutamax (Gibco) containing 10% fetal calf serum (Gibco). For lentiviral transduction, HEK293T cells were plated at about 30% confluency 24 hours prior to transduction, then incubated with lentivirus in complete media. 24-48 hours after transduction, cells were passaged up to larger volume wells. Flow cytometry was performed essentially as described herein above.

[0693] FIG. 16 is a panel of histogram plots showing GFP levels in Jurkat and HEK293 cells co-transduced with IPV16 and either TFV1 or TFV21. Transduced cells were treated with 500 nM danoprevir or 20 nM danoprevir and are compared to transduced cells treated with an equal volume of DMS and untransduced, wild type HEK293 cells. The histograms show live, single cells. The data show that in Jurkat cells and HEK293 cells IPV16 displayed very low levels of GFP leakiness when transduced with TRV1 or TFV21 compared to wild type cells. This result demonstrated that the removal of the constitutive promoter on the inducible promoter vector removes a significant source of leakiness. TFV1 and TFV21 exhibit very similar background GFP and induced GFP levels, indicating that the sequential T2a-P2a element is a viable alternative to the separation element containing a transduction marker.

[0694] To reduce any remaining leakiness in the system, we tested a panel of strategies designed to reduce EGFP expression in the absence of danoprevir by either degrading the Gal4-NS3a DNA binding domain or epigenetically blocking basal transcription with Gal4-KRAB (SEQ ID NO: 159). To degrade the Gal4-NS3a binding domain, we tried two approaches to localize the E3 ligase SPOP (SEQ ID NO: 156) to the inducible promoter via interaction with Gal4-NS3a. In one approach, we fused the two halves of a constitutive protein heterodimer binding pair (DHD37-2B and DHD37-2B) to Gal4-NS3a (Gal4-NS3a-DHD37-2B; SEQ ID NO: 161) and SPOP (DHD37-2A-SPOP; SEQ ID NO: 160) to create a system in which there would always be E3 ligase activity at the promoter regardless of danoprevir treatment. In another approach, we created a system in which SPOP would only be localized to the inducible promoter in the absence of danoprevir by fusing SPOP to the apo-NS3a reader ANR (ANR-SPOP; SEQ ID NO: 157). ANR binding to NS3a can be dissociated by any of the NS3a small molecule inhibitors. We compared background (DMSO control) and danoprevir-induced (100 nM danoprevir) EGFP expression levels from these approaches to the normal IPV16/TFV1 combination in HEK293 cells, and the level of autofluorescence of untransduced, wild type HEK293 cells for each vector pair.

[0695] FIG. 17 is a panel of histogram plots showing EGFP expression in HEK293 cells transduced with the normal IPV16 and TFV1 vectors or with vectors expressing elements designed to reduce EGFP output. Plot 1700 shows GFP expression in cells co-transduced with the normal inducible promoter vector IPV16 and transcription factor vector TFV1. Plot 1710 shows GFP expression in cells co-transduced with DHD-SPOP expressed from the inducible promoter vector IPV19 and Gal4-NS3a-DHD expressed from the transcription factor vector TFV24. Plot 1715 shows GFP expression in cells co-transduced with Gal4-KRAB expressed from the inducible promoter vector IPV17 and the transcription factor vector TFV1. Plot 1720 shows GFP expression in cells co-transduced with the inducible transcription vector IPV16 and Gal4-KRAB expressed from the transcription factor vector TFV22. Plot 1725 shows GFP expression in cells co-transduced with ANR-SPOP expressed from the inducible promoter vector IPV18 and the transcription factor vector TFV1. Plot 1730 shows GFP expression in cell co-transduced with the inducible transcription vector IPV16 and ANR-SPOP expressed from the transcription factor vector TFV23. Plots 1700, 1710, 1715, and 1725 were gated on single, live, TFV transduction-positive events. Plots 1720 and 1730 were gated on live, single cells.

[0696] Plot 1700 of FIG. 17 shows background (DMSO control) and danoprevir-induced EGFP expression levels in the normal IPV16/TFV1 combination in HEK293 cells, which can display a small amount of leaky EGFP expression at higher transduction levels of IPV16.

[0697] Referring now to plots 1715 and 1720 of FIG. 17, Gal4-KRAB expressed either inducibly from the inducible expression vector (plot 1715) or constitutively from the transcription factor vector (1720) blocked both leaky and danoprevir-inducible EGFP expression, indicating that this epigenetic strategy is too strong.

[0698] Referring now to plot 1710 of FIG. 17, we fused the two halves of a constitutive protein heterodimer binding pair (DH1D37-2B and DH1D37-2B) to Gal4-NS3a (Gal4-NS3a-DH1D37-2B) and SPOP (DHD37-2A-SPOP) to create a system in which there would always be E3 ligase activity at the promoter regardless of danoprevir treatment. Plot 1710 shows that while effective in reducing leaky EGFP expression, this DHD-SPOP strategy also strongly reduced danoprevir-inducible EGFP expression.

[0699] Referring now to plots 1725 and 1730 of FIG. 17, we created a system in which SPOP would only be localized to the inducible promoter in the absence of danoprevir by fusing SPOP to the apo-NS3a reader ANR (ANR-SPOP). When ANR-SPOP was expressed inducibly (plot 1725) or constitutively (plot 1730) it effectively removed any leaky background expression of EGFP. Inducible ANR-SPOP expression also reduced the maximal danoprevir-induced EGFP expression, possibly due to higher ANR-SPOP expression levels. In contrast, ANR-SPOP expressed from the transcription factor vector (plot 1730) effectively reduced background EGFP expression in the absence of danoprevir while maintaining high danoprevir-induced expression. The slight shift in the fluorescence levels of the negative population in plot 1730 with danoprevir treatment may reflect that the suppressive effect of ANR-SPOP acts on transcriptional machinery that basally associates with the inducible promoter. Other E3 ligases fused to the DHD system or ANR would be expected to have a similar effect on reducing background expression.

[0700] To compare the performance of the system more closely with (IPV16/TFV23) and without (IPV16/TFV1) constitutive ANR-SPOP expression, we examined the dose response of EGFP expression to danoprevir titration. FIG. 18 is a panel of plots showing a comparison of EGFP background levels and titratable EGFP expression from the normal IPV16/TFV1 combination and IPV16 with the transcription factor vector TFV23 expressing ANR-SPOP. Plot 1800 shows background EGFP levels for wild type (wt) HEK293 cells compared to HEK293 cells transduced with the IPV16/TFV1 combination (without ANR-SPOP) or with the IPV16/TFV23 combination (with ANR-SPOP) treated with DMSO. Plot 1810 shows EGFP geometric mean fluorescence intensity (gMRI) plotted for a titration of danoprevir on the two construct combinations. Plots 1815 and 1820 show histograms of EGFP expression for the data plotted in plot 1810.

[0701] Referring now to plot 1800 of FIG. 18, we confirmed that the system with ANR-SPOP had background EGFP expression levels indistinguishable from wild type HEK293 cells, and about 3-times lower than that of the system without ANR-SPOP.

[0702] Referring now to plots 1810, 1815, and 1820, titration of danoprevir on the two systems demonstrated equivalent danoprevir EC50 levels and maximal expression levels.

The application's sequence listing, which the Patent Office published only in electronic form, follows.

SEQUENCE LISTING (101300 sequences)

SEQ ID NO: 1 - protein, 36 aa, Artificial Sequence
  Synthetic polypeptide LeucineZipper-GCN4 (dimer)
QRMKQLEDKVEELLSKNYHLENEVARLKKLVGDAAR

SEQ ID NO: 2 - protein, 75 aa, Artificial Sequence
  Synthetic polypeptide pRO2.5 (trimer)
SEYEIRKALEELKASTAELKRATASLRASTEELKKNPSEDALVENNRLIVEHNAIIVENNRIIAAVLELIVRAIK

SEQ ID NO: 3 - protein, 75 aa, Artificial Sequence
  Synthetic polypeptide 2L4HC2_23 (dimer)
TRTEIIRELERSLREQEELAKRLKELLRELERLQREGSSDEDVRELLREIKELVEEIEKLAREQKYLVEELKRQD

SEQ ID NO: 4 - protein, 70 aa, Artificial Sequence
  Synthetic polypeptide 5H2LD__10_A (pentamer)
TRRKQEMKRLKKEMEKIREETEEVKKEIEESKKRPQSESAKNLILIMQLLINQIRLLALQIRMLALQLQE

SEQ ID NO: 5 - protein, 72 aa, Artificial Sequence
  Synthetic polypeptide 6H2LD__8_A (hexamer)
TEDEIRKLRKLLEEAEKKLKKLEDKTRRSEEISKTDDDPKAQSLQLIAESLMLIAESLLIIAISLLLSSRNG

SEQ ID NO: 6 - protein, 280 aa, Artificial Sequence
  Synthetic polypeptide dimer-NS3aH1
TRTEIIRELERSLREQEELAKRLKELLRELERLQREGSSDEDVRELLREIKELVEEIEKLAREQKYLVEELKRQDGSASGSASMKKKGSVVIVGRINLSGDTAYSQQTRGLEGCQETSQTGRDKNQVEGEVQVVSTATQSFLATSINGVLWTVYHGAGTRTIASPKGPVTQMYTNVDKDLVGWQAPQGSRSLTPCTCGSSDLYLVTRHADVIPVRRRGDSRGSLLSPRPISYLKGSAGGPLLCPAGHAVGIFRAAVSTRGVAKAVDFIPVESLETTMRSP

SEQ ID NO: 7 - protein, 276 aa, Artificial Sequence
  Synthetic polypeptide hexamer-NS3a
TEDEIRKLRKLLEEAEKKLKKLEDKTRRSEEISKTDDDPKAQSLQLIAESLMLIAESLLIIAISLLLSSRNGSASGSASMKKKGSVVIVGRINLSGDTAYSQQTRGLEGCQETSQTGRDKNQVEGEVQVVSTATQSFLATSINGVLWTVYHGAGTRTIASPKGPVTQMYTNVDKDLVGWQAPQGSRSLTPCTCGSSDLYLVTRHADVIPVRRRGDSRGSLLSPRPISYLKGSAGGPLLCPAGHAVGIFRAAVSTRGVAKAVDFIPVESLETTMRSP

SEQ ID NO: 8 - protein, 275 aa, Artificial Sequence
  Synthetic polypeptide pentamer-NS3aH1
TRRKQEMKRLKKEMEKIREETEEVKKEIEESKKRPQSESAKNLILIMQLLINQIRLLALQIRMLALQLQEGSASGSASMKKKGSVVIVGRINLSGDTAYSQQTRGLEGCQETSQTGRDKNQVEGEVQVVSTATQSFLATSINGVLWTVYHGAGTRTIASPKGPVTQMYTNVDKDLVGWQAPQGSRSLTPCTCGSSDLYLVTRHADVIPVRRRGDSRGSLLSPRPISYLKGSAGGPLLCPAGHAVGIFRAAVSTRGVAKAVDFIPVESLETTMRSP

SEQ ID NO: 9 - protein, 280 aa, Artificial Sequence
  Synthetic polypeptide trimer-NS3aH1
SEYEIRKALEELKASTAELKRATASLRASTEELKKNPSEDALVENNRLIVEHNAIIVENNRIIAAVLELIVRAIKGSASGSASMKKKGSVVIVGRINLSGDTAYSQQTRGLEGCQETSQTGRDKNQVEGEVQVVSTATQSFLATSINGVLWTVYHGAGTRTIASPKGPVTQMYTNVDKDLVGWQAPQGSRSLTPCTCGSSDLYLVTRHADVIPVRRRGDSRGSLLSPRPISYLKGSAGGPLLCPAGHAVGIFRAAVSTRGVAKAVDFIPVESLETTMRSP

SEQ ID NO: 10 - protein, 33 aa, Artificial Sequence
  Synthetic polypeptide ANR
GELDELVYLLDGPGYDPIHSDVVTRGGSHLFNF

SEQ ID NO: 11 - protein, 229 aa, Artificial Sequence
  Synthetic polypeptide DNCR2
SSDEEEARELIERAKEAAERAQEAAERTGDPRVRELARELKRLAQEAAEEVKRDPSSSDVNEALKLIVEAIEAAVDALEAAERTGDPEVRELARELVRLAVEAAEEVQRNPSSSDVNEALHSIVYAIEAAIFALEAAERTGDPEVRELARELVRLAVEAAEEVQRNPSSRNVEHALMRIVLAIYLAEENLREAEESGDPEKREKARERVREAVERAEEVQRDPSGWLNH

SEQ ID NO: 12 - protein, 134 aa, Artificial Sequence
  Synthetic polypeptide DNCR2_1
DDNEAEKLIREAEEAAKDAEEAAERTGDPEVRELARELVRLAKEAAEEVQRNPSSSDVNEALHSIVYAIEAAIFALEAAERTGDPEVRELARELVRLAVEAAEEVQRNPSSRNVEHALMRIVLAIYLAEENLRE

SEQ ID NO: 13 - protein, 105 aa, Artificial Sequence
  Synthetic polypeptide DNCR2_2
EERELARELERLAKEAAEEVQRNPSSSDVNEALHSIEYAREAAEFAREAAERTGDPEVRELARELVRLAVEAAEEVQRNPSSRNVEHALMRIVLAIYLAEENLRE

SEQ ID NO: 14 - protein, 78 aa, Artificial Sequence
  Synthetic polypeptide DNCR2_3
DENEAEHSRRYAKEAAEFAREAAERTGDPEVRELARELERLAREAAEEVQRNPSSRNVEHALMRIVLAIYLAEENLRE

SEQ ID NO: 15 - protein, 78 aa, Artificial Sequence
  Synthetic polypeptide DNCR2_4
DENELEHIRRYLKEILEFVREVVERTGDEHIRRLLEELERLVKKVIEELKRRPDLHHNEHAFMRLVLAVYLAEENLRE

SEQ ID NO: 16 - protein, 78 aa, Artificial Sequence
  Synthetic polypeptide DNCR2_5
DENELEHIRRYLKEVLEFVREILERTGDEEVKKLIEELERLVKKIEEELKRDPRRHHNEHAVMRLVLAVYLLEENLRE

SEQ ID NO: 17 - protein, 105 aa, Artificial Sequence
  Synthetic polypeptide DNCR2_6
DEEELHKRVEELWKELHELVRRHSHDSDLNELLHIIEYLREVLEFVREVLERTGDEHIKRLLHELVKRIVETIEELKRNSHHSNNEHAVMRIVLAVYLAEENLRE

SEQ ID NO: 18 - protein, 105 aa, Artificial Sequence
  Synthetic polypeptide DNCR2_7
DEEELERRLEELWRRIKERVERHSHDSDLNELLHIIEYLREVVEFVREVVERTGDEHIKRLLLELIREIVEVIEKLERNLHDSNNEHAVMRIVLAVYLAEENLRE

SEQ ID NO: 19 - protein, 99 aa, Artificial Sequence
  Synthetic polypeptide DNCR2_8
EVEEVLKDLEEAIERLHDHEINRLAKEVLKILRKRDDHSIIYAVEVMIFVIEVLERTGDEKVRELIRELAEIIRRKGGTDGAVMRLVLAIYLLEENLRE

SEQ ID NO: 20 - protein, 98 aa, Artificial Sequence
  Synthetic polypeptide DNCR2_9
ELEEVLKDLEEALERLRNEELRRLIEEIAELLRRRDDHSIIYMIEALIFVIEAVERTGDERIEKLLEELIKRIRNGDDDSAIMRIVLAVYLIEENLRE

SEQ ID NO: 21 - protein, 102 aa, Artificial Sequence
  Synthetic polypeptide DNCR2_10
EAEEAAKDAEEAAERLHDPEVRELARELVRLAKETTHEDGLHSIVYAIEAAIFALEAAERTGDPEVRELARELVRLARNGDHSGALMRIVLAIYLAEENLRE

SEQ ID NO: 22 - protein, 98 aa, Artificial Sequence
  Synthetic polypeptide DNCR2_11
EAEEAAKDAEEAAERLHDPEVRELARELVRLAKERDDHSIVYAIEAAIFALEAAERTGDPEVRELARELVRLAREGDHSSALMRIVLAIYLAEENLRE

SEQ ID NO: 23 - protein, 134 aa, Artificial Sequence
  Synthetic polypeptide DNCR2_12
DDNEAEKLIREAEEVLKDIEEILERLHDEEIIRLVEEVQKILKELLERVHKHPHDSDLNELLHIIFYMMEVLIFVLEVLERTGDEEIRKLVWHIVRIILEILEELRRNPKHSNNEHALMRLLLAIYLLEENLRE

SEQ ID NO: 24 - protein, 109 aa, Artificial Sequence
  Synthetic polypeptide DNCR2_13
EAEEAAKDAEEAAERLHDPEVRELARELVRLAKEVDDHSIVYAIEAAIFALEAAERTGDPEVRELARELVRLAVEAAEEVQRNPSSRNVEHALMRIVLAIYLAEENLRE

SEQ ID NO: 25 - protein, 109 aa, Artificial Sequence
  Synthetic polypeptide DNCR2_14
EFEEVLKDLEEVVERLHNEEIRRLLERLIELLRRVRDHSFIYLVEAVIFVLEVLERTGDHRVEELLEKLVRLVIEVLEELERHPHKENNEHAAMRFVLAVYLIEENLRE

SEQ ID NO: 26 - protein, 109 aa, Artificial Sequence
  Synthetic polypeptide DNCR2_15
EWEEVLKDLEEALERLHDEEIRRLLERVVELLREDTDHSIVYLIEALIFVIEAVERTGDERIHRLLEELVRRIIKVIEELHRHPHKENNEHAAMRFVLAVYLIEENLRE

SEQ ID NO: 27 - protein, 79 aa, Artificial Sequence
  Synthetic polypeptide DNCR2_16
EERELARELERLARERRDHSIEYAREAAEFAREAAERTGDPEVRELARELVRLARNGSDEHALMRIVLAIYLAEENLRE

SEQ ID NO: 28 - protein, 94 aa, Artificial Sequence
  Synthetic polypeptide DNCR2_17
EERELARELERLAKEAAEEVQRNPSSSDVNEALHSIEYAREAAEFAREAAERTGDPEVRELARELVRLARNGSDEHALMRIVLAIYLAEENLRE

SEQ ID NO: 29 - protein, 79 aa, Artificial Sequence
  Synthetic polypeptide DNCR2_18
DEEEIRKRIEEQWRRDTDHSWEYLREVAEFAREILERTGDERIKELVLRILELIENGTDDHAIMRLVLALYLIEENLRE

SEQ ID NO: 30 - protein, 79 aa, Artificial Sequence
  Synthetic polypeptide DNCR2_19
DEEELREEVEHLWREDTDHSWEYLREALEFLREIVERTGDERLRELLKKALELVRHGTDGHAIMRLVLAAYLLEENLRE

SEQ ID NO: 31 - protein, 57 aa, Artificial Sequence
  Synthetic polypeptide DNCR2_20
YAKEAAEFAREAAERTGDPEVRELARELERLARRGSSEHALMRIVLAIYLAEENLRE

SEQ ID NO: 32 - protein, 57 aa, Artificial Sequence
  Synthetic polypeptide DNCR2_21
YAKEVAEFVREVWERTGDERVEELLKKLEELRRNGSDEHALMRLVLAVYLIEENLRE

SEQ ID NO: 33 - protein, 57 aa, Artificial Sequence
  Synthetic polypeptide DNCR2_22
YWKEVAEFLREVLERTGDEEVKKLLEEFEELRRRGSDEHALMRLVLAVYLIEENLRE

SEQ ID NO: 34 - protein, 96 aa, Artificial Sequence
  Synthetic polypeptide DNCR2_23
DEEELERKIEEQVRKLREEVERRSHDSDLNEALHSMEYLREIAEFAREIVERTGDEELRKLLKEILRLIHENPEDVGHAIMRLILALYLLEENLRE

SEQ ID NO: 35 - protein, 164 aa, Artificial Sequence
  Synthetic polypeptide DNCR2_24
DDNEAEKLIREAEEAAKDAEEAAERTGDPEVRELARELVRLAKEAAEEVQRNPSSSDVNEALHSIVYAIEAAIFALEAAERTGDPEVRELARELVRLAVEAAEEVQRNPSSRNVEHALMRIVLAIYLAEENLREAEESGDPEKREKARERVREAVERAEEVQRD

SEQ ID NO: 36 - protein, 135 aa, Artificial Sequence
  Synthetic polypeptide DNCR2_25
EERELARELERLAKEAAEEVQRNPSSSDVNEALHSIEYAREAAEFAREAAERTGDPEVRELARELVRLAVEAAEEVQRNPSSRNVEHALMRIVLAIYLAEENLREAEESGDPEKREKARERVREAVERAEEVQRD

SEQ ID NO: 37 - protein, 108 aa, Artificial Sequence
  Synthetic polypeptide DNCR2_26
DENEAEHSRRYAKEAAEFAREAAERTGDPEVRELARELERLAREAAEEVQRNPSSRNVEHALMRIVLAIYLAEENLREAEESGDPEKREKARERVREAVERAEEVQRD

SEQ ID NO: 38 - protein, 108 aa, Artificial Sequence
  Synthetic polypeptide DNCR2_27
DENELEHIRRYLKEILEFVREVVERTGDEHIRRLLEELERLVKKVIEELKRRPDLHHNEHAFMRLVLAVYLAEENLREAEESGDPEKREKARERVREAVERAEEVQRD

SEQ ID NO: 39 - protein, 108 aa, Artificial Sequence
  Synthetic polypeptide DNCR2_28
DENELEHIRRYLKEVLEFVREILERTGDEEVKKLIEELERLVKKIEEELKRDPRRHHNEHAVMRLVLAVYLLEENLREAEESGDPEKREKARERVREAVERAEEVQRD

SEQ ID NO: 40 - protein, 135 aa, Artificial Sequence
  Synthetic polypeptide DNCR2_29
DEEELHKRVEELWKELHELVRRHSHDSDLNELLHIIEYLREVLEFVREVLERTGDEHIKRLLHELVKRIVETIEELKRNSHHSNNEHAVMRIVLAVYLAEENLREAEESGDPEKREKARERVREAVERAEEVQRD

SEQ ID NO: 41 - protein, 135 aa, Artificial Sequence
  Synthetic polypeptide DNCR2_30
DEEELERRLEELWRRIKERVERHSHDSDLNELLHIIEYLREVVEFVREVVERTGDEHIKRLLLELIREIVEVIEKLERNLHDSNNEHAVMRIVLAVYLAEENLREAEESGDPEKREKARERVREAVERAEEVQRD

SEQ ID NO: 42 - protein, 164 aa, Artificial Sequence
  Synthetic polypeptide DNCR2_31
DDNEAEKLIREAEEVLKDIEEILERLHDEEIIRLVEEVQKILKELLERVHKHPHDSDLNELLHIIFYMMEVLIFVLEVLERTGDEEIRKLVWHIVRIILEILEELRRNPKHSNNEHALMRLLLAIYLLEENLREAEESGDPEKREKARERVREAVERAEEVQRD

SEQ ID NO: 43 - protein, 139 aa, Artificial Sequence
  Synthetic polypeptide DNCR2_32
EAEEAAKDAEEAAERLHDPEVRELARELVRLAKEVDDHSIVYAIEAAIFALEAAERTGDPEVRELARELVRLAVEAAEEVQRNPSSRNVEHALMRIVLAIYLAEENLREAEESGDPEKREKARERVREAVERAEEVQRD

SEQ ID NO: 44 - protein, 139 aa, Artificial Sequence
  Synthetic polypeptide DNCR2_33
EFEEVLKDLEEVVERLHNEEIRRLLERLIELLRRVRDHSFIYLVEAVIFVLEVLERTGDHRVEELLEKLVRLVIEVLEELERHPHKENNEHAAMRFVLAVYLIEENLREAEESGDPEKREKARERVREAVERAEEVQRD

SEQ ID NO: 45 - protein, 139 aa, Artificial Sequence
  Synthetic polypeptide DNCR2_34
EWEEVLKDLEEALERLHDEEIRRLLERVVELLREDTDHSIVYLIEALIFVIEAVERTGDERIHRLLEELVRRIIKVIEELHRHPHKENNEHAAMRFVLAVYLIEENLREAEESGDPEKREKARERVREAVERAEEVQRD

SEQ ID NO: 46 - protein, 174 aa, Artificial Sequence
  Synthetic polypeptide DNCR2-3rep
TSSDEEEARELIEEAKEAAEDAQEAAERTGDPEVRELARELKRLAQEAAEEVQRNPSSSDVNEALHSIVYAIEAAIFALEAAERTGDPEVRELARELVRLAVEAAEEVQRNPSSRNVEHALMRIVLAIYLAEENLREAEESGDPEKREKARERVREAVERAEEVQRDPSGWLNH

SEQ ID NO: 47 - protein, 233 aa, Artificial Sequence
  Synthetic polypeptide GNCR1
DIEKLCKKAEEEAKEAQEKADELRQRHPDSQAAEDAEDLANLAVAAVLTACLLAQEHPNADIAKLCIKAASEAAEAASKAAELAQRHPDSQAARDAIKLASQAARAVILAIMLAAENPNADIAKLCIKAASEAAEAASKAAELAQRHPDSQAARDAIKLASQAAEAVERAIWLAAENPNADIAKKCIKAASEAAEEASKAAEEAQRHPDSQKARDEIKEASQKAEEVKERCKS

SEQ ID NO: 48 - protein, 177 aa, Artificial Sequence
  Synthetic polypeptide GNCR1-3rep
DIEKLCKKAEEEAKEAQEKADELRQRHPDSQAAEDAEDLANLAVAAVLTACLLAQEHPNADIAKLCIKAASEAAEAASKAAELAQRHPDSQAARDAIKLASQAARAVILAIMLAAENPNADIAKKCIKAASEAAEEASKAAEEAQRHPDSQKARDEIKEASQKAEEVERRCWRAAEN

SEQ ID NO: 49 - protein, 110 aa, Artificial Sequence
  Synthetic polypeptide G33
DIEKLCKKAEEEAKEEGNELAVAAVLTACLLAQEWPNSHIAKLCIKAASEAAERGDSQAARAVILAIMLAAENPNNEHAEECIRLAMEAARDGTSEHAERVERECWKHME

SEQ ID NO: 50 - protein, 148 aa, Artificial Sequence
  Synthetic polypeptide G38
DIEKLCKKAEEEAKEVGDNLAVAAVLTACLLAQEHPNADIAKLCIKAASEAAESGDKQAARAVILAIMLAAENPNADIAKLCIKAASEAAEGSKHGWSQAAEAVERAIWLAAENPNADIAKKCIKAASEAAREGNSQKAEEVKERCKS

SEQ ID NO: 51 - protein, 409 aa, Artificial Sequence
  Synthetic polypeptide DNCR2-p65mini
SSDEEEARELIERAKEAAERAQEAAERTGDPRVRELARELKRLAQEAAEEVKRDPSSSDVNEALKLIVEAIEAAVDALEAAERTGDPEVRELARELVRLAVEAAEEVQRNPSSSDVNEALHSIVYAIEAAIFALEAAERTGDPEVRELARELVRLAVEAAEEVQRNPSSRNVEHALMRIVLAIYLAEENLREAEESGDPEKREKARERVREAVERAEEVQRDPSGWLNHSGGGSGVDGSPKKKRKVGSVLPQAPAPAPAPAMVSALAQAPAPVPVLAPGPPQAVAPPAPKPTQAGEGTLSEALLQLQFDDEDLGALLGNSTDPAVFTDLASVDNSEFQQLLNQGIPVAPHTTEPMLMEYPEAITRLVTGAQRPPDPAPAPLGAPGLPNGLLSGDEDFSSIADMDFSALL

SEQ ID NO: 52 - protein, 537 aa, Artificial Sequence
  Synthetic polypeptide DNCR2-p65mini-HSF1
SSDEEEARELIERAKEAAERAQEAAERTGDPRVRELARELKRLAQEAAEEVKRDPSSSDVNEALKLIVEAIEAAVDALEAAERTGDPEVRELARELVRLAVEAAEEVQRNPSSSDVNEALHSIVYAIEAAIFALEAAERTGDPEVRELARELVRLAVEAAEEVQRNPSSRNVEHALMRIVLAIYLAEENLREAEESGDPEKREKARERVREAVERAEEVQRDPSGWLNHSGGGSGVDGSPKKKRKVGSVLPQAPAPAPAPAMVSALAQAPAPVPVLAPGPPQAVAPPAPKPTQAGEGTLSEALLQLQFDDEDLGALLGNSTDPAVFTDLASVDNSEFQQLLNQGIPVAPHTTEPMLMEYPEAITRLVTGAQRPPDPAPAPLGAPGLPNGLLSGDEDFSSIADMDFSALLSGSGGFSVDTSALLDLFSPSVTVPDMSLPDLDSSLASIQELLSPQEPPRPPEAENSSPDSGKQLVHYTAQPLFLLDPGSVDTGSNDLPVLFELGEGSYFSEGDGFAEDPTISLLTGSEPPKAKDPTVS

SEQ ID NO: 53 - protein, 374 aa, Artificial Sequence
  Synthetic polypeptide DNCR2-VP64-RTAmini
SSDEEEARELIERAKEAAERAQEAAERTGDPRVRELARELKRLAQEAAEEVKRDPSSSDVNEALKLIVEAIEAAVDALEAAERTGDPEVRELARELVRLAVEAAEEVQRNPSSSDVNEALHSIVYAIEAAIFALEAAERTGDPEVRELARELVRLAVEAAEEVQRNPSSRNVEHALMRIVLAIYLAEENLREAEESGDPEKREKARERVREAVERAEEVQRDPSGWLNHSGGGSGVDGSPKKKRKVGSDALDDFDLDMLGSDALDDFDLDMLGSDALDDFDLDMLGSDALDDFDLDMLGSGSGSGSGSDLSHPPPRGHLDELTTTLESMTEDLNLDSPLTPELNEILDTFLNDECLLHAMHISTGLSIFDTSLF

SEQ ID NO: 54 - protein, 550 aa, Artificial Sequence
  Synthetic polypeptide DNCR2-VPRmini
SSDEEEARELIERAKEAAERAQEAAERTGDPRVRELARELKRLAQEAAEEVKRDPSSSDVNEALKLIVEAIEAAVDALEAAERTGDPEVRELARELVRLAVEAAEEVQRNPSSSDVNEALHSIVYAIEAAIFALEAAERTGDPEVRELARELVRLAVEAAEEVQRNPSSRNVEHALMRIVLAIYLAEENLREAEESGDPEKREKARERVREAVERAEEVQRDPSGWLNHSGGGSGASDALDDFDLDMLGSDALDDFDLDMLGSDALDDFDLDMLGSDALDDFDLDMLINSRSSGSPKKKRKVGSGGGSGGSGSVLPQAPAPAPAPAMVSALAQAPAPVPVLAPGPPQAVAPPAPKPTQAGEGTLSEALLQLQFDDEDLGALLGNSTDPAVFTDLASVDNSEFQQLLNQGIPVAPHTTEPMLMEYPEAITRLVTGAQRPPDPAPAPLGAPGLPNGLLSGDEDFSSIADMDFSALLSGGGSGGSGSDLSHPPPRGHLDELTTTLESMTEDLNLDSPLTPELNEILDTFLNDECLLHAMHISTGLSIFDTSLF

SEQ ID NO: 55 - protein, 340 aa, Artificial Sequence
  Synthetic polypeptide Gal4-DNCR2
MKLLSSIEQACDICRLKKLKCSKEKPKCAKCLKNNWECRYSPKTKRSPLTRAHLTEVESRLERLEQLFLLIFPREDLDMILKMDSLQDIKALLGTPAAAGLGGGGSAGSGGSSDEEEARELIERAKEAAERAQEAAERTGDPRVRELARELKRLAQEAAEEVKRDPSSSDVNEALKLIVEAIEAAVDALEAAERTGDPEVRELARELVRLAVEAAEEVQRNPSSSDVNEALHSIVYAIEAAIFALEAAERTGDPEVRELARELVRLAVEAAEEVQRNPSSRNVEHALMRIVLAIYLAEENLREAEESGDPEKREKARERVREAVERAEEVQRDPSGWLNH

SEQ ID NO: 56 - protein, 93 aa, Artificial Sequence
  Synthetic polypeptide Gal4DBD
MKLLSSIEQACDICRLKKLKCSKEKPKCAKCLKNNWECRYSPKTKRSPLTRAHLTEVESRLERLEQLFLLIFPREDLDMILKMDSLQDIKALL

SEQ ID NO: 57 - protein, 90 aa, Artificial Sequence
  Synthetic polypeptide ZF1
ARPGERPFQCRICMRNFSRQDRLDRHTRTHTGEKPFQCRICMRNFSQKEHLAGHLRTHTGEKPFQCRICMRNFSRRDNLNRHLKTHLRGS

SEQ ID NO: 58 - protein, 90 aa, Artificial Sequence
  Synthetic polypeptide ZF2
ARPGERPFQCRICMRNFSRNFILQRHTRTHTGEKPFQCRICMRNFSDRANLRRHLRTHTGEKPFQCRICMRNFSRHDQLTRHLKTHLRGS

SEQ ID NO: 59 - protein, 90 aa, Artificial Sequence
  Synthetic polypeptide ZF3
ARPGERPFQCRICMRNFSDKTKLRVHTRTHTGEKPFQCRICMRNFSVRHNLTRHLRTHTGEKPFQCRICMRNFSQSTSLQRHLKTHLRGS

SEQ ID NO: 60 - protein, 90 aa, Artificial Sequence
  Synthetic polypeptide ZFHIV2
TPPHERPFQCRICMRNFSNNAMLVRHTRTHTGEKPFQCRICMRNFSLSQTLQRHLRTHTGEKPFQCRICMRNFSMQGNLSRHLKTHLRGS

SEQ ID NO: 61 - protein, 161 aa, Artificial Sequence
  Synthetic polypeptide p65mini
VLPQAPAPAPAPAMVSALAQAPAPVPVLAPGPPQAVAPPAPKPTQAGEGTLSEALLQLQFDDEDLGALLGNSTDPAVFTDLASVDNSEFQQLLNQGIPVAPHTTEPMLMEYPEAITRLVTGAQRPPDPAPAPLGAPGLPNGLLSGDEDFSSIADMDFSALL

SEQ ID NO: 62 - protein, 289 aa, Artificial Sequence
  Synthetic polypeptide p65mini-HSF1
VLPQAPAPAPAPAMVSALAQAPAPVPVLAPGPPQAVAPPAPKPTQAGEGTLSEALLQLQFDDEDLGALLGNSTDPAVFTDLASVDNSEFQQLLNQGIPVAPHTTEPMLMEYPEAITRLVTGAQRPPDPAPAPLGAPGLPNGLLSGDEDFSSIADMDFSALLSGSGGFSVDTSALLDLFSPSVTVPDMSLPDLDSSLASIQELLSPQEPPRPPEAENSSPDSGKQLVHYTAQPLFLLDPGSVDTGSNDLPVLFELGEGSYFSEGDGFAEDPTISLLTGSEPPKAKDPTVS

SEQ ID NO: 63 - protein, 126 aa, Artificial Sequence
  Synthetic polypeptide VP64-RTAmini
DALDDFDLDMLGSDALDDFDLDMLGSDALDDFDLDMLGSDALDDFDLDMLGSGSGSGSGSDLSHPPPRGHLDELTTTLESMTEDLNLDSPLTPELNEILDTFLNDECLLHAMHISTGLSIFDTSLF

SEQ ID NO: 64 - protein, 313 aa, Artificial Sequence
  Synthetic polypeptide VPRmini
DALDDFDLDMLGSDALDDFDLDMLGSDALDDFDLDMLGSDALDDFDLDMLINSRSSGSPKKKRKVGSGGGSGGSGSVLPQAPAPAPAPAMVSALAQAPAPVPVLAPGPPQAVAPPAPKPTQAGEGTLSEALLQLQFDDEDLGALLGNSTDPAVFTDLASVDNSEFQQLLNQGIPVAPHTTEPMLMEYPEAITRLVTGAQRPPDPAPAPLGAPGLPNGLLSGDEDFSSIADMDFSALLSGGGSGGSGSDLSHPPPRGHLDELTTTLESMTEDLNLDSPLTPELNEILDTFLNDECLLHAMHISTGLSIFDTSLF

SEQ ID NO: 65 - protein, 307 aa, Artificial Sequence
  Synthetic polypeptide Gal4-NS3a
MKLLSSIEQACDICRLKKLKCSKEKPKCAKCLKNNWECRYSPKTKRSPLTRAHLTEVESRLERLEQLFLLIFPREDLDMILKMDSLQDIKALLGTPAAAGLGGGGSAGSGGKKKGSVVIVGRINLSGDTAYAQQTRGEEGCQETSQTGRDKNQVEGEVQIVSTATQTFLATSINGVLWTVYHGAGTRTIASPKGPVTQMYTNVDKDLVGWQAPQGSRSLTPCTCGSSDLYLVTRHADVIPVRRRGDSRGSLLSPRPISYLKGSAGGPLLCPAGHAVGIFRAAVSTRGVAKAVDFIPVESLETTMRSP

SEQ ID NO: 66 - protein, 196 aa, Artificial Sequence
  Synthetic polypeptide NS3aoptS139A
KKKGSVVIVGRINLSGDTAYAQQTRGEEGCQETSQTGRDKNQVEGEVQIVSTATQTFLATSINGVLWTVYHGAGTRTIASPKGPVTQMYTNVDKDLVGWQAPQGSRSLTPCTCGSSDLYLVTRHADVIPVRRRGDSRGSLLSPRPISYLKGSAGGPLLCPAGHAVGIFRAAVSTRGVAKAVDFIPVESLETTMRSP

SEQ ID NO: 67 - protein, 518 aa, Artificial Sequence
  Synthetic polypeptide NS3a-VPRmini
MKKKGSVVIVGRINLSGDTAYAQQTRGEEGCQETSQTGRDKNQVEGEVQIVSTATQTFLATSINGVLWTVYHGAGTRTIASPKGPVTQMYTNVDKDLVGWQAPQGSRSLTPCTCGSSDLYLVTRHADVIPVRRRGDSRGSLLSPRPISYLKGSAGGPLLCPAGHAVGIFRAAVSTRGVAKAVDFIPVESLETTMRSPSGGGSGASDALDDFDLDMLGSDALDDFDLDMLGSDALDDFDLDMLGSDALDDFDLDMLINSRSSGSPKKKRKVGSGGGSGGSGSVLPQAPAPAPAPAMVSALAQAPAPVPVLAPGPPQAVAPPAPKPTQAGEGTLSEALLQLQFDDEDLGALLGNSTDPAVFTDLASVDNSEFQQLLNQGIPVAPHTTEPMLMEYPEAITRLVTGAQRPPDPAPAPLGAPGLPNGLLSGDEDFSSIADMDFSALLSGGGSGGSGSDLSHPPPRGHLDELTTTLESMTEDLNLDSPLTPELNEILDTFLNDECLLHAMHISTGLSIFDTSLF

SEQ ID NO: 68 - protein, 305 aa, Artificial Sequence
  Synthetic polypeptide NS3a-ZF1
KKKGSVVIVGRINLSGDTAYAQQTRGEEGCQETSQTGRDKNQVEGEVQIVSTATQTFLATSINGVLWTVYHGAGTRTIASPKGPVTQMYTNVDKDLVGWQAPQGSRSLTPCTCGSSDLYLVTRHADVIPVRRRGDSRGSLLSPRPISYLKGSAGGPLLCPAGHAVGIFRAAVSTRGVAKAVDFIPVESLETTMRSPGSGAAASGGGGSGGGGSGGARPGERPFQCRICMRNFSRQDRLDRHTRTHTGEKPFQCRICMRNFSQKEHLAGHLRTHTGEKPFQCRICMRNFSRRDNLNRHLKTHLRGS

SEQ ID NO: 69 - protein, 305 aa, Artificial Sequence
  Synthetic polypeptide NS3a-ZF2
KKKGSVVIVGRINLSGDTAYAQQTRGEEGCQETSQTGRDKNQVEGEVQIVSTATQTFLATSINGVLWTVYHGAGTRTIASPKGPVTQMYTNVDKDLVGWQAPQGSRSLTPCTCGSSDLYLVTRHADVIPVRRRGDSRGSLLSPRPISYLKGSAGGPLLCPAGHAVGIFRAAVSTRGVAKAVDFIPVESLETTMRSPGSGAAASGGGGSGGGGSGGARPGERPFQCRICMRNFSRNFILQRHTRTHTGEKPFQCRICMRNFSDRANLRRHLRTHTGEKPFQCRICMRNFSRHDQLTRHLKTHLRGS

SEQ ID NO: 70 - protein, 305 aa, Artificial Sequence
  Synthetic polypeptide NS3a-ZF3
KKKGSVVIVGRINLSGDTAYAQQTRGEEGCQETSQTGRDKNQVEGEVQIVSTATQTFLATSINGVLWTVYHGAGTRTIASPKGPVTQMYTNVDKDLVGWQAPQGSRSLTPCTCGSSDLYLVTRHADVIPVRRRGDSRGSLLSPRPISYLKGSAGGPLLCPAGHAVGIFRAAVSTRGVAKAVDFIPVESLETTMRSPGSGAAASGGGGSGGGGSGGARPGERPFQCRICMRNFSDKTKLRVHTRTHTGEKPFQCRICMRNFSVRHNLTRHLRTHTGEKPFQCRICMRNFSQSTSLQRHLKTHLRGS

SEQ ID NO: 71 - protein, 305 aa, Artificial Sequence
  Synthetic polypeptide NS3a-ZFHIV2
KKKGSVVIVGRINLSGDTAYAQQTRGEEGCQETSQTGRDKNQVEGEVQIVSTATQTFLATSINGVLWTVYHGAGTRTIASPKGPVTQMYTNVDKDLVGWQAPQGSRSLTPCTCGSSDLYLVTRHADVIPVRRRGDSRGSLLSPRPISYLKGSAGGPLLCPAGHAVGIFRAAVSTRGVAKAVDFIPVESLETTMRSPGSGAAASGGGGSGGGGSGGTPPHERPFQCRICMRNFSNNAMLVRHTRTHTGEKPFQCRICMRNFSLSQTLQRHLRTHTGEKPFQCRICMRNFSMQGNLSRHLKTHLRGS

SEQ ID NO: 72 - protein, 338 aa, Artificial Sequence
  Synthetic polypeptide NS3a-LZ-ZF3
KKKGSVVIVGRINLSGDTAYAQQTRGEEGCQETSQTGRDKNQVEGEVQIVSTATQTFLATSINGVLWTVYHGAGTRTIASPKGPVTQMYTNVDKDLVGWQAPQGSRSLTPCTCGSSDLYLVTRHADVIPVRRRGDSRGSLLSPRPISYLKGSAGGPLLCPAGHAVGIFRAAVSTRGVAKAVDFIPVESLETTMRSPGSGAAASGQRMKQLEDKVEELLSKNYHLENEVARLKKLVGDAARSGGGGSGGARPGERPFQCRICMRNFSDKTKLRVHTRTHTGEKPFQCRICMRNFSVRHNLTRHLRTHTGEKPFQCRICMRNFSQSTSLQRHLKTHLRGS

SEQ ID NO: 73 - protein, 338 aa, Artificial Sequence
  Synthetic polypeptide NS3a-LZ-ZFHIV2
KKKGSVVIVGRINLSGDTAYAQQTRGEEGCQETSQTGRDKNQVEGEVQIVSTATQTFLATSINGVLWTVYHGAGTRTIASPKGPVTQMYTNVDKDLVGWQAPQGSRSLTPCTCGSSDLYLVTRHADVIPVRRRGDSRGSLLSPRPISYLKGSAGGPLLCPAGHAVGIFRAAVSTRGVAKAVDFIPVESLETTMRSPGSGAAASGQRMKQLEDKVEELLSKNYHLENEVARLKKLVGDAARSGGGGSGGTPPHERPFQCRICMRNFSNNAMLVRHTRTHTGEKPFQCRICMRNFSLSQTLQRHLRTHTGEKPFQCRICMRNFSMQGNLSRHLKTHLRGS

SEQ ID NO: 74 - protein, 22 aa, Artificial Sequence
  Synthetic peptide P2a
GSGATNFSLLKQAGDVEENPGP

SEQ ID NO: 75 - protein, 20 aa, Artificial Sequence
  Synthetic peptide T2a
GSGEGRGSLLTCGDVEENPG

SEQ ID NO: 76 - protein, 279 aa, Artificial Sequence
  Synthetic polypeptide T2a-RFP-P2a
GSGEGRGSLLTCGDVEENPGPMVSKGEEDNMAIIKEFMRFKVHMEGSVNGHEFEIEGEGEGRPYEGTQTAKLKVTKGGPLPFAWDILSPQFMYGSKAYVKHPADIPDYLKLSFPEGFKWERVMNFEDGGVVTVTQDSSLQDGEFIYKVKLRGTNFPSDGPVMQKKTMGWEASSERMYPEDGALKGEIKQRLKLKDGGHYDAEVKTTYKAKKPVQLPGAYNVNIKLDITSHNEDYTIVEQYERAEGRHSTGGMDELYKGSGATNFSLLKQAGDVEENPGP

SEQ ID NO: 77 - DNA, 25 bp, Artificial Sequence
  Synthetic oligonucleotide YB_TATA
tctagagggtatataatgggggcca

SEQ ID NO: 78 - DNA, 97 bp, Artificial Sequence
  Synthetic oligonucleotide human beta globin (huBG)
gaattcagggctgggcataaaagtcagggcagagccatctattgcttacatttgcttctgacacaactgtgttcactagcaacctcaaacagacacc

SEQ ID NO: 79 - DNA, 120 bp, Artificial Sequence
  Synthetic polynucleotide minIL2
tcgaggacattttgacacccccataatatttttccagaattaacagtataaattgcatctcttgttcaagagttccctatcactctctttaatcactactcacagtaacctcaactcctg

SEQ ID NO: 80 - DNA, 68 bp, Artificial Sequence
  Synthetic oligonucleotide minimalCMV (minCMV)
gaggtaggcgtgtacggtgggcgcctataaaagcagagctcgtttagtgaaccgtcagatcgcctgga

SEQ ID NO: 81 - DNA, 125 bp, Artificial Sequence
  Synthetic polynucleotide TRE3G
acgtataagctttgcttatgtaaaccagggcgcctataaaagagtgctgattttttgagtaaacttcaattccacaacacttttgtcttataccaactttccgtaccacttcctaccctcgtaaa

SEQ ID NO: 82 - DNA, 386 bp, Artificial Sequence
  Synthetic polynucleotide MND
tgaaagaccccacctgtaggtttggcaagctaggatcaaggttaggaacagagagacagcagaatatgggccaaacaggatatctgtggtaagcagttcctgccccggctcagggccaagaacagttggaacagcagaatatgggccaaacaggatatctgtggtaagcagttcctgccccggctcagggccaagaacagatggtccccagatgcggtcccgccctcagcagtttctagagaaccatcagatgtttccagggtgccccaaggacctgaaatgaccctgtgccttatttgaactaaccaatcagttcgcttctcgcttctgttcgcgcgcttctgctccccgagctcaataaaagagcccacaacccctcactcggc

SEQ ID NO: 83 - DNA, 511 bp, Artificial Sequence
  Synthetic polynucleotide hPGK
ggggttggggttgcgccttttccaaggcagccctgggtttgcgcagggacgcggctgctctgggcgtggttccgggaaacgcagcggcgccgaccctgggtctcgcacattcttcacgtccgttcgcagcgtcacccggatcttcgccgctacccttgtgggccccccggcgacgcttcctgctccgcccctaagtcgggaaggttccttgcggttcgcggcgtgccggacgtgacaaacggaagccgcacgtctcactagtaccctcgcagacggacagcgccagggagcaatggcagcgcgccgaccgcgatgggctgtggccaatagcggctgctcagcagggcgcgccgagagcagcggccgggaaggggcggtgcgggaggcggggtgtggggcggtagtgtgggccctgttcctgcccgcgcggtgttccgcattctgcaagcctccggagcgcacgtcggcagtcggctccctcgttgaccgaatcaccgacctctctccccag

SEQ ID NO: 84 - DNA, 105 bp, Artificial Sequence
  Synthetic polynucleotide 5xGal4RE
cggagcactgtcctccgaacgtcggagcactgtcctccgaacgtcggagcactgtcctccgaacgtcggagcactgtcctccgaacggcggagcactgtcctccg

SEQ ID NO: 85 - DNA, 92 bp, Artificial Sequence
  Synthetic oligonucleotide 6xZF1RE
ggagtgaggaacgcgagagtgaggatgagctgagtgaggagactaagagtgaggaacgcgagagtgaggatgagctgagtgaggaaacgctc

SEQ ID NO: 86 - DNA, 92 bp, Artificial Sequence
  Synthetic oligonucleotide 6xZF2RE
ggaggacgtgacgcgagaggacgtgtgagctgaggacgtggactaagaggacgtgacgcgagaggacgtgtgagctgaggacgtgaacgctc

SEQ ID NO: 87 - DNA, 92 bp, Artificial Sequence
  Synthetic oligonucleotide 6xZF3v1RE
tgtagatggagaatttgtagatggaggatcggtagatggaaaattagtagatggacgatcggtagatggataattagtagatggacacgctc

SEQ ID NO: 88 - DNA, 92 bp, Artificial Sequence
  Synthetic oligonucleotide 6xZF3v3RE
tgtagatggagacgctgtagatggaggatctgtagatggaggctttgtagatggagagcctgtagatggaggccgtgtagatggagacgctc

SEQ ID NO: 89 - DNA, 182 bp, Artificial Sequence
  Synthetic polynucleotide 12xZF3veRE
tgtagatggagacgctgtagatggaggatctgtagatggaggctttgtagatggagagcctgtagatggaggccgtgtagatggagcgtatgtagatggagacgctgtagatggaggatctgtagatggaggctttgtagatggagagcctgtagatggaggccgtgtagatggagacgctc

SEQ ID NO: 90 - DNA, 183 bp, Artificial Sequence
  Synthetic polynucleotide 12xZFHIV2RE
agatgctgcaactagagatgctgcaacgcgagatgctgcatgagctgatgctgcagacgctgatgctgcaaaattagatgctgcaagcgtcagatgctgcaactagagatgctgcaacgcgagatgctgcatgagctgatgctgcagacgctgatgctgcaaaattagatgctgcaaacgctc

SEQ ID NO: 91 - DNA, 228 bp, Artificial Sequence
  Synthetic polynucleotide bGHpA
cgactgtgccttctagttgccagccatctgttgtttgcccctcccccgtgccttccttgaccctggaaggtgccactcccactgtcctttcctaataaaatgaggaaattgcatcgcattgtctgagtaggtgtcattctattctggggggtggggtggggcaggacagcaagggggaggattgggaagacaatagcaggcatgctggggatgcggtgggctctatgg

SEQ ID NO: 92 - DNA, 135 bp, Artificial Sequence
  Synthetic polynucleotide SV40pA
gatccagacatgataagatacattgatgagtttggacaaaccaaaactagaatgcagtgaaaaaaatgccttatttgtgaaatttgtgatgctattgccttatttgtaaccattataagctgcaataaacaagtt

SEQ ID NO: 93 - DNA, 61 bp, Artificial Sequence
  Synthetic polynucleotide synpA
gcttagctagaataaaagatcagagctactagacatcttgtgtgtgttggttttttgtgtg

SEQ ID NO: 94 - DNA, 3835 bp, Artificial Sequence
  Synthetic polynucleotide OPL4651_lentiviral_backbone
actagttgtagtcttatgcaatactcttgtagtcttgcaacatggtaacgatgagttagcaacatgccttacaaggagagaaaaagcaccgtgcatgccgattggtggaagtaaggtggtacgatcgtgccttattaggaaggcaacagacgggtctgacatggattggacgaaccactgaattgccgcattgcagagatattgtatttaagtgcctagctcgatacataaacgggactctctggttagaccagatctgagcctgggagctctctggctaactagggaacccactgcttaagcctcaataaagcttgccttgagtgcttcaagtagtgtgtgcccgtctgttgtgtgactctggtaactagagatccctcagacccttttagtcagtgtggaaaatctctagcagtggcgcccgaacagggacttgaaagcgaaagggaaaccagaggagctctctcgacgcaggactcggcttgctgaagcgcgcacggcaagaggcgaggggcggcgactggtgagtacgccaaaaattttgactagcggaggctagaaggagagagatgggtgcgagagcgtcagtattaagcgggggagaattagatcgcgatgggaaaaaattcggttaaggccagggggaaagaaaaaatataaattaaaacatatagtatgggcaagcagggagctagaacgattcgcagttaatcctggcctgttagaaacatcagaaggctgtagacaaatactgggacagctacaaccatcccttcagacaggatcagaagaacttagatcattatataatacagtagcaaccctctattgtgtgcatcaaaggatagagataaaagacaccaaggaagctttagacaagatagaggaagagcaaaacaaaagtaagaccaccgcacagcaaggggaataggagctttgttccttgggttcttgggagcagcaggaagcactatgggcgcagcgtcaatgacgctgacggtacaggccagacaattattgtctggtatagtgcagcagcagaacaatttgctgagggctattgaggcgcaacagcatctgttgcaactcacagtctggggcatcaagcagctccaggcaagaatcctggctgtggaaagatacctaaaggatcaacagctcctggggatttggggttgctctggaaaactcatttgcaccactgctgtgccttggaatgctatttaaaagaaaaggggggattggggggtacagtgcaggggaaagaatagtagacataatagcaacagacatacaaactaaagaattacaaaaacaaattacaaaaattcaaaatttacgcgtgcggccgcggtacctttaagaccaatgacttacaaggcagctgtagatcttagccactttttaaaagaaaaggggggactggaagggctaattcactcccaacgaagataagatctgctttttgcttgtactgggactctctggttagaccagatctgagcctgggagctctctggctaactagggaacccactgcttaagcctcaataaagcttgccttgagtgcttcaatgtgtgtgttggttttttgtgtgtcgctcgagtacatgtaggctaggtggaggctcagtgatgataagtctgcgatggtggatgcatgtgtcatggtcatagctgtttcctgtgtgaaattgttatccgctcagagggcacaatcctattccgcgctatccgacaatctccaagacattaggtggagttcagttcggcgtatggcatatgtcgctggaaagaacatgtgagcaaaaggccagcaaaaggccaggaaccgtaaaaaggccgcgttgctggcgtttttccataggctccgcccccctgacgagcatcacaaaaatcgacgctcaagtcagaggtggcgaaacccgacaggactataaagataccaggcgtttccccctggaagctccctcgtgcgctctcctgttccgaccctgccgcttaccggatacctgtccgcctttctcccttcgggaagcgtggcgctttctcatagctcacgctgtaggtatctcagttcggtgtaggtcgttcgctccaagctgggctgtgtgcacgaaccccccgttcagcccgaccgctgcgccttatccggtaactatcgtcttgagtccaacccggtaagacacgacttatcgccactggcagcagccactggtaacaggattagcagagcgaggtatgtaggcggtgctacagagttcttgaagtggtggcctaactacggctacactagaagaacagtatttggtatctgcgctctgctgaagccagttaccttcggaaaaagagttggtagctcttgatccggcaaacaaaccaccgctggtagcggtggtttttttgtttgcaagcagcagattacgcgcagaaaaaaaggatctcaagaagatcctttgatcttttctacggggtctgacgctctattcaacaaagccgccgtcccgtcaagtcagcgtaaatgggtagggggcttcaaatcgtcctcgtgataccaattcggagcctgcttttttgtacaaacttgttgataatggcaattcaaggatcttcacctagatccttttaaattaaaaatgaagttttaaatcaatctaaagtatatatgagtaaacttggtctgacagttaccaatgcttaatcagtgaggcacctatctcagcgatctgtctatttcgttcatccatagttgcctgactccccgtcgtgtagataactacgatacgggagggcttaccatctggccccagtgctgcaatgataccgcgagagccacgctcaccggctccagatttatcagcaataaaccagccagccggaagggccgagcgcagaagtggtcctgcaactttatccgcctccatccagtctattaattgttgccgggaagctagagtaagtagttcgccagttaatagtttgcgcaacgttgttgccattgctacaggcatcgtggtgtcacgctcgtcgtttggtatggcttcattcagctccggttcccaacgatcaaggcgagttacatgatcccccatgttgtgcaaaaaagcggttagctccttcggtcctccgatcgttgtcagaagtaagttggccgcagtgttatcactcatggttatggcagcactgcataattctcttactgtcatgccatccgtaagatgcttttctgtgactggtgagtactcaaccaagtcattctgagaatagtgtatgcggcgaccgagttgctcttgcccggcgtcaatacgggataataccgcgccacatagcagaactttaaaagtgctcatcattggaaaacgttcttcggggcgaaaactctcaaggatcttaccgctgttgagatccagttcgatgtaacccactcgtgcacccaactgatcttcagcatcttttactttcaccagcgtttctgggtgagcaaaaacaggaaggcaaaatgccgcaaaaaagggaataagggcgacacggaaatgttgaatactcatactcttcctttttcaatattattgaagcatttatcagggttattgtctcatgagcggatacatatttgaatgtatttagaaaaataaacaaataggggttccgcgcacatttccccgaaaagtgccagatacctgaaacaaaacccatcgtacggccaaggaagtctccaataactgtgatccaccacaagcgccagggttttcccagtcacgacgttgtaaaacgacggccagtcatgcataatccgcacgcatctggaataaggaagtgccattccgcctgacct

SEQ ID NO: 95 - DNA, 4202 bp, Artificial Sequence
  Synthetic polynucleotide AI01
cacacaaaaaaccaacacacacaagatgtctagtagctctgatcttttattctagctaagctcagaacagactagtgtcgaagatggagaggccggtgctgatatgcatggcgtgcagaaggcactcatcattcaggaaggtatccagaatttcgttcagttctggtgtcagtggggagtccaaattcagatcctctgtcattgattcgagtgttgtggtcagctcatccaggtgtcctcgtggcggtggatgagacaggtcagagccggagccgccgcttccaccaccggataggagagcggagaagtccatgtcggcaatactactgaagtcttcatcgccgctaaggagcccatttgggaggccgggcgcgccgagtggcgcaggagcaggatcaggtggcctttgggctccggtaacgagtctcgttattgcctcggggtattccatcagcataggctcggtagtgtgaggagccacggggatgccctggtttagtagttgctgaaactcgctattgtccacagaagccagatcagtgaatacagcggggtcggttgagttgcccagaagtgcacccaggtcctcgtcatcaaattgcagttggagcaaggcctcggacaaggttccttcgcccgcttgggtgggctttggtgcaggtggggcaacggcttgagggggtcctggtgccagaaccggaaccggtgcgggtgcttgcgcgagagcagacaccattgcaggtgcaggggccggagccggcgcttgaggaagcacagaacctgaccctccgcttccgcctccactgccaactttgcgctttttcttaggagaccctgagctccgggaattgatcagcatatccaggtcgaaatcgtccagggcgtcagagcccaacatgtccagatcgaaatcatcgagggcatcggaacccagcatgtcgagatcgaagtcatcaagagcgtcgctaccgagcatgtccaagtcaaaatcatccagtgcatcgctagctcctgaacctccaccggaatggttcagccagccgctgggatctctttgcacttcttcggcccgttcgacggcttctctgacccgctcgcgagccttctctcgtttttctggatctccgctctcttctgcctcccgcaggttttcctcggcaaggtagatggccagaacgatgcgcatcaacgcgtgttcgacgttcctagaggatgggttccgttgcacctcctcagcagcctcgactgccagccgaaccaactcccttgccagttctctcacttctgggtcacccgtcctttcagcggcctcgagggcaaagatagcggcctcgatggcgtagacaatagaatgcaaggcctcgttaacatcggaagaagaggggttcctttgcacctcctctgcagcttcgacagccagtctaacaagttctctggccagttcgcgaacctcgggatctccggtgcgctctgccgcctcaagggcgtcaacggcggcttcaattgcctcgacgatgagtttcagggcctcattgacgtcagaggaagatgggtctcttttaacttcctctgcagcctcttgcgctagacgcttcaattccctagcgagttcgcggacccgtggatctcccgtgcgttcagcggcctcttgtgcccgctctgcggcttccttggctctctcgatcagctcccttgcctcttcctcatcggaggaatcgataggtccagggttctcctccacatctccagcctgcttcagcaggctgaagttagtagctccgcttccaggagatctcattgttgtctcaagggactcgacaggaatgaagtctactgccttggcaacgccccgtgtactaactgccgcgcgaaatattccgacggcatggccggcagggcacaacaggggtccgccagcagaacccttgaggtatgatattggtctagggctcagcagactgcctctagaatcccctcgccgacggaccgggatcacatcagcgtgccgtgtcacgaggtacaaatcagagctaccgcaggtgcatggagtcagagatcgagagccttgcggcgcctgccaaccgaccaagtccttgtccacattggtgtacatttgagtgacgggtcctttgggtgatgcaatggtgcgagttccggcgccgtgatagacagtccagagaactccgttgatggacgtggccagaaaagtctgggtcgcagtagacacgatttgaacctctccctccacttggttcttgtcgcggcctgtctggctggtttcctgacatccttcctcgcccctagtttgttgagcatatgcggtgtctccactcagattaattcgcccaactataaccacgctgcctttcttctttccgccagagcctgcggagccgcctccacctaggcccgcagctgcaggagtacccaacaatgcttttatatcctgtaaagaatccattttcaaaatcatgtcaaggtcttctcgaggaaaaatcagtagaaatagctgttccagtctttctagccttgattccacttctgtcagatgtgccctagtcagcggagaccttttggttttgggagagtagcgacactcccagttgttcttcagacacttggcgcacttcggtttttctttggagcacttgagctttttaagtcggcaaatatcgcatgcttgttcgatagaagacagtagcttcatggtggcctgcagggactcgtaagaggttctgatcgcgccgagtgaggggttgtgggctcttttattgagctcggggagcagaagcgcgcgaacagaagcgagaagcgaactgattggttagttcaaataaggcacagggtcatttcaggtccttggggcaccctggaaacatctgatggttctctagaaactgctgagggcgggaccgcatctggggaccatctgttcttggccctgagccggggcaggaactgcttaccacagatatcctgtttggcccatattctgctgttccaactgttcttggccctgagccggggcaggaactgcttaccacagatatcctgtttggcccatattctgctgtctctctgttcctaaccttgatcctagcttgccaaacctacaggtggggtctttcacccgggaacttgtttattgcagcttataatggttacaaataaggcaatagcatcacaaatttcacaaataaggcatttttttcactgcattctagttttggtttgtccaaactcatcaatgtatcttatcatgtctggatcgtcgactcacttgtacagctcgtccatgccgagagtgatcccggcggcggtcacgaactccagcaggaccatgtgatcgcgcttctcgttggggtctttgctcagggcggactgggtgctcaggtagtggttgtcgggcagcagcacggggccgtcgccgatgggggtgttctgctggtagtggtcggcgagctgcacgctgccgtcctcgatgttgtggcggatcttgaagttcaccttgatgccgttcttctgcttgtcggccatgatatagacgttgtggctgttgtagttgtactccagcttgtgccccaggatgttgccgtcctccttgaagtcgatgcccttcagctcgatgcggttcaccagggtgtcgccctcgaacttcacctcggcgcgggtcttgtagttgccgtcgtccttgaagaagatggtgcgctcctggacgtagccttcgggcatggcggacttgaagaagtcgtgctgcttcatgtggtcggggtagcggctgaagcactgcacgccgtaggtcagggtggtcacgagggtgggccagggcacgggcagcttgccggtggtgcagatgaacttcagggtcagcttgccgtaggtggcatcgccctcgccctcgccggacacgctgaacttgtggccgtttacgtcgccgtccagctcgaccaggatgggcaccaccccggtgaacagctcctcgcccttgctcaccatggtggcggatccttcgtccaggcgatctgacggttcactaaacgagctctgcttttataggcgcccaccgtacacgcctacctccacgtgcggaggacagtgctccgccgttcggaggacagtgctccgacgttcggaggacagtgctccgacgttcggaggacagtgctccgacgttcggaggacagtgctccgcctgttcgaac

SEQ ID NO: 96 - DNA, 4136 bp, Artificial Sequence
  Synthetic polynucleotide AIO2
caggcggagcactgtcctccgaacgtcggagcactgtcctccgaacgtcggagcactgtcctccgaacgtcggagcactgtcctccgaacggcggagcactgtcctccgcacgtggaggtaggcgtgtacggtgggcgcctataaaagcagagctcgtttagtgaaccgtcagatcgcctggacgaaggatccgccaccatggtgagcaagggcgaggagctgttcaccggggtggtgcccatcctggtcgagctggacggcgacgtaaacggccacaagttcagcgtgtccggcgagggcgagggcgatgccacctacggcaagctgaccctgaagttcatctgcaccaccggcaagctgcccgtgccctggcccaccctcgtgaccaccctgacctacggcgtgcagtgcttcagccgctaccccgaccacatgaagcagcacgacttcttcaagtccgccatgcccgaaggctacgtccaggagcgcaccatcttcttcaaggacgacggcaactacaagacccgcgccgaggtgaagttcgagggcgacaccctggtgaaccgcatcgagctgaagggcatcgacttcaaggaggacggcaacatcctggggcacaagctggagtacaactacaacagccacaacgtctatatcatggccgacaagcagaagaacggcatcaaggtgaacttcaagatccgccacaacatcgaggacggcagcgtgcagctcgccgaccactaccagcagaacacccccatcggcgacggccccgtgctgctgcccgacaaccactacctgagcacccagtccgccctgagcaaagaccccaacgagaagcgcgatcacatggtcctgctggagttcgtgaccgccgccgggatcactctcggcatggacgagctgtacaagtgagtcgacgatccagacatgataagatacattgatgagtttggacaaaccaaaactagaatgcagtgaaaaaaatgccttatttgtgaaatttgtgatgctattgccttatttgtaaccattataagctgcaataaacaagttcccgggtgaaagaccccacctgtaggtttggcaagctaggatcaaggttaggaacagagagacagcagaatatgggccaaacaggatatctgtggtaagcagttcctgccccggctcagggccaagaacagttggaacagcagaatatgggccaaacaggatatctgtggtaagcagttcctgccccggctcagggccaagaacagatggtccccagatgcggtcccgccctcagcagtttctagagaaccatcagatgtttccagggtgccccaaggacctgaaatgaccctgtgccttatttgaactaaccaatcagttcgcttctcgcttctgttcgcgcgcttctgctccccgagctcaataaaagagcccacaacccctcactcggcgcgatcagaacctcttacgagtccctgcaggccaccatgaagctactgtcttctatcgaacaagcatgcgatatttgccgacttaaaaagctcaagtgctccaaagaaaaaccgaagtgcgccaagtgtctgaagaacaactgggagtgtcgctactctcccaaaaccaaaaggtctccgctgactagggcacatctgacagaagtggaatcaaggctagaaagactggaacagctatttctactgatttttcctcgagaagaccttgacatgattttgaaaatggattctttacaggatataaaagcattgttgggtactcctgcagctgcgggcctaggtggaggcggctccgcaggctctggcggaaagaagaaaggcagcgtggttatagttgggcgaattaatctgagtggagacaccgcatatgctcaacaaactaggggcgaggaaggatgtcaggaaaccagccagacaggccgcgacaagaaccaagtggagggagaggttcaaatcgtgtctactgcgacccagacttttctggccacgtccatcaacggagttctctggactgtctatcacggcgccggaactcgcaccattgcatcacccaaaggacccgtcactcaaatgtacaccaatgtggacaaggacttggtcggttggcaggcgccgcaaggctctcgatctctgactccatgcacctgcggtagctctgatttgtacctcgtgacacggcacgctgatgtgatcccggtccgtcggcgaggggattctagaggcagtctgctgagccctagaccaatatcatacctcaagggttctgctggcggacccctgttgtgccctgccggccatgccgtcggaatatttcgcgcggcagttagtacacggggcgttgccaaggcagtagacttcattcctgtcgagtcccttgagacaacaatgagatctcctggaagcggagctactaacttcagcctgctgaagcaggctggagatgtggaggagaaccctggacctatcgattcctccgatgaggaagaggcaagggagctgatcgagagagccaaggaagccgcagagcgggcacaagaggccgctgaacgcacgggagatccacgggtccgcgaactcgctagggaattgaagcgtctagcgcaagaggctgcagaggaagttaaaagagacccatcttcctctgacgtcaatgaggccctgaaactcatcgtcgaggcaattgaagccgccgttgacgcccttgaggcggcagagcgcaccggagatcccgaggttcgcgaactggccagagaacttgttagactggctgtcgaagctgcagaggaggtgcaaaggaacccctcttcttccgatgttaacgaggccttgcattctattgtctacgccatcgaggccgctatctttgccctcgaggccgctgaaaggacgggtgacccagaagtgagagaactggcaagggagttggttcggctggcagtcgaggctgctgaggaggtgcaacggaacccatcctctaggaacgtcgaacacgcgttgatgcgcatcgttctggccatctaccttgccgaggaaaacctgcgggaggcagaagagagcggagatccagaaaaacgagagaaggctcgcgagcgggtcagagaagccgtcgaacgggccgaagaagtgcaaagagatcccagcggctggctgaaccattccggtggaggttcaggagctagcgatgcactggatgattttgacttggacatgctcggtagcgacgctcttgatgacttcgatctcgacatgctgggttccgatgccctcgatgatttcgatctggacatgttgggctctgacgccctggacgatttcgacctggatatgctgatcaattcccggagctcagggtctcctaagaaaaagcgcaaagttggcagtggaggcggaagcggagggtcaggttctgtgcttcctcaagcgccggctccggcccctgcacctgcaatggtgtctgctctcgcgcaagcacccgcaccggttccggttctggcaccaggaccccctcaagccgttgccccacctgcaccaaagcccacccaagcgggcgaaggaaccttgtccgaggccttgctccaactgcaatttgatgacgaggacctgggtgcacttctgggcaactcaaccgaccccgctgtattcactgatctggcttctgtggacaatagcgagtttcagcaactactaaaccagggcatccccgtggctcctcacactaccgagcctatgctgatggaataccccgaggcaataacgagactcgttaccggagcccaaaggccacctgatcctgctcctgcgccactcggcgcgcccggcctcccaaatgggctccttagcggcgatgaagacttcagtagtattgccgacatggacttctccgctctcctatccggtggtggaagcggcggctccggctctgacctgtctcatccaccgccacgaggacacctggatgagctgaccacaacactcgaatcaatgacagaggatctgaatttggactccccactgacaccagaactgaacgaaattctggataccttcctgaatgatgagtgccttctgcacgccatgcatatcagcaccggcctctccatcttcgacactagtctgttctgata

SEQ ID NO: 97 - DNA, 4171 bp, Artificial Sequence
  Synthetic polynucleotide AIO3
aacttgtttattgcagcttataatggttacaaataaggcaatagcatcacaaatttcacaaataaggcatttttttcactgcattctagttttggtttgtccaaactcatcaatgtatcttatcatgtctggatcgtcgactcacttgtacagctcgtccatgccgagagtgatcccggcggcggtcacgaactccagcaggaccatgtgatcgcgcttctcgttggggtctttgctcagggcggactgggtgctcaggtagtggttgtcgggcagcagcacggggccgtcgccgatgggggtgttctgctggtagtggtcggcgagctgcacgctgccgtcctcgatgttgtggcggatcttgaagttcaccttgatgccgttcttctgcttgtcggccatgatatagacgttgtggctgttgtagttgtactccagcttgtgccccaggatgttgccgtcctccttgaagtcgatgcccttcagctcgatgcggttcaccagggtgtcgccctcgaacttcacctcggcgcgggtcttgtagttgccgtcgtccttgaagaagatggtgcgctcctggacgtagccttcgggcatggcggacttgaagaagtcgtgctgcttcatgtggtcggggtagcggctgaagcactgcacgccgtaggtcagggtggtcacgagggtgggccagggcacgggcagcttgccggtggtgcagatgaacttcagggtcagcttgccgtaggtggcatcgccctcgccctcgccggacacgctgaacttgtggccgtttacgtcgccgtccagctcgaccaggatgggcaccaccccggtgaacagctcctcgcccttgctcaccatggtggcggatccttcgtccaggcgatctgacggttcactaaacgagctctgcttttataggcgcccaccgtacacgcctacctccacgtgcggaggacagtgctccgccgttcggaggacagtgctccgacgttcggaggacagtgctccgacgttcggaggacagtgctccgacgttcggaggacagtgctccgcctgcccgggtgaaagaccccacctgtaggtttggcaagctaggatcaaggttaggaacagagagacagcagaatatgggccaaacaggatatctgtggtaagcagttcctgccccggctcagggccaagaacagttggaacagcagaatatgggccaaacaggatatctgtggtaagcagttcctgccccggctcagggccaagaacagatggtccccagatgcggtcccgccctcagcagtttctagagaaccatcagatgtttccagggtgccccaaggacctgaaatgaccctgtgccttatttgaactaaccaatcagttcgcttctcgcttctgttcgcgcgcttctgctccccgagctcaataaaagagcccacaacccctcactcggcgcgatcagaacctcttacgagtccctgcaggccaccatgaagctactgtcttctatcgaacaagcatgcgatatttgccgacttaaaaagctcaagtgctccaaagaaaaaccgaagtgcgccaagtgtctgaagaacaactgggagtgtcgctactctcccaaaaccaaaaggtctccgctgactagggcacatctgacagaagtggaatcaaggctagaaagactggaacagctatttctactgatttttcctcgagaagaccttgacatgattttgaaaatggattctttacaggatataaaagcattgttgggtactcctgcagctgcgggcctaggtggaggcggctccgcaggctctggcggaaagaagaaaggcagcgtggttatagttgggcgaattaatctgagtggagacaccgcatatgctcaacaaactaggggcgaggaaggatgtcaggaaaccagccagacaggccgcgacaagaaccaagtggagggagaggttcaaatcgtgtctactgcgacccagacttttctggccacgtccatcaacggagttctctggactgtctatcacggcgccggaactcgcaccattgcatcacccaaaggacccgtcactcaaatgtacaccaatgtggacaaggacttggtcggttggcaggcgccgcaaggctctcgatctctgactccatgcacctgcggtagctctgatttgtacctcgtgacacggcacgctgatgtgatcccggtccgtcggcgaggggattctagaggcagtctgctgagccctagaccaatatcatacctcaagggttctgctggcggacccctgttgtgccctgccggccatgccgtcggaatatttcgcgcggcagttagtacacggggcgttgccaaggcagtagacttcattcctgtcgagtcccttgagacaacaatgagatctcctggaagcggagctactaacttcagcctgctgaagcaggctggagatgtggaggagaaccctggacctatcgattcctccgatgaggaagaggcaagggagctgatcgagagagccaaggaagccgcagagcgggcacaagaggccgctgaacgcacgggagatccacgggtccgcgaactcgctagggaattgaagcgtctagcgcaagaggctgcagaggaagttaaaagagacccatcttcctctgacgtcaatgaggccctgaaactcatcgtcgaggcaattgaagccgccgttgacgcccttgaggcggcagagcgcaccggagatcccgaggttcgcgaactggccagagaacttgttagactggctgtcgaagctgcagaggaggtgcaaaggaacccctcttcttccgatgttaacgaggccttgcattctattgtctacgccatcgaggccgctatctttgccctcgaggccgctgaaaggacgggtgacccagaagtgagagaactggcaagggagttggttcggctggcagtcgaggctgctgaggaggtgcaacggaacccatcctctaggaacgtcgaacacgcgttgatgcgcatcgttctggccatctaccttgccgaggaaaacctgcgggaggcagaagagagcggagatccagaaaaacgagagaaggctcgcgagcgggtcagagaagccgtcgaacgggccgaagaagtgcaaagagatcccagcggctggctgaaccattccggtggaggttcaggagctagcgatgcactggatgattttgacttggacatgctcggtagcgacgctcttgatgacttcgatctcgacatgctgggttccgatgccctcgatgatttcgatctggacatgttgggctctgacgccctggacgatttcgacctggatatgctgatcaattcccggagctcagggtctcctaagaaaaagcgcaaagttggcagtggaggcggaagcggagggtcaggttctgtgcttcctcaagcgccggctccggcccctgcacctgcaatggtgtctgctctcgcgcaagcacccgcaccggttccggttctggcaccaggaccccctcaagccgttgccccacctgcaccaaagcccacccaagcgggcgaaggaaccttgtccgaggccttgctccaactgcaatttgatgacgaggacctgggtgcacttctgggcaactcaaccgaccccgctgtattcactgatctggcttctgtggacaatagcgagtttcagcaactactaaaccagggcatccccgtggctcctcacactaccgagcctatgctgatggaataccccgaggcaataacgagactcgttaccggagcccaaaggccacctgatcctgctcctgcgccactcggcgcgcccggcctcccaaatgggctccttagcggcgatgaagacttcagtagtattgccgacatggacttctccgctctcctatccggtggtggaagcggcggctccggctctgacctgtctcatccaccgccacgaggacacctggatgagctgaccacaacactcgaatcaatgacagaggatctgaatttggactccccactgacaccagaactgaacgaaattctggataccttcctgaatgatgagtgccttctgcacgccatgcatatcagcaccggcctctccatcttcgacactagtctgttctgataattcgaactttaagaccaatgacttacaaggcagc

SEQ ID NO: 98 - DNA, 2304 bp, Artificial Sequence
  Synthetic polynucleotide IPV1
ttatcaattaagcttgtgccccagtttgctagggaggtcgcagtatctggccactgccacctcgtgctgctcgacgtaggtctcgttgttggcctccttgattctttccagtctgtagtccacatagtagacgccaggcatcttgaggttcttagcgggtttcttggatctatatgtggtcttggcgtttgcgatcagatggctcccacccacgagcttcagggccatgtcgtttctgccttccagtccgccgtcagctgggtacagcgtttcggtgaaggcctcccagccgagtgttttcttctgcatcacagggccgttggatgtgaagttcacccctctgatcttgacgttgtagatgaggcagccgtcctggaggctggtgtcctgggtagcggtcagcacgcccccgtcttcgtatgtggtgactctctcccatgtgaagccctcagggaaggactgcttgaagaagtcggggatgccctgggtgtggttgatgaaggtcttgctgccgtagaggaagctagtagccaggatgtcgaaggcgaaggggagagggccgccctcgaccaccttgattctcatggtctgggtgccctcgtagggcttgccttcgccctcggatgtgcacttgaagtgatggttgtccacggtgccctccatgtacagcttcatgtgcatgttctccttaatcagctcttcgcccttagacaccatggtggcctgcagggactcgtaagaggttctgatcgcgccgagtgaggggttgtgggctcttttattgagctcggggagcagaagcgcgcgaacagaagcgagaagcgaactgattggttagttcaaataaggcacagggtcatttcaggtccttggggcaccctggaaacatctgatggttctctagaaactgctgagggcgggaccgcatctggggaccatctgttcttggccctgagccggggcaggaactgcttaccacagatatcctgtttggcccatattctgctgttccaactgttcttggccctgagccggggcaggaactgcttaccacagatatcctgtttggcccatattctgctgtctctctgttcctaaccttgatcctagcttgccaaacctacaggtggggtctttcacccgggccatagagcccaccgcatccccagcatgcctgctattgtcttcccaatcctcccccttgctgtcctgccccaccccaccccccagaatagaatgacacctactcagacaatgcgatgcaatttcctcattttattaggaaaggacagtgggagtggcaccttccagggtcaaggaaggcacgggggaggggcaaacaacagatggctggcaactagaaggcacagtcgctatgtcgactcatttgtacagttcatccattccgtgtgtgattcctgccgccgtaacgaattcgaggaggaccatgtggtcccgtttctcgttggggtccttgctcagcacgctttgcgttgacagatagtggttatccggcaacaagactggaccatctcctatcggagtgttttgttggtaatgatctgccaactgcacgctaccgtcttcaacattatggcgtatcttaaaattggctttgatgccatttttctgcttatcagcggtgatgtaaacgttgtgggaattaaagttgtattccaatttatgacccaagatgttgccgtcttctttgaagtcgattcctttcaattcgatccggtttacaagggtatcgccttcaaatttgacctccgctcttgtcttataggtgccatcgtctttaaagcttattgttcgttcctgcacgtatccctcaggcatggctgatttaaaaaagtcgtgtcgtttcatatggtcaggataccgagagaagcattggaccccgtaagtgagcgtcgtcacaagagttggccacggcactggcagcttgccggtggtgcaaatgaacttcaaggtcagtttcccgttagtcgcatcaccctcaccctcgccgcgcacggagaacttgtgaccattgacatctccgtccaactctaccagaatcggaacaaccccggtaaacagctcttctcctttgctcatggtggcggatccttcgtccaggcgatctgacggttcactaaacgagctctgcttttataggcgcccaccgtacacgcctacctccacgtgcggaggacagtgctccgccgttcggaggacagtgctccgacgttcggaggacagtgctccgacgttcggaggacagtgctccgacgttcggaggacagtgctccgcctgttcga

SEQ ID NO: 99 - DNA, 2397 bp, Artificial Sequence
  Synthetic polynucleotide IPV2
cacacaaaaaaccaacacacacaagatgtctagtagctctgatcttttattctagctaagcttatcaattaagcttgtgccccagtttgctagggaggtcgcagtatctggccactgccacctcgtgctgctcgacgtaggtctcgttgttggcctccttgattctttccagtctgtagtccacatagtagacgccaggcatcttgaggttcttagcgggtttcttggatctatatgtggtcttggcgtttgcgatcagatggctcccacccacgagcttcagggccatgtcgtttctgccttccagtccgccgtcagctgggtacagcgtttcggtgaaggcctcccagccgagtgttttcttctgcatcacagggccgttggatgtgaagttcacccctctgatcttgacgttgtagatgaggcagccgtcctggaggctggtgtcctgggtagcggtcagcacgcccccgtcttcgtatgtggtgactctctcccatgtgaagccctcagggaaggactgcttgaagaagtcggggatgccctgggtgtggttgatgaaggtcttgctgccgtagaggaagctagtagccaggatgtcgaaggcgaaggggagagggccgccctcgaccaccttgattctcatggtctgggtgccctcgtagggcttgccttcgccctcggatgtgcacttgaagtgatggttgtccacggtgccctccatgtacagcttcatgtgcatgttctccttaatcagctcttcgcccttagacaccatggtggcctgcagggactcgtaagaggttctgatcgcgccgagtgaggggttgtgggctcttttattgagctcggggagcagaagcgcgcgaacagaagcgagaagcgaactgattggttagttcaaataaggcacagggtcatttcaggtccttggggcaccctggaaacatctgatggttctctagaaactgctgagggcgggaccgcatctggggaccatctgttcttggccctgagccggggcaggaactgcttaccacagatatcctgtttggcccatattctgctgttccaactgttcttggccctgagccggggcaggaactgcttaccacagatatcctgtttggcccatattctgctgtctctctgttcctaaccttgatcctagcttgccaaacctacaggtggggtctttcacccgggccatagagcccaccgcatccccagcatgcctgctattgtcttcccaatcctcccccttgctgtcctgccccaccccaccccccagaatagaatgacacctactcagacaatgcgatgcaatttcctcattttattaggaaaggacagtgggagtggcaccttccagggtcaaggaaggcacgggggaggggcaaacaacagatggctggcaactagaaggcacagtcgctatgtcgactcacttgtacagctcgtccatgccgagagtgatcccggcggcggtcacgaactccagcaggaccatgtgatcgcgcttctcgttggggtctttgctcagggcggactgggtgctcaggtagtggttgtcgggcagcagcacggggccgtcgccgatgggggtgttctgctggtagtggtcggcgagctgcacgctgccgtcctcgatgttgtggcggatcttgaagttcaccttgatgccgttcttctgcttgtcggccatgatatagacgttgtggctgttgtagttgtactccagcttgtgccccaggatgttgccgtcctccttgaagtcgatgcccttcagctcgatgcggttcaccagggtgtcgccctcgaacttcacctcggcgcgggtcttgtagttgccgtcgtccttgaagaagatggtgcgctcctggacgtagccttcgggcatggcggacttgaagaagtcgtgctgcttcatgtggtcggggtagcggctgaagcactgcacgccgtaggtcagggtggtcacgagggtgggccagggcacgggcagcttgccggtggtgcagatgaacttcagggtcagcttgccgtaggtggcatcgccctcgccctcgccggacacgctgaacttgtggccgtttacgtcgccgtccagctcgaccaggatgggcaccaccccggtgaacagctcctcgcccttgctcaccatggtggcggatccttcgtccaggcgatctgacggttcactaaacgagctctgcttttataggcgcccaccgtacacgcctacctccacgtgcggaggacagtgctccgccgttcggaggacagtgctccgacgttcggaggacagtgctccgacgttcggaggacagtgctccgacgttcggaggacagtgctccgcctgttcgaactttaagaccaatgacttacaaggcagc

SEQ ID NO: 100 - DNA, 2354 bp, Artificial Sequence
  Synthetic polynucleotide IPV3
cacacaaaaaaccaacacacacaagatgtctagtagctctgatcttttattctagctaagcttatcaattaagcttgtgccccagtttgctagggaggtcgcagtatctggccactgccacctcgtgctgctcgacgtaggtctcgttgttggcctccttgattctttccagtctgtagtccacatagtagacgccaggcatcttgaggttcttagcgggtttcttggatctatatgtggtcttggcgtttgcgatcagatggctcccacccacgagcttcagggccatgtcgtttctgccttccagtccgccgtcagctgggtacagcgtttcggtgaaggcctcccagccgagtgttttcttctgcatcacagggccgttggatgtgaagttcacccctctgatcttgacgttgtagatgaggcagccgtcctggaggctggtgtcctgggtagcggtcagcacgcccccgtcttcgtatgtggtgactctctcccatgtgaagccctcagggaaggactgcttgaagaagtcggggatgccctgggtgtggttgatgaaggtcttgctgccgtagaggaagctagtagccaggatgtcgaaggcgaaggggagagggccgccctcgaccaccttgattctcatggtctgggtgccctcgtagggcttgccttcgccctcggatgtgcacttgaagtgatggttgtccacggtgccctccatgtacagcttcatgtgcatgttctccttaatcagctcttcgcccttagacaccatggtggcctgcagggactcgtaagaggttctgatcgcgccgagtgaggggttgtgggctcttttattgagctcggggagcagaagcgcgcgaacagaagcgagaagcgaactgattggttagttcaaataaggcacagggtcatttcaggtccttggggcaccctggaaacatctgatggttctctagaaactgctgagggcgggaccgcatctggggaccatctgttcttggccctgagccggggcaggaactgcttaccacagatatcctgtttggcccatattctgctgttccaactgttcttggccctgagccggggcaggaactgcttaccacagatatcctgtttggcccatattctgctgtctctctgttcctaaccttgatcctagcttgccaaacctacaggtggggtctttcacccgggccatagagcccaccgcatccccagcatgcctgctattgtcttcccaatcctcccccttgctgtcctgccccaccccaccccccagaatagaatgacacctactcagacaatgcgatgcaatttcctcattttattaggaaaggacagtgggagtggcaccttccagggtcaaggaaggcacgggggaggggcaaacaacagatggctggcaactagaaggcacagtcgctatgtcgactcacttgtacagctcgtccatgccgagagtgatcccggcggcggtcacgaactccagcaggaccatgtgatcgcgcttctcgttggggtctttgctcagggcggactgggtgctcaggtagtggttgtcgggcagcagcacggggccgtcgccgatgggggtgttctgctggtagtggtcggcgagctgcacgctgccgtcctcgatgttgtggcggatcttgaagttcaccttgatgccgttcttctgcttgtcggccatgatatagacgttgtggctgttgtagttgtactccagcttgtgccccaggatgttgccgtcctccttgaagtcgatgcccttcagctcgatgcggttcaccagggtgtcgccctcgaacttcacctcggcgcgggtcttgtagttgccgtcgtccttgaagaagatggtgcgctcctggacgtagccttcgggcatggcggacttgaagaagtcgtgctgcttcatgtggtcggggtagcggctgaagcactgcacgccgtaggtcagggtggtcacgagggtgggccagggcacgggcagcttgccggtggtgcagatgaacttcagggtcagcttgccgtaggtggcatcgccctcgccctcgccggacacgctgaacttgtggccgtttacgtcgccgtccagctcgaccaggatgggcaccaccccggtgaacagctcctcgcccttgctcaccatggtggcggatccttcgtggcccccattatataccctctagacacgtgcggaggacagtgctccgccgttcggaggacagtgctccgacgttcggaggacagtgctccgacgttcggaggacagtgctccgacgttcggaggacagtgctccgcctgttcgaactttaagaccaatgacttacaaggcagc

SEQ ID NO: 101 - DNA, 2421 bp, Artificial Sequence
  Synthetic polynucleotide IPV4
cacacaaaaaaccaacacacacaagatgtctagtagctctgatcttttattctagctaagcttatcaattaagcttgtgccccagtttgctagggaggtcgcagtatctggccactgccacctcgtgctgctcgacgtaggtctcgttgttggcctccttgattctttccagtctgtagtccacatagtagacgccaggcatcttgaggttcttagcgggtttcttggatctatatgtggtcttggcgtttgcgatcagatggctcccacccacgagcttcagggccatgtcgtttctgccttccagtccgccgtcagctgggtacagcgtttcggtgaaggcctcccagccgagtgttttcttctgcatcacagggccgttggatgtgaagttcacccctctgatcttgacgttgtagatgaggcagccgtcctggaggctggtgtcctgggtagcggtcagcacgcccccgtcttcgtatgtggtgactctctcccatgtgaagccctcagggaaggactgcttgaagaagtcggggatgccctgggtgtggttgatgaaggtcttgctgccgtagaggaagctagtagccaggatgtcgaaggcgaaggggagagggccgccctcgaccaccttgattctcatggtctgggtgccctcgtagggcttgccttcgccctcggatgtgcacttgaagtgatggttgtccacggtgccctccatgtacagcttcatgtgcatgttctccttaatcagctcttcgcccttagacaccatggtggcctgcagggactcgtaagaggttctgatcgcgccgagtgaggggttgtgggctcttttattgagctcggggagcagaagcgcgcgaacagaagcgagaagcgaactgattggttagttcaaataaggcacagggtcatttcaggtccttggggcaccctggaaacatctgatggttctctagaaactgctgagggcgggaccgcatctggggaccatctgttcttggccctgagccggggcaggaactgcttaccacagatatcctgtttggcccatattctgctgttccaactgttcttggccctgagccggggcaggaactgcttaccacagatatcctgtttggcccatattctgctgtctctctgttcctaaccttgatcctagcttgccaaacctacaggtggggtctttcacccgggccatagagcccaccgcatccccagcatgcctgctattgtcttcccaatcctcccccttgctgtcctgccccaccccaccccccagaatagaatgacacctactcagacaatgcgatgcaatttcctcattttattaggaaaggacagtgggagtggcaccttccagggtcaaggaaggcacgggggaggggcaaacaacagatggctggcaactagaaggcacagtcgctatgtcgactcacttgtacagctcgtccatgccgagagtgatcccggcggcggtcacgaactccagcaggaccatgtgatcgcgcttctcgttggggtctttgctcagggcggactgggtgctcaggtagtggttgtcgggcagcagcacggggccgtcgccgatgggggtgttctgctggtagtggtcggcgagctgcacgctgccgtcctcgatgttgtggcggatcttgaagttcaccttgatgccgttcttctgcttgtcggccatgatatagacgttgtggctgttgtagttgtactccagcttgtgccccaggatgttgccgtcctccttgaagtcgatgcccttcagctcgatgcggttcaccagggtgtcgccctcgaacttcacctcggcgcgggtcttgtagttgccgtcgtccttgaagaagatggtgcgctcctggacgtagccttcgggcatggcggacttgaagaagtcgtgctgcttcatgtggtcggggtagcggctgaagcactgcacgccgtaggtcagggtggtcacgagggtgggccagggcacgggcagcttgccggtggtgcagatgaacttcagggtcagcttgccgtaggtggcatcgccctcgccctcgccggacacgctgaacttgtggccgtttacgtcgccgtccagctcgaccaggatgggcaccaccccggtgaacagctcctcgcccttgctcaccatggtggcggatccttcgcaggagttgaggttactgtgagtagtgattaaagagagtgatagggaactcttgaacaagagatgcaatttatactgttaattctggaaaaatattatgggggtgtcaaaatgtcctcgacacgtgcggaggacagtgctccgccgttcggaggacagtgctccgacgttcggaggacagtgctccgacgttcggaggacagtgctccgacgttcggaggacagtgctccgcctgttcgaa

SEQ ID NO: 102 - DNA, 2439 bp, Artificial Sequence
  Synthetic polynucleotide IPV5
cacacaaaaaaccaacacacacaagatgtctagtagctctgatcttttattctagctaagcttatcaattaagcttgtgccccagtttgctagggaggtcgcagtatctggccactgccacctcgtgctgctcgacgtaggtctcgttgttggcctccttgattctttccagtctgtagtccacatagtagacgccaggcatcttgaggttcttagcgggtttcttggatctatatgtggtcttggcgtttgcgatcagatggctcccacccacgagcttcagggccatgtcgtttctgccttccagtccgccgtcagctgggtacagcgtttcggtgaaggcctcccagccgagtgttttcttctgcatcacagggccgttggatgtgaagttcacccctctgatcttgacgttgtagatgaggcagccgtcctggaggctggtgtcctgggtagcggtcagcacgcccccgtcttcgtatgtggtgactctctcccatgtgaagccctcagggaaggactgcttgaagaagtcggggatgccctgggtgtggttgatgaaggtcttgctgccgtagaggaagctagtagccaggatgtcgaaggcgaaggggagagggccgccctcgaccaccttgattctcatggtctgggtgccctcgtagggcttgccttcgccctcggatgtgcacttgaagtgatggttgtccacggtgccctccatgtacagcttcatgtgcatgttctccttaatcagctcttcgcccttagacaccatggtggcctgcagggactcgtaagaggttctgatcgcgccgagtgaggggttgtgggctcttttattgagctcggggagcagaagcgcgcgaacagaagcgagaagcgaactgattggttagttcaaataaggcacagggtcatttcaggtccttggggcaccctggaaacatctgatggttctctagaaactgctgagggcgggaccgcatctggggaccatctgttcttggccctgagccggggcaggaactgcttaccacagatatcctgtttggcccatattctgctgttccaactgttcttggccctgagccggggcaggaactgcttaccacagatatcctgtttggcccatattctgctgtctctctgttcctaaccttgatcctagcttgccaaacctacaggtggggtctttcacccgggccatagagcccaccgcatccccagcatgcctgctattgtcttcccaatcctcccccttgctgtcctgccccaccccaccccccagaatagaatgacacctactcagacaatgcgatgcaatttcctcattttattaggaaaggacagtgggagtggcaccttccagggtcaaggaaggcacgggggaggggcaaacaacagatggctggcaactagaaggcacagtcgctatgtcgactcacttgtacagctcgtccatgccgagagtgatcccggcggcggtcacgaactccagcaggaccatgtgatcgcgcttctcgttggggtctttgctcagggcggactgggtgctcaggtagtggttgtcgggcagcagcacggggccgtcgccgatgggggtgttctgctggtagtggtcggcgagctgcacgctgccgtcctcgatgttgtggcggatcttgaagttcaccttgatgccgttcttctgcttgtcggccatgatatagacgttgtggctgttgtagttgtactccagcttgtgccccaggatgttgccgtcctccttgaagtcgatgcccttcagctcgatgcggttcaccagggtgtcgccctcgaacttcacctcggcgcgggtcttgtagttgccgtcgtccttgaagaagatggtgcgctcctggacgtagccttcgggcatggcggacttgaagaagtcgtgctgcttcatgtggtcggggtagcggctgaagcactgcacgccgtaggtcagggtggtcacgagggtgggccagggcacgggcagcttgccggtggtgcagatgaacttcagggtcagcttgccgtaggtggcatcgccctcgccctcgccggacacgctgaacttgtggccgtttacgtcgccgtccagctcgaccaggatgggcaccaccccggtgaacagctcctcgcccttgctcaccatggtggcggatccttcgggtgtctgtttgaggttgctagtgaacacagttgtgtcagaagcaaatgtaagcaatagatggctctgccctgacttttatgcccagccctgaattccacgtgcggaggacagtgctccgccgttcggaggacagtgctccgacgttcggaggacagtgctccgacgttcggaggacagtgctccgacgttcggaggacagtgctccgcctgttcgaactttaagaccaatgacttacaaggcagctgtagatcttagc

SEQ ID NO: 103 - DNA, 2467 bp, Artificial Sequence
  Synthetic polynucleotide IPV6
cacacaaaaaaccaacacacacaagatgtctagtagctctgatcttttattctagctaagcttatcaattaagcttgtgccccagtttgctagggaggtcgcagtatctggccactgccacctcgtgctgctcgacgtaggtctcgttgttggcctccttgattctttccagtctgtagtccacatagtagacgccaggcatcttgaggttcttagcgggtttcttggatctatatgtggtcttggcgtttgcgatcagatggctcccacccacgagcttcagggccatgtcgtttctgccttccagtccgccgtcagctgggtacagcgtttcggtgaaggcctcccagccgagtgttttcttctgcatcacagggccgttggatgtgaagttcacccctctgatcttgacgttgtagatgaggcagccgtcctggaggctggtgtcctgggtagcggtcagcacgcccccgtcttcgtatgtggtgactctctcccatgtgaagccctcagggaaggactgcttgaagaagtcggggatgccctgggtgtggttgatgaaggtcttgctgccgtagaggaagctagtagccaggatgtcgaaggcgaaggggagagggccgccctcgaccaccttgattctcatggtctgggtgccctcgtagggcttgccttcgccctcggatgtgcacttgaagtgatggttgtccacggtgccctccatgtacagcttcatgtgcatgttctccttaatcagctcttcgcccttagacaccatggtggcctgcagggactcgtaagaggttctgatcgcgccgagtgaggggttgtgggctcttttattgagctcggggagcagaagcgcgcgaacagaagcgagaagcgaactgattggttagttcaaataaggcacagggtcatttcaggtccttggggcaccctggaaacatctgatggttctctagaaactgctgagggcgggaccgcatctggggaccatctgttcttggccctgagccggggcaggaactgcttaccacagatatcctgtttggcccatattctgctgttccaactgttcttggccctgagccggggcaggaactgcttaccacagatatcctgtttggcccatattctgctgtctctctgttcctaaccttgatcctagcttgccaaacctacaggtggggtctttcacccgggccatagagcccaccgcatccccagcatgcctgctattgtcttcccaatcctcccccttgctgtcctgccccaccccaccccccagaatagaatgacacctactcagacaatgcgatgcaatttcctcattttattaggaaaggacagtgggagtggcaccttccagggtcaaggaaggcacgggggaggggcaaacaacagatggctggcaactagaaggcacagtcgctatgtcgactcacttgtacagctcgtccatgccgagagtgatcccggcggcggtcacgaactccagcaggaccatgtgatcgcgcttctcgttggggtctttgctcagggcggactgggtgctcaggtagtggttgtcgggcagcagcacggggccgtcgccgatgggggtgttctgctggtagtggtcggcgagctgcacgctgccgtcctcgatgttgtggcggatcttgaagttcaccttgatgccgttcttctgcttgtcggccatgatatagacgttgtggctgttgtagttgtactccagcttgtgccccaggatgttgccgtcctccttgaagtcgatgcccttcagctcgatgcggttcaccagggtgtcgccctcgaacttcacctcggcgcgggtcttgtagttgccgtcgtccttgaagaagatggtgcgctcctggacgtagccttcgggcatggcggacttgaagaagtcgtgctgcttcatgtggtcggggtagcggctgaagcactgcacgccgtaggtcagggtggtcacgagggtgggccagggcacgggcagcttgccggtggtgcagatgaacttcagggtcagcttgccgtaggtggcatcgccctcgccctcgccggacacgctgaacttgtggccgtttacgtcgccgtccagctcgaccaggatgggcaccaccccggtgaacagctcctcgcccttgctcaccatggtggcggatccttcgtttacgagggtaggaagtggtacggaaagttggtataagacaaaagtgttgtggaattgaagtttactcaaaaaatcagcactcttttataggcgccctggtttacataagcaaagcttatacgtcacgtgcggaggacagtgctccgccgttcggaggacagtgctccgacgttcggaggacagtgctccgacgttcggaggacagtgctccgacgttcggaggacagtgctccgcctgttcgaactttaagaccaatgacttacaaggcagctgtagatcttagc

SEQ ID NO: 104 - DNA, 2559 bp, Artificial Sequence
  Synthetic polynucleotide IPV7
cacacaaaaaaccaacacacacaagatgtctagtagctctgatcttttattctagctaagcttatcaattaagcttgtgccccagtttgctagggaggtcgcagtatctggccactgccacctcgtgctgctcgacgtaggtctcgttgttggcctccttgattctttccagtctgtagtccacatagtagacgccaggcatcttgaggttcttagcgggtttcttggatctatatgtggtcttggcgtttgcgatcagatggctcccacccacgagcttcagggccatgtcgtttctgccttccagtccgccgtcagctgggtacagcgtttcggtgaaggcctcccagccgagtgttttcttctgcatcacagggccgttggatgtgaagttcacccctctgatcttgacgttgtagatgaggcagccgtcctggaggctggtgtcctgggtagcggtcagcacgcccccgtcttcgtatgtggtgactctctcccatgtgaagccctcagggaaggactgcttgaagaagtcggggatgccctgggtgtggttgatgaaggtcttgctgccgtagaggaagctagtagccaggatgtcgaaggcgaaggggagagggccgccctcgaccaccttgattctcatggtctgggtgccctcgtagggcttgccttcgccctcggatgtgcacttgaagtgatggttgtccacggtgccctccatgtacagcttcatgtgcatgttctccttaatcagctcttcgcccttagacaccatggtggcctgcaggggtaattcgatgatccccctggggagagaggtcggtgattcggtcaacgagggagccgactgccgacgtgcgctccggaggcttgcagaatgcggaacaccgcgcgggcaggaacagggcccacactaccgccccacaccccgcctcccgcaccgccccttcccggccgctgctctcggcgcgccctgctgagcagccgctattggccacagcccatcgcggtcggcgcgctgccattgctccctggcgctgtccgtctgcgagggtactagtgagacgtgcggcttccgtttgtcacgtccggcacgccgcgaaccgcaaggaaccttcccgacttaggggcggagcaggaagcgtcgccggggggcccacaagggtagcggcgaagatccgggtgacgctgcgaacggacgtgaagaatgtgcgagacccagggtcggcgccgctgcgtttcccggaaccacgcccagagcagccgcgtccctgcgcaaacccagggctgccttggaaaaggcgcaaccccaacccccccgggccatagagcccaccgcatccccagcatgcctgctattgtcttcccaatcctcccccttgctgtcctgccccaccccaccccccagaatagaatgacacctactcagacaatgcgatgcaatttcctcattttattaggaaaggacagtgggagtggcaccttccagggtcaaggaaggcacgggggaggggcaaacaacagatggctggcaactagaaggcacagtcgctatgtcgactcacttgtacagctcgtccatgccgagagtgatcccggcggcggtcacgaactccagcaggaccatgtgatcgcgcttctcgttggggtctttgctcagggcggactgggtgctcaggtagtggttgtcgggcagcagcacggggccgtcgccgatgggggtgttctgctggtagtggtcggcgagctgcacgctgccgtcctcgatgttgtggcggatcttgaagttcaccttgatgccgttcttctgcttgtcggccatgatatagacgttgtggctgttgtagttgtactccagcttgtgccccaggatgttgccgtcctccttgaagtcgatgcccttcagctcgatgcggttcaccagggtgtcgccctcgaacttcacctcggcgcgggtcttgtagttgccgtcgtccttgaagaagatggtgcgctcctggacgtagccttcgggcatggcggacttgaagaagtcgtgctgcttcatgtggtcggggtagcggctgaagcactgcacgccgtaggtcagggtggtcacgagggtgggccagggcacgggcagcttgccggtggtgcagatgaacttcagggtcagcttgccgtaggtggcatcgccctcgccctcgccggacacgctgaacttgtggccgtttacgtcgccgtccagctcgaccaggatgggcaccaccccggtgaacagctcctcgcccttgctcaccatggtggcggatccttcgggtgtctgtttgaggttgctagtgaacacagttgtgtcagaagcaaatgtaagcaatagatggctctgccctgacttttatgcccagccctgaattccacgtgcggaggacagtgctccgccgttcggaggacagtgctccgacgttcggaggacagtgctccgacgttcggaggacagtgctccgacgttcggaggacagtgctccgcctgttcgaactttaagaccaatgacttacaaggcagctgtagatcttagc

SEQ ID NO: 105 - DNA, 2214 bp, Artificial Sequence
  Synthetic polynucleotide IPV8
ttcgaacaggcggagcactgtcctccgaacgtcggagcactgtcctccgaacgtcggagcactgtcctccgaacgtcggagcactgtcctccgaacggcggagcactgtcctccgcacgtgtctagagggtatataatgggggccacgaaggatccgccaccatggtgagcaagggcgaggagctgttcaccggggtggtgcccatcctggtcgagctggacggcgacgtaaacggccacaagttcagcgtgtccggcgagggcgagggcgatgccacctacggcaagctgaccctgaagttcatctgcaccaccggcaagctgcccgtgccctggcccaccctcgtgaccaccctgacctacggcgtgcagtgcttcagccgctaccccgaccacatgaagcagcacgacttcttcaagtccgccatgcccgaaggctacgtccaggagcgcaccatcttcttcaaggacgacggcaactacaagacccgcgccgaggtgaagttcgagggcgacaccctggtgaaccgcatcgagctgaagggcatcgacttcaaggaggacggcaacatcctggggcacaagctggagtacaactacaacagccacaacgtctatatcatggccgacaagcagaagaacggcatcaaggtgaacttcaagatccgccacaacatcgaggacggcagcgtgcagctcgccgaccactaccagcagaacacccccatcggcgacggccccgtgctgctgcccgacaaccactacctgagcacccagtccgccctgagcaaagaccccaacgagaagcgcgatcacatggtcctgctggagttcgtgaccgccgccgggatcactctcggcatggacgagctgtacaagtgagtcgacgatccagacatgataagatacattgatgagtttggacaaaccaaaactagaatgcagtgaaaaaaatgccttatttgtgaaatttgtgatgctattgccttatttgtaaccattataagctgcaataaacaagttcccgggtgaaagaccccacctgtaggtttggcaagctaggatcaaggttaggaacagagagacagcagaatatgggccaaacaggatatctgtggtaagcagttcctgccccggctcagggccaagaacagttggaacagcagaatatgggccaaacaggatatctgtggtaagcagttcctgccccggctcagggccaagaacagatggtccccagatgcggtcccgccctcagcagtttctagagaaccatcagatgtttccagggtgccccaaggacctgaaatgaccctgtgccttatttgaactaaccaatcagttcgcttctcgcttctgttcgcgcgcttctgctccccgagctcaataaaagagcccacaacccctcactcggcgcgatcagaacctcttacgagtccctgcaggccaccatggtgtctaagggcgaagagctgattaaggagaacatgcacatgaagctgtacatggagggcaccgtggacaaccatcacttcaagtgcacatccgagggcgaaggcaagccctacgagggcacccagaccatgagaatcaaggtggtcgagggcggccctctccccttcgccttcgacatcctggctactagcttcctctacggcagcaagaccttcatcaaccacacccagggcatccccgacttcttcaagcagtccttccctgagggcttcacatgggagagagtcaccacatacgaagacgggggcgtgctgaccgctacccaggacaccagcctccaggacggctgcctcatctacaacgtcaagatcagaggggtgaacttcacatccaacggccctgtgatgcagaagaaaacactcggctgggaggccttcaccgaaacgctgtacccagctgacggcggactggaaggcagaaacgacatggccctgaagctcgtgggtgggagccatctgatcgcaaacgccaagaccacatatagatccaagaaacccgctaagaacctcaagatgcctggcgtctactatgtggactacagactggaaagaatcaaggaggccaacaacgagacctacgtcgagcagcacgaggtggcagtggccagatactgcgacctccctagcaaactggggcacaagcttaattgataaggtacctttaagaccaatgacttacaaggcagctgtagatcttagc

SEQ ID NO: 106 - DNA, 2210 bp, Artificial Sequence
  Synthetic polynucleotide IPV9
ttcgaaagatgctgcaactagagatgctgcaacgcgagatgctgcatgagctgatgctgcagacgctgatgctgcaaaattagatgctgcaaacgctctctagagggtatataatgggggccactagtctactaccagagctcgaaggatccgccaccatggtgagcaagggcgaggagctgttcaccggggtggtgcccatcctggtcgagctggacggcgacgtaaacggccacaagttcagcgtgtccggcgagggcgagggcgatgccacctacggcaagctgaccctgaagttcatctgcaccaccggcaagctgcccgtgccctggcccaccctcgtgaccaccctgacctacggcgtgcagtgcttcagccgctaccccgaccacatgaagcagcacgacttcttcaagtccgccatgcccgaaggctacgtccaggagcgcaccatcttcttcaaggacgacggcaactacaagacccgcgccgaggtgaagttcgagggcgacaccctggtgaaccgcatcgagctgaagggcatcgacttcaaggaggacggcaacatcctggggcacaagctggagtacaactacaacagccacaacgtctatatcatggccgacaagcagaagaacggcatcaaggtgaacttcaagatccgccacaacatcgaggacggcagcgtgcagctcgccgaccactaccagcagaacacccccatcggcgacggccccgtgctgctgcccgacaaccactacctgagcacccagtccgccctgagcaaagaccccaacgagaagcgcgatcacatggtcctgctggagttcgtgaccgccgccgggatcactctcggcatggacgagctgtacaagtgagtcgacgatccagacatgataagatacattgatgagtttggacaaaccaaaactagaatgcagtgaaaaaaatgccttatttgtgaaatttgtgatgctattgccttatttgtaaccattataagctgcaataaacaagttcccgggtgaaagaccccacctgtaggtttggcaagctaggatcaaggttaggaacagagagacagcagaatatgggccaaacaggatatctgtggtaagcagttcctgccccggctcagggccaagaacagttggaacagcagaatatgggccaaacaggatatctgtggtaagcagttcctgccccggctcagggccaagaacagatggtccccagatgcggtcccgccctcagcagtttctagagaaccatcagatgtttccagggtgccccaaggacctgaaatgaccctgtgccttatttgaactaaccaatcagttcgcttctcgcttctgttcgcgcgcttctgctccccgagctcaataaaagagcccacaacccctcactcggcgcgatcagaacctcttacgagtccctgcaggccaccatggtgtctaagggcgaagagctgattaaggagaacatgcacatgaagctgtacatggagggcaccgtggacaaccatcacttcaagtgcacatccgagggcgaaggcaagccctacgagggcacccagaccatgagaatcaaggtggtcgagggcggccctctccccttcgccttcgacatcctggctactagcttcctctacggcagcaagaccttcatcaaccacacccagggcatccccgacttcttcaagcagtccttccctgagggcttcacatgggagagagtcaccacatacgaagacgggggcgtgctgaccgctacccaggacaccagcctccaggacggctgcctcatctacaacgtcaagatcagaggggtgaacttcacatccaacggccctgtgatgcagaagaaaacactcggctgggaggccttcaccgaaacgctgtacccagctgacggcggactggaaggcagaaacgacatggccctgaagctcgtgggtgggagccatctgatcgcaaacgccaagaccacatatagatccaagaaacccgctaagaacctcaagatgcctggcgtctactatgtggactacagactggaaagaatcaaggaggccaacaacgagacctacgtcgagcagcacgaggtggcagtggccagatactgcgacctccctagcaaactggggcacaagcttaattgataaggtacctttaagaccaatgacttacaaggcagctgtagatcttagc

SEQ ID NO: 107 - DNA, 2210 bp, Artificial Sequence
  Synthetic polynucleotide IPV10
ttcgaaggagtgaggaacgcgagagtgaggatgagctgagtgaggagactaagagtgaggaacgcgagagtgaggatgagctgagtgaggaaacgctctctagagggtatataatgggggccactagtctactaccagagctcgaaggatccgccaccatggtgagcaagggcgaggagctgttcaccggggtggtgcccatcctggtcgagctggacggcgacgtaaacggccacaagttcagcgtgtccggcgagggcgagggcgatgccacctacggcaagctgaccctgaagttcatctgcaccaccggcaagctgcccgtgccctggcccaccctcgtgaccaccctgacctacggcgtgcagtgcttcagccgctaccccgaccacatgaagcagcacgacttcttcaagtccgccatgcccgaaggctacgtccaggagcgcaccatcttcttcaaggacgacggcaactacaagacccgcgccgaggtgaagttcgagggcgacaccctggtgaaccgcatcgagctgaagggcatcgacttcaaggaggacggcaacatcctggggcacaagctggagtacaactacaacagccacaacgtctatatcatggccgacaagcagaagaacggcatcaaggtgaacttcaagatccgccacaacatcgaggacggcagcgtgcagctcgccgaccactaccagcagaacacccccatcggcgacggccccgtgctgctgcccgacaaccactacctgagcacccagtccgccctgagcaaagaccccaacgagaagcgcgatcacatggtcctgctggagttcgtgaccgccgccgggatcactctcggcatggacgagctgtacaagtgagtcgacgatccagacatgataagatacattgatgagtttggacaaaccaaaactagaatgcagtgaaaaaaatgccttatttgtgaaatttgtgatgctattgccttatttgtaaccattataagctgcaataaacaagttcccgggtgaaagaccccacctgtaggtttggcaagctaggatcaaggttaggaacagagagacagcagaatatgggccaaacaggatatctgtggtaagcagttcctgccccggctcagggccaagaacagttggaacagcagaatatgggccaaacaggatatctgtggtaagcagttcctgccccggctcagggccaagaacagatggtccccagatgcggtcccgccctcagcagtttctagagaaccatcagatgtttccagggtgccccaaggacctgaaatgaccctgtgccttatttgaactaaccaatcagttcgcttctcgcttctgttcgcgcgcttctgctccccgagctcaataaaagagcccacaacccctcactcggcgcgatcagaacctcttacgagtccctgcaggccaccatggtgtctaagggcgaagagctgattaaggagaacatgcacatgaagctgtacatggagggcaccgtggacaaccatcacttcaagtgcacatccgagggcgaaggcaagccctacgagggcacccagaccatgagaatcaaggtggtcgagggcggccctctccccttcgccttcgacatcctggctactagcttcctctacggcagcaagaccttcatcaaccacacccagggcatccccgacttcttcaagcagtccttccctgagggcttcacatgggagagagtcaccacatacgaagacgggggcgtgctgaccgctacccaggacaccagcctccaggacggctgcctcatctacaacgtcaagatcagaggggtgaacttcacatccaacggccctgtgatgcagaagaaaacactcggctgggaggccttcaccgaaacgctgtacccagctgacggcggactggaaggcagaaacgacatggccctgaagctcgtgggtgggagccatctgatcgcaaacgccaagaccacatatagatccaagaaacccgctaagaacctcaagatgcctggcgtctactatgtggactacagactggaaagaatcaaggaggccaacaacgagacctacgtcgagcagcacgaggtggcagtggccagatactgcgacctccctagcaaactggggcacaagcttaattgataaggtacctttaagaccaatgacttacaaggcagctgtagatcttagc

SEQ ID NO: 108 - DNA, 2210 bp, Artificial Sequence
  Synthetic polynucleotide IPV11
ttcgaaggaggacgtgacgcgagaggacgtgtgagctgaggacgtggactaagaggacgtgacgcgagaggacgtgtgagctgaggacgtgaacgctctctagagggtatataatgggggccactagtctactaccagagctcgaaggatccgccaccatggtgagcaagggcgaggagctgttcaccggggtggtgcccatcctggtcgagctggacggcgacgtaaacggccacaagttcagcgtgtccggcgagggcgagggcgatgccacctacggcaagctgaccctgaagttcatctgcaccaccggcaagctgcccgtgccctggcccaccctcgtgaccaccctgacctacggcgtgcagtgcttcagccgctaccccgaccacatgaagcagcacgacttcttcaagtccgccatgcccgaaggctacgtccaggagcgcaccatcttcttcaaggacgacggcaactacaagacccgcgccgaggtgaagttcgagggcgacaccctggtgaaccgcatcgagctgaagggcatcgacttcaaggaggacggcaacatcctggggcacaagctggagtacaactacaacagccacaacgtctatatcatggccgacaagcagaagaacggcatcaaggtgaacttcaagatccgccacaacatcgaggacggcagcgtgcagctcgccgaccactaccagcagaacacccccatcggcgacggccccgtgctgctgcccgacaaccactacctgagcacccagtccgccctgagcaaagaccccaacgagaagcgcgatcacatggtcctgctggagttcgtgaccgccgccgggatcactctcggcatggacgagctgtacaagtgagtcgacgatccagacatgataagatacattgatgagtttggacaaaccaaaactagaatgcagtgaaaaaaatgccttatttgtgaaatttgtgatgctattgccttatttgtaaccattataagctgcaataaacaagttcccgggtgaaagaccccacctgtaggtttggcaagctaggatcaaggttaggaacagagagacagcagaatatgggccaaacaggatatctgtggtaagcagttcctgccccggctcagggccaagaacagttggaacagcagaatatgggccaaacaggatatctgtggtaagcagttcctgccccggctcagggccaagaacagatggtccccagatgcggtcccgccctcagcagtttctagagaaccatcagatgtttccagggtgccccaaggacctgaaatgaccctgtgccttatttgaactaaccaatcagttcgcttctcgcttctgttcgcgcgcttctgctccccgagctcaataaaagagcccacaacccctcactcggcgcgatcagaacctcttacgagtccctgcaggccaccatggtgtctaagggcgaagagctgattaaggagaacatgcacatgaagctgtacatggagggcaccgtggacaaccatcacttcaagtgcacatccgagggcgaaggcaagccctacgagggcacccagaccatgagaatcaaggtggtcgagggcggccctctccccttcgccttcgacatcctggctactagcttcctctacggcagcaagaccttcatcaaccacacccagggcatccccgacttcttcaagcagtccttccctgagggcttcacatgggagagagtcaccacatacgaagacgggggcgtgctgaccgctacccaggacaccagcctccaggacggctgcctcatctacaacgtcaagatcagaggggtgaacttcacatccaacggccctgtgatgcagaagaaaacactcggctgggaggccttcaccgaaacgctgtacccagctgacggcggactggaaggcagaaacgacatggccctgaagctcgtgggtgggagccatctgatcgcaaacgccaagaccacatatagatccaagaaacccgctaagaacctcaagatgcctggcgtctactatgtggactacagactggaaagaatcaaggaggccaacaacgagacctacgtcgagcagcacgaggtggcagtggccagatactgcgacctccctagcaaactggggcacaagcttaattgataaggtacctttaagaccaatgacttacaaggcagctgtagatcttagc

SEQ ID NO: 109 - DNA, 2210 bp, Artificial Sequence
  Synthetic polynucleotide IPV12
ttcgaatgtagatggagaatttgtagatggaggatcggtagatggaaaattagtagatggacgatcggtagatggataattagtagatggacacgctctctagagggtatataatgggggccactagtctactaccagagctcgaaggatccgccaccatggtgagcaagggcgaggagctgttcaccggggtggtgcccatcctggtcgagctggacggcgacgtaaacggccacaagttcagcgtgtccggcgagggcgagggcgatgccacctacggcaagctgaccctgaagttcatctgcaccaccggcaagctgcccgtgccctggcccaccctcgtgaccaccctgacctacggcgtgcagtgcttcagccgctaccccgaccacatgaagcagcacgacttcttcaagtccgccatgcccgaaggctacgtccaggagcgcaccatcttcttcaaggacgacggcaactacaagacccgcgccgaggtgaagttcgagggcgacaccctggtgaaccgcatcgagctgaagggcatcgacttcaaggaggacggcaacatcctggggcacaagctggagtacaactacaacagccacaacgtctatatcatggccgacaagcagaagaacggcatcaaggtgaacttcaagatccgccacaacatcgaggacggcagcgtgcagctcgccgaccactaccagcagaacacccccatcggcgacggccccgtgctgctgcccgacaaccactacctgagcacccagtccgccctgagcaaagaccccaacgagaagcgcgatcacatggtcctgctggagttcgtgaccgccgccgggatcactctcggcatggacgagctgtacaagtgagtcgacgatccagacatgataagatacattgatgagtttggacaaaccaaaactagaatgcagtgaaaaaaatgccttatttgtgaaatttgtgatgctattgccttatttgtaaccattataagctgcaataaacaagttcccgggtgaaagaccccacctgtaggtttggcaagctaggatcaaggttaggaacagagagacagcagaatatgggccaaacaggatatctgtggtaagcagttcctgccccggctcagggccaagaacagttggaacagcagaatatgggccaaacaggatatctgtggtaagcagttcctgccccggctcagggccaagaacagatggtccccagatgcggtcccgccctcagcagtttctagagaaccatcagatgtttccagggtgccccaaggacctgaaatgaccctgtgccttatttgaactaaccaatcagttcgcttctcgcttctgttcgcgcgcttctgctccccgagctcaataaaagagcccacaacccctcactcggcgcgatcagaacctcttacgagtccctgcaggccaccatggtgtctaagggcgaagagctgattaaggagaacatgcacatgaagctgtacatggagggcaccgtggacaaccatcacttcaagtgcacatccgagggcgaaggcaagccctacgagggcacccagaccatgagaatcaaggtggtcgagggcggccctctccccttcgccttcgacatcctggctactagcttcctctacggcagcaagaccttcatcaaccacacccagggcatccccgacttcttcaagcagtccttccctgagggcttcacatgggagagagtcaccacatacgaagacgggggcgtgctgaccgctacccaggacaccagcctccaggacggctgcctcatctacaacgtcaagatcagaggggtgaacttcacatccaacggccctgtgatgcagaagaaaacactcggctgggaggccttcaccgaaacgctgtacccagctgacggcggactggaaggcagaaacgacatggccctgaagctcgtgggtgggagccatctgatcgcaaacgccaagaccacatatagatccaagaaacccgctaagaacctcaagatgcctggcgtctactatgtggactacagactggaaagaatcaaggaggccaacaacgagacctacgtcgagcagcacgaggtggcagtggccagatactgcgacctccctagcaaactggggcacaagcttaattgataaggtacctttaagaccaatgacttacaaggcagctgtagatcttagc

SEQ ID NO: 110 - DNA, 2210 bp, Artificial Sequence
  Synthetic polynucleotide IPV13
ttcgaatgtagatggagacgctgtagatggaggatctgtagatggaggctttgtagatggagagcctgtagatggaggccgtgtagatggagacgctctctagagggtatataatgggggccactagtctactaccagagctcgaaggatccgccaccatggtgagcaagggcgaggagctgttcaccggggtggtgcccatcctggtcgagctggacggcgacgtaaacggccacaagttcagcgtgtccggcgagggcgagggcgatgccacctacggcaagctgaccctgaagttcatctgcaccaccggcaagctgcccgtgccctggcccaccctcgtgaccaccctgacctacggcgtgcagtgcttcagccgctaccccgaccacatgaagcagcacgacttcttcaagtccgccatgcccgaaggctacgtccaggagcgcaccatcttcttcaaggacgacggcaactacaagacccgcgccgaggtgaagttcgagggcgacaccctggtgaaccgcatcgagctgaagggcatcgacttcaaggaggacggcaacatcctggggcacaagctggagtacaactacaacagccacaacgtctatatcatggccgacaagcagaagaacggcatcaaggtgaacttcaagatccgccacaacatcgaggacggcagcgtgcagctcgccgaccactaccagcagaacacccccatcggcgacggccccgtgctgctgcccgacaaccactacctgagcacccagtccgccctgagcaaagaccccaacgagaagcgcgatcacatggtcctgctggagttcgtgaccgccgccgggatcactctcggcatggacgagctgtacaagtgagtcgacgatccagacatgataagatacattgatgagtttggacaaaccaaaactagaatgcagtgaaaaaaatgccttatttgtgaaatttgtgatgctattgccttatttgtaaccattataagctgcaataaacaagttcccgggtgaaagaccccacctgtaggtttggcaagctaggatcaaggttaggaacagagagacagcagaatatgggccaaacaggatatctgtggtaagcagttcctgccccggctcagggccaagaacagttggaacagcagaatatgggccaaacaggatatctgtggtaagcagttcctgccccggctcagggccaagaacagatggtccccagatgcggtcccgccctcagcagtttctagagaaccatcagatgtttccagggtgccccaaggacctgaaatgaccctgtgccttatttgaactaaccaatcagttcgcttctcgcttctgttcgcgcgcttctgctccccgagctcaataaaagagcccacaacccctcactcggcgcgatcagaacctcttacgagtccctgcaggccaccatggtgtctaagggcgaagagctgattaaggagaacatgcacatgaagctgtacatggagggcaccgtggacaaccatcacttcaagtgcacatccgagggcgaaggcaagccctacgagggcacccagaccatgagaatcaaggtggtcgagggcggccctctccccttcgccttcgacatcctggctactagcttcctctacggcagcaagaccttcatcaaccacacccagggcatccccgacttcttcaagcagtccttccctgagggcttcacatgggagagagtcaccacatacgaagacgggggcgtgctgaccgctacccaggacaccagcctccaggacggctgcctcatctacaacgtcaagatcagaggggtgaacttcacatccaacggccctgtgatgcagaagaaaacactcggctgggaggccttcaccgaaacgctgtacccagctgacggcggactggaaggcagaaacgacatggccctgaagctcgtgggtgggagccatctgatcgcaaacgccaagaccacatatagatccaagaaacccgctaagaacctcaagatgcctggcgtctactatgtggactacagactggaaagaatcaaggaggccaacaacgagacctacgtcgagcagcacgaggtggcagtggccagatactgcgacctccctagcaaactggggcacaagcttaattgataaggtacctttaagaccaatgacttacaaggcagctgtagatcttagc

SEQ ID NO: 111 - DNA, 2290 bp, Artificial Sequence
  Synthetic polynucleotide IPV14
ttcgaaagatgctgcaactagagatgctgcaacgcgagatgctgcatgagctgatgctgcagacgctgatgctgcaaaattagatgctgcaagcgtcagatgctgcaactagagatgctgcaacgcgagatgctgcatgagctgatgctgcagacgctgatgctgcaaaattagatgctgcaaacgctctctagagggtatataatgggggccactagtctactaccagagctcgaaggatccgccaccatggtgagcaagggcgaggagctgttcaccggggtggtgcccatcctggtcgagctggacggcgacgtaaacggccacaagttcagcgtgtccggcgagggcgagggcgatgccacctacggcaagctgaccctgaagttcatctgcaccaccggcaagctgcccgtgccctggcccaccctcgtgaccaccctgacctacggcgtgcagtgcttcagccgctaccccgaccacatgaagcagcacgacttcttcaagtccgccatgcccgaaggctacgtccaggagcgcaccatcttcttcaaggacgacggcaactacaagacccgcgccgaggtgaagttcgagggcgacaccctggtgaaccgcatcgagctgaagggcatcgacttcaaggaggacggcaacatcctggggcacaagctggagtacaactacaacagccacaacgtctatatcatggccgacaagcagaagaacggcatcaaggtgaacttcaagatccgccacaacatcgaggacggcagcgtgcagctcgccgaccactaccagcagaacacccccatcggcgacggccccgtgctgctgcccgacaaccactacctgagcacccagtccgccctgagcaaagaccccaacgagaagcgcgatcacatggtcctgctggagttcgtgaccgccgccgggatcactctcggcatggacgagctgtacaagtgagtcgacgatccagacatgataagatacattgatgagtttggacaaaccaaaactagaatgcagtgaaaaaaatgccttatttgtgaaatttgtgatgctattgccttatttgtaaccattataagctgcaataaacaagttcccgggtgaaagaccccacctgtaggtttggcaagctaggatcaaggttaggaacagagagacagcagaatatgggccaaacaggatatctgtggtaagcagttcctgccccggctcagggccaagaacagttggaacagcagaatatgggccaaacaggatatctgtggtaagcagttcctgccccggctcagggccaagaacagatggtccccagatgcggtcccgccctcagcagtttctagagaaccatcagatgtttccagggtgccccaaggacctgaaatgaccctgtgccttatttgaactaaccaatcagttcgcttctcgcttctgttcgcgcgcttctgctccccgagctcaataaaagagcccacaacccctcactcggcgcgatcagaacctcttacgagtccctgcaggccaccatggtgtctaagggcgaagagctgattaaggagaacatgcacatgaagctgtacatggagggcaccgtggacaaccatcacttcaagtgcacatccgagggcgaaggcaagccctacgagggcacccagaccatgagaatcaaggtggtcgagggcggccctctccccttcgccttcgacatcctggctactagcttcctctacggcagcaagaccttcatcaaccacacccagggcatccccgacttcttcaagcagtccttccctgagggcttcacatgggagagagtcaccacatacgaagacgggggcgtgctgaccgctacccaggacaccagcctccaggacggctgcctcatctacaacgtcaagatcagaggggtgaacttcacatccaacggccctgtgatgcagaagaaaacactcggctgggaggccttcaccgaaacgctgtacccagctgacggcggactggaaggcagaaacgacatggccctgaagctcgtgggtgggagccatctgatcgcaaacgccaagaccacatatagatccaagaaacccgctaagaacctcaagatgcctggcgtctactatgtggactacagactggaaagaatcaaggaggccaacaacgagacctacgtcgagcagcacgaggtggcagtggccagatactgcgacctccctagcaaactggggcacaagcttaattgataaggtacctttaagaccaatgacttacaaggcagctg

SEQ ID NO: 112 - DNA, 2289 bp, Artificial Sequence
  Synthetic polynucleotide IPV15
ttcgaatgtagatggagacgctgtagatggaggatctgtagatggaggctttgtagatggagagcctgtagatggaggccgtgtagatggagcgtatgtagatggagacgctgtagatggaggatctgtagatggaggctttgtagatggagagcctgtagatggaggccgtgtagatggagacgctctctagagggtatataatgggggccactagtctactaccagagctcgaaggatccgccaccatggtgagcaagggcgaggagctgttcaccggggtggtgcccatcctggtcgagctggacggcgacgtaaacggccacaagttcagcgtgtccggcgagggcgagggcgatgccacctacggcaagctgaccctgaagttcatctgcaccaccggcaagctgcccgtgccctggcccaccctcgtgaccaccctgacctacggcgtgcagtgcttcagccgctaccccgaccacatgaagcagcacgacttcttcaagtccgccatgcccgaaggctacgtccaggagcgcaccatcttcttcaaggacgacggcaactacaagacccgcgccgaggtgaagttcgagggcgacaccctggtgaaccgcatcgagctgaagggcatcgacttcaaggaggacggcaacatcctggggcacaagctggagtacaactacaacagccacaacgtctatatcatggccgacaagcagaagaacggcatcaaggtgaacttcaagatccgccacaacatcgaggacggcagcgtgcagctcgccgaccactaccagcagaacacccccatcggcgacggccccgtgctgctgcccgacaaccactacctgagcacccagtccgccctgagcaaagaccccaacgagaagcgcgatcacatggtcctgctggagttcgtgaccgccgccgggatcactctcggcatggacgagctgtacaagtgagtcgacgatccagacatgataagatacattgatgagtttggacaaaccaaaactagaatgcagtgaaaaaaatgccttatttgtgaaatttgtgatgctattgccttatttgtaaccattataagctgcaataaacaagttcccgggtgaaagaccccacctgtaggtttggcaagctaggatcaaggttaggaacagagagacagcagaatatgggccaaacaggatatctgtggtaagcagttcctgccccggctcagggccaagaacagttggaacagcagaatatgggccaaacaggatatctgtggtaagcagttcctgccccggctcagggccaagaacagatggtccccagatgcggtcccgccctcagcagtttctagagaaccatcagatgtttccagggtgccccaaggacctgaaatgaccctgtgccttatttgaactaaccaatcagttcgcttctcgcttctgttcgcgcgcttctgctccccgagctcaataaaagagcccacaacccctcactcggcgcgatcagaacctcttacgagtccctgcaggccaccatggtgtctaagggcgaagagctgattaaggagaacatgcacatgaagctgtacatggagggcaccgtggacaaccatcacttcaagtgcacatccgagggcgaaggcaagccctacgagggcacccagaccatgagaatcaaggtggtcgagggcggccctctccccttcgccttcgacatcctggctactagcttcctctacggcagcaagaccttcatcaaccacacccagggcatccccgacttcttcaagcagtccttccctgagggcttcacatgggagagagtcaccacatacgaagacgggggcgtgctgaccgctacccaggacaccagcctccaggacggctgcctcatctacaacgtcaagatcagaggggtgaacttcacatccaacggccctgtgatgcagaagaaaacactcggctgggaggccttcaccgaaacgctgtacccagctgacggcggactggaaggcagaaacgacatggccctgaagctcgtgggtgggagccatctgatcgcaaacgccaagaccacatatagatccaagaaacccgctaagaacctcaagatgcctggcgtctactatgtggactacagactggaaagaatcaaggaggccaacaacgagacctacgtcgagcagcacgaggtggcagtggccagatactgcgacctccctagcaaactggggcacaagcttaattgataaggtacctttaagaccaatgacttacaaggcagctg

SEQ ID NO: 113 - DNA, 3899 bp, Artificial Sequence
  Synthetic polynucleotide TFV1
ttcgaacgcgttgaaagaccccacctgtaggtttggcaagctaggatcaaggttaggaacagagagacagcagaatatgggccaaacaggatatctgtggtaagcagttcctgccccggctcagggccaagaacagttggaacagcagaatatgggccaaacaggatatctgtggtaagcagttcctgccccggctcagggccaagaacagatggtccccagatgcggtcccgccctcagcagtttctagagaaccatcagatgtttccagggtgccccaaggacctgaaatgaccctgtgccttatttgaactaaccaatcagttcgcttctcgcttctgttcgcgcgcttctgctccccgagctcaataaaagagcccacaacccctcactcggcgcgatcagaacctcttacgagtcggctagcgccaccatgaagctactgtcttctatcgaacaagcatgcgatatttgccgacttaaaaagctcaagtgctccaaagaaaaaccgaagtgcgccaagtgtctgaagaacaactgggagtgtcgctactctcccaaaaccaaaaggtctccgctgactagggcacatctgacagaagtggaatcaaggctagaaagactggaacagctatttctactgatttttcctcgagaagaccttgacatgattttgaaaatggattctttacaggatataaaagcattgttgggtactcctgcagctgcgggcctaggtggaggcggctccgcaggctctggcggaaagaagaaaggcagcgtggttatagttgggcgaattaatctgagtggagacaccgcatatgctcaacaaactaggggcgaggaaggatgtcaggaaaccagccagacaggccgcgacaagaaccaagtggagggagaggttcaaatcgtgtctactgcgacccagacttttctggccacgtccatcaacggagttctctggactgtctatcacggcgccggaactcgcaccattgcatcacccaaaggacccgtcactcaaatgtacaccaatgtggacaaggacttggtcggttggcaggcgccgcaaggctctcgatctctgactccatgcacctgcggtagctctgatttgtacctcgtgacacggcacgctgatgtgatcccggtccgtcggcgaggggattctagaggcagtctgctgagccctagaccaatatcatacctcaagggttctgctggcggacccctgttgtgccctgccggccatgccgtcggaatatttcgcgcggcagttagtacacggggcgttgccaaggcagtagacttcattcctgtcgagtcccttgagacaacaatgagatctcctggcagtggggagggcagaggaagccttcttacttgcggcgatgttgaagagaaccccgggccaatggtgagcaagggcgaggaggacaacatggccatcatcaaggagttcatgaggttcaaggtgcacatggagggcagcgtgaacggccacgagttcgagatcgagggcgagggcgagggcaggccctacgagggcacccagaccgccaagctgaaggtgaccaagggcggccccctgcccttcgcctgggacatcctgagcccccagttcatgtacggcagcaaggcctacgtgaagcaccccgccgacatccccgactacctgaagctgagcttccccgagggcttcaagtgggagagggtgatgaacttcgaggacggcggcgtggtgaccgtgacccaggacagcagcctgcaggacggcgagttcatctacaaggtgaagctgaggggcaccaacttccccagcgacggccccgtgatgcagaagaagaccatgggctgggaggccagcagcgagaggatgtaccccgaggacggcgccctgaagggcgagatcaagcagaggctgaagctgaaggacggcggccactacgacgccgaggtgaagaccacctacaaggccaagaagcccgtgcagctgcccggcgcctacaacgtgaacatcaagctggacatcaccagccacaacgaggactacaccatcgtggagcagtacgagagggccgagggcaggcacagcaccggcggcatggacgagctgtacaagggatccggagctactaacttcagcctgctgaagcaggctggagatgtggaggagaaccctggacctatcgattcctccgatgaggaagaggcaagggagctgatcgagagagccaaggaagccgcagagcgggcacaagaggccgctgaacgcacgggagatccacgggtccgcgaactcgctagggaattgaagcgtctagcgcaagaggctgcagaggaagttaaaagagacccatcttcctctgacgtcaatgaggccctgaaactcatcgtcgaggcaattgaagccgccgttgacgcccttgaggcggcagagcgcaccggagatcccgaggttcgcgaactggccagagaacttgttagactggctgtcgaagctgcagaggaggtgcaaaggaacccctcttcttccgatgttaacgaggccttgcattctattgtctacgccatcgaggccgctatctttgccctcgaggccgctgaaaggacgggtgacccagaagtgagagaactggcaagggagttggttcggctggcagtcgaggctgctgaggaggtgcaacggaacccatcctctaggaacgtcgaacacgcgttgatgcgcatcgttctggccatctaccttgccgaggaaaacctgcgggaggcagaagagagcggagatccagaaaaacgagagaaggctcgcgagcgggtcagagaagccgtcgaacgggccgaagaagtgcaaagagatcccagcggctggctgaaccattccggtggaggttcaggagctagcgatgcactggatgattttgacttggacatgctcggtagcgacgctcttgatgacttcgatctcgacatgctgggttccgatgccctcgatgatttcgatctggacatgttgggctctgacgccctggacgatttcgacctggatatgctgatcaattcccggagctcagggtctcctaagaaaaagcgcaaagttggcagtggaggcggaagcggagggtcaggttctgtgcttcctcaagcgccggctccggcccctgcacctgcaatggtgtctgctctcgcgcaagcacccgcaccggttccggttctggcaccaggaccccctcaagccgttgccccacctgcaccaaagcccacccaagcgggcgaaggaaccttgtccgaggccttgctccaactgcaatttgatgacgaggacctgggtgcacttctgggcaactcaaccgaccccgctgtattcactgatctggcttctgtggacaatagcgagtttcagcaactactaaaccagggcatccccgtggctcctcacactaccgagcctatgctgatggaataccccgaggcaataacgagactcgttaccggagcccaaaggccacctgatcctgctcctgcgccactcggcgcgcccggcctcccaaatgggctccttagcggcgatgaagacttcagtagtattgccgacatggacttctccgctctcctatccggtggtggaagcggcggctccggctctgacctgtctcatccaccgccacgaggacacctggatgagctgaccacaacactcgaatcaatgacagaggatctgaatttggactccccactgacaccagaactgaacgaaattctggataccttcctgaatgatgagtgccttctgcacgccatgcatatcagcaccggcctctccatcttcgacactagtctgttctgataaggtacctttaagaccaatgacttacaaggcagctgtagatcttagc

SEQ ID NO: 114 - DNA, 3899 bp, Artificial Sequence
  Synthetic polynucleotide TFV2
ttcgaacgcgttgaaagaccccacctgtaggtttggcaagctaggatcaaggttaggaacagagagacagcagaatatgggccaaacaggatatctgtggtaagcagttcctgccccggctcagggccaagaacagttggaacagcagaatatgggccaaacaggatatctgtggtaagcagttcctgccccggctcagggccaagaacagatggtccccagatgcggtcccgccctcagcagtttctagagaaccatcagatgtttccagggtgccccaaggacctgaaatgaccctgtgccttatttgaactaaccaatcagttcgcttctcgcttctgttcgcgcgcttctgctccccgagctcaataaaagagcccacaacccctcactcggcgcgatcagaacctcttacgagtcggctagcgccaccatggtgagcaagggcgaggaggacaacatggccatcatcaaggagttcatgaggttcaaggtgcacatggagggcagcgtgaacggccacgagttcgagatcgagggcgagggcgagggcaggccctacgagggcacccagaccgccaagctgaaggtgaccaagggcggccccctgcccttcgcctgggacatcctgagcccccagttcatgtacggcagcaaggcctacgtgaagcaccccgccgacatccccgactacctgaagctgagcttccccgagggcttcaagtgggagagggtgatgaacttcgaggacggcggcgtggtgaccgtgacccaggacagcagcctgcaggacggcgagttcatctacaaggtgaagctgaggggcaccaacttccccagcgacggccccgtgatgcagaagaagaccatgggctgggaggccagcagcgagaggatgtaccccgaggacggcgccctgaagggcgagatcaagcagaggctgaagctgaaggacggcggccactacgacgccgaggtgaagaccacctacaaggccaagaagcccgtgcagctgcccggcgcctacaacgtgaacatcaagctggacatcaccagccacaacgaggactacaccatcgtggagcagtacgagagggccgagggcaggcacagcaccggcggcatggacgagctgtacaagggatccggggagggcagaggaagccttcttacttgcggcgatgttgaagagaaccccgggccaatgaagctactgtcttctatcgaacaagcatgcgatatttgccgacttaaaaagctcaagtgctccaaagaaaaaccgaagtgcgccaagtgtctgaagaacaactgggagtgtcgctactctcccaaaaccaaaaggtctccgctgactagggcacatctgacagaagtggaatcaaggctagaaagactggaacagctatttctactgatttttcctcgagaagaccttgacatgattttgaaaatggattctttacaggatataaaagcattgttgggtactcctgcagctgcgggcctaggtggaggcggctccgcaggctctggcggaaagaagaaaggcagcgtggttatagttgggcgaattaatctgagtggagacaccgcatatgctcaacaaactaggggcgaggaaggatgtcaggaaaccagccagacaggccgcgacaagaaccaagtggagggagaggttcaaatcgtgtctactgcgacccagacttttctggccacgtccatcaacggagttctctggactgtctatcacggcgccggaactcgcaccattgcatcacccaaaggacccgtcactcaaatgtacaccaatgtggacaaggacttggtcggttggcaggcgccgcaaggctctcgatctctgactccatgcacctgcggtagctctgatttgtacctcgtgacacggcacgctgatgtgatcccggtccgtcggcgaggggattctagaggcagtctgctgagccctagaccaatatcatacctcaagggttctgctggcggacccctgttgtgccctgccggccatgccgtcggaatatttcgcgcggcagttagtacacggggcgttgccaaggcagtagacttcattcctgtcgagtcccttgagacaacaatgagatctcctggaagcggagctactaacttcagcctgctgaagcaggctggagatgtggaggagaaccctggacctatcgattcctccgatgaggaagaggcaagggagctgatcgagagagccaaggaagccgcagagcgggcacaagaggccgctgaacgcacgggagatccacgggtccgcgaactcgctagggaattgaagcgtctagcgcaagaggctgcagaggaagttaaaagagacccatcttcctctgacgtcaatgaggccctgaaactcatcgtcgaggcaattgaagccgccgttgacgcccttgaggcggcagagcgcaccggagatcccgaggttcgcgaactggccagagaacttgttagactggctgtcgaagctgcagaggaggtgcaaaggaacccctcttcttccgatgttaacgaggccttgcattctattgtctacgccatcgaggccgctatctttgccctcgaggccgctgaaaggacgggtgacccagaagtgagagaactggcaagggagttggttcggctggcagtcgaggctgctgaggaggtgcaacggaacccatcctctaggaacgtcgaacacgcgttgatgcgcatcgttctggccatctaccttgccgaggaaaacctgcgggaggcagaagagagcggagatccagaaaaacgagagaaggctcgcgagcgggtcagagaagccgtcgaacgggccgaagaagtgcaaagagatcccagcggctggctgaaccattccggtggaggttcaggagctagcgatgcactggatgattttgacttggacatgctcggtagcgacgctcttgatgacttcgatctcgacatgctgggttccgatgccctcgatgatttcgatctggacatgttgggctctgacgccctggacgatttcgacctggatatgctgatcaattcccggagctcagggtctcctaagaaaaagcgcaaagttggcagtggaggcggaagcggagggtcaggttctgtgcttcctcaagcgccggctccggcccctgcacctgcaatggtgtctgctctcgcgcaagcacccgcaccggttccggttctggcaccaggaccccctcaagccgttgccccacctgcaccaaagcccacccaagcgggcgaaggaaccttgtccgaggccttgctccaactgcaatttgatgacgaggacctgggtgcacttctgggcaactcaaccgaccccgctgtattcactgatctggcttctgtggacaatagcgagtttcagcaactactaaaccagggcatccccgtggctcctcacactaccgagcctatgctgatggaataccccgaggcaataacgagactcgttaccggagcccaaaggccacctgatcctgctcctgcgccactcggcgcgcccggcctcccaaatgggctccttagcggcgatgaagacttcagtagtattgccgacatggacttctccgctctcctatccggtggtggaagcggcggctccggctctgacctgtctcatccaccgccacgaggacacctggatgagctgaccacaacactcgaatcaatgacagaggatctgaatttggactccccactgacaccagaactgaacgaaattctggataccttcctgaatgatgagtgccttctgcacgccatgcatatcagcaccggcctctccatcttcgacactagtctgttctgataaggtacctttaagaccaatgacttacaaggcagctgtagatcttagc

SEQ ID NO: 115 - DNA, 3905 bp, Artificial Sequence
  Synthetic polynucleotide TFV3
ttcgaacgcgttgaaagaccccacctgtaggtttggcaagctaggatcaaggttaggaacagagagacagcagaatatgggccaaacaggatatctgtggtaagcagttcctgccccggctcagggccaagaacagttggaacagcagaatatgggccaaacaggatatctgtggtaagcagttcctgccccggctcagggccaagaacagatggtccccagatgcggtcccgccctcagcagtttctagagaaccatcagatgtttccagggtgccccaaggacctgaaatgaccctgtgccttatttgaactaaccaatcagttcgcttctcgcttctgttcgcgcgcttctgctccccgagctcaataaaagagcccacaacccctcactcggcgcgatcagaacctcttacgagtcggctagcgccaccatgaagaagaaaggcagcgtggttatagttgggcgaattaatctgagtggagacaccgcatatgctcaacaaactaggggcgaggaaggatgtcaggaaaccagccagacaggccgcgacaagaaccaagtggagggagaggttcaaatcgtgtctactgcgacccagacttttctggccacgtccatcaacggagttctctggactgtctatcacggcgccggaactcgcaccattgcatcacccaaaggacccgtcactcaaatgtacaccaatgtggacaaggacttggtcggttggcaggcgccgcaaggctctcgatctctgactccatgcacctgcggtagctctgatttgtacctcgtgacacggcacgctgatgtgatcccggtccgtcggcgaggggattctagaggcagtctgctgagccctagaccaatatcatacctcaagggttctgctggcggacccctgttgtgccctgccggccatgccgtcggaatatttcgcgcggcagttagtacacggggcgttgccaaggcagtagacttcattcctgtcgagtcccttgagacaacaatgagatctccttccggtggaggttcaggagctagcgatgcactggatgattttgacttggacatgctcggtagcgacgctcttgatgacttcgatctcgacatgctgggttccgatgccctcgatgatttcgatctggacatgttgggctctgacgccctggacgatttcgacctggatatgctgatcaattcccggagctcagggtctcctaagaaaaagcgcaaagttggcagtggaggcggaagcggagggtcaggttctgtgcttcctcaagcgccggctccggcccctgcacctgcaatggtgtctgctctcgcgcaagcacccgcaccggttccggttctggcaccaggaccccctcaagccgttgccccacctgcaccaaagcccacccaagcgggcgaaggaaccttgtccgaggccttgctccaactgcaatttgatgacgaggacctgggtgcacttctgggcaactcaaccgaccccgctgtattcactgatctggcttctgtggacaatagcgagtttcagcaactactaaaccagggcatccccgtggctcctcacactaccgagcctatgctgatggaataccccgaggcaataacgagactcgttaccggagcccaaaggccacctgatcctgctcctgcgccactcggcgcgcccggcctcccaaatgggctccttagcggcgatgaagacttcagtagtattgccgacatggacttctccgctctcctatccggtggtggaagcggcggctccggctctgacctgtctcatccaccgccacgaggacacctggatgagctgaccacaacactcgaatcaatgacagaggatctgaatttggactccccactgacaccagaactgaacgaaattctggataccttcctgaatgatgagtgccttctgcacgccatgcatatcagcaccggcctctccatcttcgacactagtctgttcgcggccgctggcagtggggagggcagaggaagccttcttacttgcggcgatgttgaagagaacccaggccccatggtgagcaagggcgaggaggacaacatggccatcatcaaggagttcatgaggttcaaggtgcacatggagggcagcgtgaacggccacgagttcgagatcgagggcgagggcgagggcaggccctacgagggcacccagaccgccaagctgaaggtgaccaagggcggccccctgcccttcgcctgggacatcctgagcccccagttcatgtacggcagcaaggcctacgtgaagcaccccgccgacatccccgactacctgaagctgagcttccccgagggcttcaagtgggagagggtgatgaacttcgaggacggcggcgtggtgaccgtgacccaggacagcagcctgcaggacggcgagttcatctacaaggtgaagctgaggggcaccaacttccccagcgacggccccgtgatgcagaagaagaccatgggctgggaggccagcagcgagaggatgtaccccgaggacggcgccctgaagggcgagatcaagcagaggctgaagctgaaggacggcggccactacgacgccgaggtgaagaccacctacaaggccaagaagcccgtgcagctgcccggcgcctacaacgtgaacatcaagctggacatcaccagccacaacgaggactacaccatcgtggagcagtacgagagggccgagggcaggcacagcaccggcggcatggacgagctgtacaagggatccggagctactaacttcagcctgctgaagcaggctggagatgtggaggagaaccctggacctatgaagctactgtcttctatcgaacaagcatgcgatatttgccgacttaaaaagctcaagtgctccaaagaaaaaccgaagtgcgccaagtgtctgaagaacaactgggagtgtcgctactctcccaaaaccaaaaggtctccgctgactagggcacatctgacagaagtggaatcaaggctagaaagactggaacagctatttctactgatttttcctcgagaagaccttgacatgattttgaaaatggattctttacaggatataaaagcattgttgggtactcctgcagctgcgggcctaggtggaggcggctccgcaggctctggcggatcctccgatgaggaagaggcaagggagctgatcgagagagccaaggaagccgcagagcgggcacaagaggccgctgaacgcacgggagatccacgggtccgcgaactcgctagggaattgaagcgtctagcgcaagaggctgcagaggaagttaaaagagacccatcttcctctgacgtcaatgaggccctgaaactcatcgtcgaggcaattgaagccgccgttgacgcccttgaggcggcagagcgcaccggagatcccgaggttcgcgaactggccagagaacttgttagactggctgtcgaagctgcagaggaggtgcaaaggaacccctcttcttccgatgttaacgaggccttgcattctattgtctacgccatcgaggccgctatctttgccctcgaggccgctgaaaggacgggtgacccagaagtgagagaactggcaagggagttggttcggctggcagtcgaggctgctgaggaggtgcaacggaacccatcctctaggaacgtcgaacacgcgttgatgcgcatcgttctggccatctaccttgccgaggaaaacctgcgggaggcagaagagagcggagatccagaaaaacgagagaaggctcgcgagcgggtcagagaagccgtcgaacgggccgaagaagtgcaaagagatcccagcggctggctgaaccattgataaggtacctttaagaccaatgacttacaaggcagctgtagatcttagc

SEQ ID NO: 116 - DNA, 3935 bp, Artificial Sequence
  Synthetic polynucleotide TFV4
ttcgaacgcgttgaaagaccccacctgtaggtttggcaagctaggatcaaggttaggaacagagagacagcagaatatgggccaaacaggatatctgtggtaagcagttcctgccccggctcagggccaagaacagttggaacagcagaatatgggccaaacaggatatctgtggtaagcagttcctgccccggctcagggccaagaacagatggtccccagatgcggtcccgccctcagcagtttctagagaaccatcagatgtttccagggtgccccaaggacctgaaatgaccctgtgccttatttgaactaaccaatcagttcgcttctcgcttctgttcgcgcgcttctgctccccgagctcaataaaagagcccacaacccctcactcggcgcgatcagaacctcttacgagtcggctagcgccaccatgcctaagaagaaaagaaaggtgtccggtggctctggaggcaagaaaaagggctctgtggtgatcgtgggcagaatcaatctgagcggagataccgcctatgcccagcagacacgcggagaggaaggttgtcaggagacatcccagaccggcagagataaaaaccaggtggaaggcgaggtgcagatcgtgtccaccgctacacaaacatttctggccacatctatcaacggcgtgctgtggaccgtgtaccacggagccggaacaagaaccatcgcctctccaaagggccctgtgacccaaatgtacaccaacgtggacaaggacctcgtgggatggcaggcccctcagggcagccggagcctgaccccttgcacctgcggcagcagcgacctgtacctggtgacacggcacgccgatgtgattcctgtgcggcggaggggcgacagcagaggcagcctgctgagccctagacccatcagctacctgaagggcagcgccggcggacctctgctgtgccccgccggccacgctgtgggcatcttccgtgccgctgtgtctaccagaggcgtcgccaaggccgttgacttcatccccgtcgagagcctggaaaccaccatgagaagccccggctctggcgcggccgctagcggcggcggcggcagcggcggaggcggaagcggcggtacacctccccacgagagacctttccagtgccggatctgcatgcggaacttctccaacaacgccatgctggtgcggcacaccagaacccacacaggagaaaaacctttccaatgtagaatctgtatgcgcaacttcagcctgagccagaccctgcagagacatctgagaacacacaccggcgagaagccatttcagtgcagaatctgcatgagaaatttcagcatgcagggcaacctgtctagacacctgaagacccacctgcggggcagcggcagtggggagggcagaggaagccttcttacttgcggcgatgttgaagagaaccccgggccaatggtgagcaagggcgaggaggacaacatggccatcatcaaggagttcatgaggttcaaggtgcacatggagggcagcgtgaacggccacgagttcgagatcgagggcgagggcgagggcaggccctacgagggcacccagaccgccaagctgaaggtgaccaagggcggccccctgcccttcgcctgggacatcctgagcccccagttcatgtacggcagcaaggcctacgtgaagcaccccgccgacatccccgactacctgaagctgagcttccccgagggcttcaagtgggagagggtgatgaacttcgaggacggcggcgtggtgaccgtgacccaggacagcagcctgcaggacggcgagttcatctacaaggtgaagctgaggggcaccaacttccccagcgacggccccgtgatgcagaagaagaccatgggctgggaggccagcagcgagaggatgtaccccgaggacggcgccctgaagggcgagatcaagcagaggctgaagctgaaggacggcggccactacgacgccgaggtgaagaccacctacaaggccaagaagcccgtgcagctgcccggcgcctacaacgtgaacatcaagctggacatcaccagccacaacgaggactacaccatcgtggagcagtacgagagggccgagggcaggcacagcaccggcggcatggacgagctgtacaagggatccggagctactaacttcagcctgctgaagcaggctggagatgtggaggagaaccctggacctatcgattcctccgatgaggaagaggcaagggagctgatcgagagagccaaggaagccgcagagcgggcacaagaggccgctgaacgcacgggagatccacgggtccgcgaactcgctagggaattgaagcgtctagcgcaagaggctgcagaggaagttaaaagagacccatcttcctctgacgtcaatgaggccctgaaactcatcgtcgaggcaattgaagccgccgttgacgcccttgaggcggcagagcgcaccggagatcccgaggttcgcgaactggccagagaacttgttagactggctgtcgaagctgcagaggaggtgcaaaggaacccctcttcttccgatgttaacgaggccttgcattctattgtctacgccatcgaggccgctatctttgccctcgaggccgctgaaaggacgggtgacccagaagtgagagaactggcaagggagttggttcggctggcagtcgaggctgctgaggaggtgcaacggaacccatcctctaggaacgtcgaacacgcgttgatgcgcatcgttctggccatctaccttgccgaggaaaacctgcgggaggcagaagagagcggagatccagaaaaacgagagaaggctcgcgagcgggtcagagaagccgtcgaacgggccgaagaagtgcaaagagatcccagcggctggctgaaccattccggtggaggttcaggagctagcgatgcactggatgattttgacttggacatgctcggtagcgacgctcttgatgacttcgatctcgacatgctgggttccgatgccctcgatgatttcgatctggacatgttgggctctgacgccctggacgatttcgacctggatatgctgatcaattcccggagctcagggtctcctaagaaaaagcgcaaagttggcagtggaggcggaagcggagggtcaggttctgtgcttcctcaagcgccggctccggcccctgcacctgcaatggtgtctgctctcgcgcaagcacccgcaccggttccggttctggcaccaggaccccctcaagccgttgccccacctgcaccaaagcccacccaagcgggcgaaggaaccttgtccgaggccttgctccaactgcaatttgatgacgaggacctgggtgcacttctgggcaactcaaccgaccccgctgtattcactgatctggcttctgtggacaatagcgagtttcagcaactactaaaccagggcatccccgtggctcctcacactaccgagcctatgctgatggaataccccgaggcaataacgagactcgttaccggagcccaaaggccacctgatcctgctcctgcgccactcggcgcgcccggcctcccaaatgggctccttagcggcgatgaagacttcagtagtattgccgacatggacttctccgctctcctatccggtggtggaagcggcggctccggctctgacctgtctcatccaccgccacgaggacacctggatgagctgaccacaacactcgaatcaatgacagaggatctgaatttggactccccactgacaccagaactgaacgaaattctggataccttcctgaatgatgagtgccttctgcacgccatgcatatcagcaccggcctctccatcttcgacactagtctgttctgataaggtacctttaagaccaatgacttacaaggcagctgtagatcttagc

SEQ ID NO: 117 - DNA, 3407 bp, Artificial Sequence
  Synthetic polynucleotide TFV5
ttcgaacgcgttgaaagaccccacctgtaggtttggcaagctaggatcaaggttaggaacagagagacagcagaatatgggccaaacaggatatctgtggtaagcagttcctgccccggctcagggccaagaacagttggaacagcagaatatgggccaaacaggatatctgtggtaagcagttcctgccccggctcagggccaagaacagatggtccccagatgcggtcccgccctcagcagtttctagagaaccatcagatgtttccagggtgccccaaggacctgaaatgaccctgtgccttatttgaactaaccaatcagttcgcttctcgcttctgttcgcgcgcttctgctccccgagctcaataaaagagcccacaacccctcactcggcgcgatcagaacctcttacgagtcggctagcgccaccatgcctaagaagaaaagaaaggtgtccggtggctctggaggcaagaaaaagggctctgtggtgatcgtgggcagaatcaatctgagcggagataccgcctatgcccagcagacacgcggagaggaaggttgtcaggagacatcccagaccggcagagataaaaaccaggtggaaggcgaggtgcagatcgtgtccaccgctacacaaacatttctggccacatctatcaacggcgtgctgtggaccgtgtaccacggagccggaacaagaaccatcgcctctccaaagggccctgtgacccaaatgtacaccaacgtggacaaggacctcgtgggatggcaggcccctcagggcagccggagcctgaccccttgcacctgcggcagcagcgacctgtacctggtgacacggcacgccgatgtgattcctgtgcggcggaggggcgacagcagaggcagcctgctgagccctagacccatcagctacctgaagggcagcgccggcggacctctgctgtgccccgccggccacgctgtgggcatcttccgtgccgctgtgtctaccagaggcgtcgccaaggccgttgacttcatccccgtcgagagcctggaaaccaccatgagaagccccggctctggcgcggccgctagcggcggcggcggcagcggcggaggcggaagcggcggtacacctccccacgagagacctttccagtgccggatctgcatgcggaacttctccaacaacgccatgctggtgcggcacaccagaacccacacaggagaaaaacctttccaatgtagaatctgtatgcgcaacttcagcctgagccagaccctgcagagacatctgagaacacacaccggcgagaagccatttcagtgcagaatctgcatgagaaatttcagcatgcagggcaacctgtctagacacctgaagacccacctgcggggcagcggcagtggggagggcagaggaagccttcttacttgcggcgatgttgaagagaaccccgggccaatggtgagcaagggcgaggaggacaacatggccatcatcaaggagttcatgaggttcaaggtgcacatggagggcagcgtgaacggccacgagttcgagatcgagggcgagggcgagggcaggccctacgagggcacccagaccgccaagctgaaggtgaccaagggcggccccctgcccttcgcctgggacatcctgagcccccagttcatgtacggcagcaaggcctacgtgaagcaccccgccgacatccccgactacctgaagctgagcttccccgagggcttcaagtgggagagggtgatgaacttcgaggacggcggcgtggtgaccgtgacccaggacagcagcctgcaggacggcgagttcatctacaaggtgaagctgaggggcaccaacttccccagcgacggccccgtgatgcagaagaagaccatgggctgggaggccagcagcgagaggatgtaccccgaggacggcgccctgaagggcgagatcaagcagaggctgaagctgaaggacggcggccactacgacgccgaggtgaagaccacctacaaggccaagaagcccgtgcagctgcccggcgcctacaacgtgaacatcaagctggacatcaccagccacaacgaggactacaccatcgtggagcagtacgagagggccgagggcaggcacagcaccggcggcatggacgagctgtacaagggatccggagctactaacttcagcctgctgaagcaggctggagatgtggaggagaaccctggacctatcgattcctccgatgaggaagaggcaagggagctgatcgagagagccaaggaagccgcagagcgggcacaagaggccgctgaacgcacgggagatccacgggtccgcgaactcgctagggaattgaagcgtctagcgcaagaggctgcagaggaagttaaaagagacccatcttcctctgacgtcaatgaggccctgaaactcatcgtcgaggcaattgaagccgccgttgacgcccttgaggcggcagagcgcaccggagatcccgaggttcgcgaactggccagagaacttgttagactggctgtcgaagctgcagaggaggtgcaaaggaacccctcttcttccgatgttaacgaggccttgcattctattgtctacgccatcgaggccgctatctttgccctcgaggccgctgaaaggacgggtgacccagaagtgagagaactggcaagggagttggttcggctggcagtcgaggctgctgaggaggtgcaacggaacccatcctctaggaacgtcgaacacgcgttgatgcgcatcgttctggccatctaccttgccgaggaaaacctgcgggaggcagaagagagcggagatccagaaaaacgagagaaggctcgcgagcgggtcagagaagccgtcgaacgggccgaagaagtgcaaagagatcccagcggctggctgaaccattccggtggaggttcaggagtcgacggtagccccaagaaaaagagaaaggtcggtagcgatgccttagacgactttgatctggacatgctgggctccgatgcactggatgattttgacttggacatgctcggcagcgacgccctggacgacttcgacctggacatgctgggttccgatgctctggacgatttcgatctggatatgcttggctctggcagcggctctggatctggcagcgacctcagccatcctccacctcgtggccacctggatgaactgacaaccacactggaaagcatgaccgaggacctgaacctggacagccccctgacccctgagctgaatgagatcctggataccttcctgaacgacgagtgcctgctgcacgccatgcacatcagcacaggcctgagcatcttcgacaccagcctgttctgataaggtacctttaagaccaatgacttacaaggcagctgtagatcttagc

SEQ ID NO: 118 - DNA, 3896 bp, Artificial Sequence
  Synthetic polynucleotide TFV6
ttcgaacgcgttgaaagaccccacctgtaggtttggcaagctaggatcaaggttaggaacagagagacagcagaatatgggccaaacaggatatctgtggtaagcagttcctgccccggctcagggccaagaacagttggaacagcagaatatgggccaaacaggatatctgtggtaagcagttcctgccccggctcagggccaagaacagatggtccccagatgcggtcccgccctcagcagtttctagagaaccatcagatgtttccagggtgccccaaggacctgaaatgaccctgtgccttatttgaactaaccaatcagttcgcttctcgcttctgttcgcgcgcttctgctccccgagctcaataaaagagcccacaacccctcactcggcgcgatcagaacctcttacgagtcggctagcgccaccatgcctaagaagaaaagaaaggtgtccggtggctctggaggcaagaaaaagggctctgtggtgatcgtgggcagaatcaatctgagcggagataccgcctatgcccagcagacacgcggagaggaaggttgtcaggagacatcccagaccggcagagataaaaaccaggtggaaggcgaggtgcagatcgtgtccaccgctacacaaacatttctggccacatctatcaacggcgtgctgtggaccgtgtaccacggagccggaacaagaaccatcgcctctccaaagggccctgtgacccaaatgtacaccaacgtggacaaggacctcgtgggatggcaggcccctcagggcagccggagcctgaccccttgcacctgcggcagcagcgacctgtacctggtgacacggcacgccgatgtgattcctgtgcggcggaggggcgacagcagaggcagcctgctgagccctagacccatcagctacctgaagggcagcgccggcggacctctgctgtgccccgccggccacgctgtgggcatcttccgtgccgctgtgtctaccagaggcgtcgccaaggccgttgacttcatccccgtcgagagcctggaaaccaccatgagaagccccggctctggcgcggccgctagcggcggcggcggcagcggcggaggcggaagcggcggtacacctccccacgagagacctttccagtgccggatctgcatgcggaacttctccaacaacgccatgctggtgcggcacaccagaacccacacaggagaaaaacctttccaatgtagaatctgtatgcgcaacttcagcctgagccagaccctgcagagacatctgagaacacacaccggcgagaagccatttcagtgcagaatctgcatgagaaatttcagcatgcagggcaacctgtctagacacctgaagacccacctgcggggcagcggcagtggggagggcagaggaagccttcttacttgcggcgatgttgaagagaaccccgggccaatggtgagcaagggcgaggaggacaacatggccatcatcaaggagttcatgaggttcaaggtgcacatggagggcagcgtgaacggccacgagttcgagatcgagggcgagggcgagggcaggccctacgagggcacccagaccgccaagctgaaggtgaccaagggcggccccctgcccttcgcctgggacatcctgagcccccagttcatgtacggcagcaaggcctacgtgaagcaccccgccgacatccccgactacctgaagctgagcttccccgagggcttcaagtgggagagggtgatgaacttcgaggacggcggcgtggtgaccgtgacccaggacagcagcctgcaggacggcgagttcatctacaaggtgaagctgaggggcaccaacttccccagcgacggccccgtgatgcagaagaagaccatgggctgggaggccagcagcgagaggatgtaccccgaggacggcgccctgaagggcgagatcaagcagaggctgaagctgaaggacggcggccactacgacgccgaggtgaagaccacctacaaggccaagaagcccgtgcagctgcccggcgcctacaacgtgaacatcaagctggacatcaccagccacaacgaggactacaccatcgtggagcagtacgagagggccgagggcaggcacagcaccggcggcatggacgagctgtacaagggatccggagctactaacttcagcctgctgaagcaggctggagatgtggaggagaaccctggacctatcgattcctccgatgaggaagaggcaagggagctgatcgagagagccaaggaagccgcagagcgggcacaagaggccgctgaacgcacgggagatccacgggtccgcgaactcgctagggaattgaagcgtctagcgcaagaggctgcagaggaagttaaaagagacccatcttcctctgacgtcaatgaggccctgaaactcatcgtcgaggcaattgaagccgccgttgacgcccttgaggcggcagagcgcaccggagatcccgaggttcgcgaactggccagagaacttgttagactggctgtcgaagctgcagaggaggtgcaaaggaacccctcttcttccgatgttaacgaggccttgcattctattgtctacgccatcgaggccgctatctttgccctcgaggccgctgaaaggacgggtgacccagaagtgagagaactggcaagggagttggttcggctggcagtcgaggctgctgaggaggtgcaacggaacccatcctctaggaacgtcgaacacgcgttgatgcgcatcgttctggccatctaccttgccgaggaaaacctgcgggaggcagaagagagcggagatccagaaaaacgagagaaggctcgcgagcgggtcagagaagccgtcgaacgggccgaagaagtgcaaagagatcccagcggctggctgaaccattccggtggaggttcaggagtcgacggtagccccaagaaaaagagaaaggtcggtagcgtcctgcctcaggcccctgctccagctccagcccctgccatggtgtccgccctggcccaggcccctgcacccgtgcccgtgctggccccaggccctccacaagccgtggcccctcctgcccctaagcccacccaggctggcgaaggcaccctgagcgaggcccttttgcagctgcagttcgacgacgaggacctgggcgccctgctcggcaatagcaccgaccccgctgtgttcaccgatctggcttctgtggacaacagcgaattccagcagctgctcaaccagggcatccccgtggccccccacaccaccgagcccatgctgatggaataccccgaggccatcacaagactggtgaccggcgctcagcggccccccgaccccgcccctgcccctctgggagcccctggcctgcctaacggcctgctgagcggagatgaggacttctcctccatcgccgacatggacttctctgccctgctgagcggcagcggcggcttcagcgtggacaccagcgccctgctggacctgttcagccccagcgtgacagtgcctgatatgagcctgcccgatctggacagcagcctggcctctatccaggagctgctgtctcctcaagagcctcctagacctccagaagctgaaaacagcagccctgattccggaaaacagctggtccactacacagcccaacctctgttcctgctggaccctggatctgttgataccggcagcaacgacctgcctgtgctgtttgagctgggcgaaggcagctacttcagcgagggcgacggctttgccgaggaccctacaatcagcctgctgactggaagcgagcctccaaaggccaaggaccctaccgtgtcttgataaggtacctttaagaccaatgacttacaaggcagctgtagatcttagc

SEQ ID NO: 119 - DNA, 3512 bp, Artificial Sequence
  Synthetic polynucleotide TFV7
ttcgaacgcgttgaaagaccccacctgtaggtttggcaagctaggatcaaggttaggaacagagagacagcagaatatgggccaaacaggatatctgtggtaagcagttcctgccccggctcagggccaagaacagttggaacagcagaatatgggccaaacaggatatctgtggtaagcagttcctgccccggctcagggccaagaacagatggtccccagatgcggtcccgccctcagcagtttctagagaaccatcagatgtttccagggtgccccaaggacctgaaatgaccctgtgccttatttgaactaaccaatcagttcgcttctcgcttctgttcgcgcgcttctgctccccgagctcaataaaagagcccacaacccctcactcggcgcgatcagaacctcttacgagtcggctagcgccaccatgcctaagaagaaaagaaaggtgtccggtggctctggaggcaagaaaaagggctctgtggtgatcgtgggcagaatcaatctgagcggagataccgcctatgcccagcagacacgcggagaggaaggttgtcaggagacatcccagaccggcagagataaaaaccaggtggaaggcgaggtgcagatcgtgtccaccgctacacaaacatttctggccacatctatcaacggcgtgctgtggaccgtgtaccacggagccggaacaagaaccatcgcctctccaaagggccctgtgacccaaatgtacaccaacgtggacaaggacctcgtgggatggcaggcccctcagggcagccggagcctgaccccttgcacctgcggcagcagcgacctgtacctggtgacacggcacgccgatgtgattcctgtgcggcggaggggcgacagcagaggcagcctgctgagccctagacccatcagctacctgaagggcagcgccggcggacctctgctgtgccccgccggccacgctgtgggcatcttccgtgccgctgtgtctaccagaggcgtcgccaaggccgttgacttcatccccgtcgagagcctggaaaccaccatgagaagccccggctctggcgcggccgctagcggcggcggcggcagcggcggaggcggaagcggcggtacacctccccacgagagacctttccagtgccggatctgcatgcggaacttctccaacaacgccatgctggtgcggcacaccagaacccacacaggagaaaaacctttccaatgtagaatctgtatgcgcaacttcagcctgagccagaccctgcagagacatctgagaacacacaccggcgagaagccatttcagtgcagaatctgcatgagaaatttcagcatgcagggcaacctgtctagacacctgaagacccacctgcggggcagcggcagtggggagggcagaggaagccttcttacttgcggcgatgttgaagagaaccccgggccaatggtgagcaagggcgaggaggacaacatggccatcatcaaggagttcatgaggttcaaggtgcacatggagggcagcgtgaacggccacgagttcgagatcgagggcgagggcgagggcaggccctacgagggcacccagaccgccaagctgaaggtgaccaagggcggccccctgcccttcgcctgggacatcctgagcccccagttcatgtacggcagcaaggcctacgtgaagcaccccgccgacatccccgactacctgaagctgagcttccccgagggcttcaagtgggagagggtgatgaacttcgaggacggcggcgtggtgaccgtgacccaggacagcagcctgcaggacggcgagttcatctacaaggtgaagctgaggggcaccaacttccccagcgacggccccgtgatgcagaagaagaccatgggctgggaggccagcagcgagaggatgtaccccgaggacggcgccctgaagggcgagatcaagcagaggctgaagctgaaggacggcggccactacgacgccgaggtgaagaccacctacaaggccaagaagcccgtgcagctgcccggcgcctacaacgtgaacatcaagctggacatcaccagccacaacgaggactacaccatcgtggagcagtacgagagggccgagggcaggcacagcaccggcggcatggacgagctgtacaagggatccggagctactaacttcagcctgctgaagcaggctggagatgtggaggagaaccctggacctatcgattcctccgatgaggaagaggcaagggagctgatcgagagagccaaggaagccgcagagcgggcacaagaggccgctgaacgcacgggagatccacgggtccgcgaactcgctagggaattgaagcgtctagcgcaagaggctgcagaggaagttaaaagagacccatcttcctctgacgtcaatgaggccctgaaactcatcgtcgaggcaattgaagccgccgttgacgcccttgaggcggcagagcgcaccggagatcccgaggttcgcgaactggccagagaacttgttagactggctgtcgaagctgcagaggaggtgcaaaggaacccctcttcttccgatgttaacgaggccttgcattctattgtctacgccatcgaggccgctatctttgccctcgaggccgctgaaaggacgggtgacccagaagtgagagaactggcaagggagttggttcggctggcagtcgaggctgctgaggaggtgcaacggaacccatcctctaggaacgtcgaacacgcgttgatgcgcatcgttctggccatctaccttgccgaggaaaacctgcgggaggcagaagagagcggagatccagaaaaacgagagaaggctcgcgagcgggtcagagaagccgtcgaacgggccgaagaagtgcaaagagatcccagcggctggctgaaccattccggtggaggttcaggagtcgacggtagccccaagaaaaagagaaaggtcggtagcgtgctgcctcaagcccctgctccagcccccgctccagccatggtgtccgccctggcccaggcccctgcccctgtgcctgtgctggcccctggacctcctcaagccgtcgcccctccagcccctaagcctacacaggccggcgagggaacactgtctgaagccctgctgcagctgcaatttgacgacgaggacctgggagccctgcttggcaatagcaccgatcctgctgtgttcaccgacctggcttctgtggacaacagcgagttccagcagctcctgaaccagggcatccccgttgccccccacacaaccgagcctatgctgatggaataccccgaggccatcaccagactggtgaccggcgctcagcggccccccgaccccgcccctgcaccactgggcgcccctggcctgcctaacggcctgctgtccggcgatgaagatttcagcagcatcgccgatatggacttcagcgccctgctgtgataaggtacctttaagaccaatgacttacaaggcagctgtagatcttagc

SEQ ID NO: 120 - DNA, 3935 bp, Artificial Sequence
  Synthetic polynucleotide TFV8
ttcgaacgcgttgaaagaccccacctgtaggtttggcaagctaggatcaaggttaggaacagagagacagcagaatatgggccaaacaggatatctgtggtaagcagttcctgccccggctcagggccaagaacagttggaacagcagaatatgggccaaacaggatatctgtggtaagcagttcctgccccggctcagggccaagaacagatggtccccagatgcggtcccgccctcagcagtttctagagaaccatcagatgtttccagggtgccccaaggacctgaaatgaccctgtgccttatttgaactaaccaatcagttcgcttctcgcttctgttcgcgcgcttctgctccccgagctcaataaaagagcccacaacccctcactcggcgcgatcagaacctcttacgagtcggctagcgccaccatgcctaagaagaaaagaaaggtgtccggtggctctggaggcaagaaaaagggctctgtggtgatcgtgggcagaatcaatctgagcggagataccgcctatgcccagcagacacgcggagaggaaggttgtcaggagacatcccagaccggcagagataaaaaccaggtggaaggcgaggtgcagatcgtgtccaccgctacacaaacatttctggccacatctatcaacggcgtgctgtggaccgtgtaccacggagccggaacaagaaccatcgcctctccaaagggccctgtgacccaaatgtacaccaacgtggacaaggacctcgtgggatggcaggcccctcagggcagccggagcctgaccccttgcacctgcggcagcagcgacctgtacctggtgacacggcacgccgatgtgattcctgtgcggcggaggggcgacagcagaggcagcctgctgagccctagacccatcagctacctgaagggcagcgccggcggacctctgctgtgccccgccggccacgctgtgggcatcttccgtgccgctgtgtctaccagaggcgtcgccaaggccgttgacttcatccccgtcgagagcctggaaaccaccatgagaagccccggctctggcgcggccgctagcggcggcggcggcagcggcggaggcggaagcggcggtgccagacccggcgagcggccttttcagtgccggatctgtatgagaaacttcagcagacaggacagactggaccggcacacaagaacccacaccggcgagaagcctttccagtgcagaatctgcatgaggaatttctctcagaaggaacacctggccggccacctgagaacacacaccggagaaaaaccattccaatgtagaatctgcatgcggaacttctcccgcagagataacctgaacagacacctgaagacccatctgcggggcagcggcagtggggagggcagaggaagccttcttacttgcggcgatgttgaagagaaccccgggccaatggtgagcaagggcgaggaggacaacatggccatcatcaaggagttcatgaggttcaaggtgcacatggagggcagcgtgaacggccacgagttcgagatcgagggcgagggcgagggcaggccctacgagggcacccagaccgccaagctgaaggtgaccaagggcggccccctgcccttcgcctgggacatcctgagcccccagttcatgtacggcagcaaggcctacgtgaagcaccccgccgacatccccgactacctgaagctgagcttccccgagggcttcaagtgggagagggtgatgaacttcgaggacggcggcgtggtgaccgtgacccaggacagcagcctgcaggacggcgagttcatctacaaggtgaagctgaggggcaccaacttccccagcgacggccccgtgatgcagaagaagaccatgggctgggaggccagcagcgagaggatgtaccccgaggacggcgccctgaagggcgagatcaagcagaggctgaagctgaaggacggcggccactacgacgccgaggtgaagaccacctacaaggccaagaagcccgtgcagctgcccggcgcctacaacgtgaacatcaagctggacatcaccagccacaacgaggactacaccatcgtggagcagtacgagagggccgagggcaggcacagcaccggcggcatggacgagctgtacaagggatccggagctactaacttcagcctgctgaagcaggctggagatgtggaggagaaccctggacctatcgattcctccgatgaggaagaggcaagggagctgatcgagagagccaaggaagccgcagagcgggcacaagaggccgctgaacgcacgggagatccacgggtccgcgaactcgctagggaattgaagcgtctagcgcaagaggctgcagaggaagttaaaagagacccatcttcctctgacgtcaatgaggccctgaaactcatcgtcgaggcaattgaagccgccgttgacgcccttgaggcggcagagcgcaccggagatcccgaggttcgcgaactggccagagaacttgttagactggctgtcgaagctgcagaggaggtgcaaaggaacccctcttcttccgatgttaacgaggccttgcattctattgtctacgccatcgaggccgctatctttgccctcgaggccgctgaaaggacgggtgacccagaagtgagagaactggcaagggagttggttcggctggcagtcgaggctgctgaggaggtgcaacggaacccatcctctaggaacgtcgaacacgcgttgatgcgcatcgttctggccatctaccttgccgaggaaaacctgcgggaggcagaagagagcggagatccagaaaaacgagagaaggctcgcgagcgggtcagagaagccgtcgaacgggccgaagaagtgcaaagagatcccagcggctggctgaaccattccggtggaggttcaggagctagcgatgcactggatgattttgacttggacatgctcggtagcgacgctcttgatgacttcgatctcgacatgctgggttccgatgccctcgatgatttcgatctggacatgttgggctctgacgccctggacgatttcgacctggatatgctgatcaattcccggagctcagggtctcctaagaaaaagcgcaaagttggcagtggaggcggaagcggagggtcaggttctgtgcttcctcaagcgccggctccggcccctgcacctgcaatggtgtctgctctcgcgcaagcacccgcaccggttccggttctggcaccaggaccccctcaagccgttgccccacctgcaccaaagcccacccaagcgggcgaaggaaccttgtccgaggccttgctccaactgcaatttgatgacgaggacctgggtgcacttctgggcaactcaaccgaccccgctgtattcactgatctggcttctgtggacaatagcgagtttcagcaactactaaaccagggcatccccgtggctcctcacactaccgagcctatgctgatggaataccccgaggcaataacgagactcgttaccggagcccaaaggccacctgatcctgctcctgcgccactcggcgcgcccggcctcccaaatgggctccttagcggcgatgaagacttcagtagtattgccgacatggacttctccgctctcctatccggtggtggaagcggcggctccggctctgacctgtctcatccaccgccacgaggacacctggatgagctgaccacaacactcgaatcaatgacagaggatctgaatttggactccccactgacaccagaactgaacgaaattctggataccttcctgaatgatgagtgccttctgcacgccatgcatatcagcaccggcctctccatcttcgacactagtctgttctgataaggtacctttaagaccaatgacttacaaggcagctgtagatcttagc

SEQ ID NO: 121 - DNA, 3407 bp, Artificial Sequence
  Synthetic polynucleotide TFV9
ttcgaacgcgttgaaagaccccacctgtaggtttggcaagctaggatcaaggttaggaacagagagacagcagaatatgggccaaacaggatatctgtggtaagcagttcctgccccggctcagggccaagaacagttggaacagcagaatatgggccaaacaggatatctgtggtaagcagttcctgccccggctcagggccaagaacagatggtccccagatgcggtcccgccctcagcagtttctagagaaccatcagatgtttccagggtgccccaaggacctgaaatgaccctgtgccttatttgaactaaccaatcagttcgcttctcgcttctgttcgcgcgcttctgctccccgagctcaataaaagagcccacaacccctcactcggcgcgatcagaacctcttacgagtcggctagcgccaccatgcctaagaagaaaagaaaggtgtccggtggctctggaggcaagaaaaagggctctgtggtgatcgtgggcagaatcaatctgagcggagataccgcctatgcccagcagacacgcggagaggaaggttgtcaggagacatcccagaccggcagagataaaaaccaggtggaaggcgaggtgcagatcgtgtccaccgctacacaaacatttctggccacatctatcaacggcgtgctgtggaccgtgtaccacggagccggaacaagaaccatcgcctctccaaagggccctgtgacccaaatgtacaccaacgtggacaaggacctcgtgggatggcaggcccctcagggcagccggagcctgaccccttgcacctgcggcagcagcgacctgtacctggtgacacggcacgccgatgtgattcctgtgcggcggaggggcgacagcagaggcagcctgctgagccctagacccatcagctacctgaagggcagcgccggcggacctctgctgtgccccgccggccacgctgtgggcatcttccgtgccgctgtgtctaccagaggcgtcgccaaggccgttgacttcatccccgtcgagagcctggaaaccaccatgagaagccccggctctggcgcggccgctagcggcggcggcggcagcggcggaggcggaagcggcggtgccagacccggcgagcggccttttcagtgccggatctgtatgagaaacttcagcagacaggacagactggaccggcacacaagaacccacaccggcgagaagcctttccagtgcagaatctgcatgaggaatttctctcagaaggaacacctggccggccacctgagaacacacaccggagaaaaaccattccaatgtagaatctgcatgcggaacttctcccgcagagataacctgaacagacacctgaagacccatctgcggggcagcggcagtggggagggcagaggaagccttcttacttgcggcgatgttgaagagaaccccgggccaatggtgagcaagggcgaggaggacaacatggccatcatcaaggagttcatgaggttcaaggtgcacatggagggcagcgtgaacggccacgagttcgagatcgagggcgagggcgagggcaggccctacgagggcacccagaccgccaagctgaaggtgaccaagggcggccccctgcccttcgcctgggacatcctgagcccccagttcatgtacggcagcaaggcctacgtgaagcaccccgccgacatccccgactacctgaagctgagcttccccgagggcttcaagtgggagagggtgatgaacttcgaggacggcggcgtggtgaccgtgacccaggacagcagcctgcaggacggcgagttcatctacaaggtgaagctgaggggcaccaacttccccagcgacggccccgtgatgcagaagaagaccatgggctgggaggccagcagcgagaggatgtaccccgaggacggcgccctgaagggcgagatcaagcagaggctgaagctgaaggacggcggccactacgacgccgaggtgaagaccacctacaaggccaagaagcccgtgcagctgcccggcgcctacaacgtgaacatcaagctggacatcaccagccacaacgaggactacaccatcgtggagcagtacgagagggccgagggcaggcacagcaccggcggcatggacgagctgtacaagggatccggagctactaacttcagcctgctgaagcaggctggagatgtggaggagaaccctggacctatcgattcctccgatgaggaagaggcaagggagctgatcgagagagccaaggaagccgcagagcgggcacaagaggccgctgaacgcacgggagatccacgggtccgcgaactcgctagggaattgaagcgtctagcgcaagaggctgcagaggaagttaaaagagacccatcttcctctgacgtcaatgaggccctgaaactcatcgtcgaggcaattgaagccgccgttgacgcccttgaggcggcagagcgcaccggagatcccgaggttcgcgaactggccagagaacttgttagactggctgtcgaagctgcagaggaggtgcaaaggaacccctcttcttccgatgttaacgaggccttgcattctattgtctacgccatcgaggccgctatctttgccctcgaggccgctgaaaggacgggtgacccagaagtgagagaactggcaagggagttggttcggctggcagtcgaggctgctgaggaggtgcaacggaacccatcctctaggaacgtcgaacacgcgttgatgcgcatcgttctggccatctaccttgccgaggaaaacctgcgggaggcagaagagagcggagatccagaaaaacgagagaaggctcgcgagcgggtcagagaagccgtcgaacgggccgaagaagtgcaaagagatcccagcggctggctgaaccattccggtggaggttcaggagtcgacggtagccccaagaaaaagagaaaggtcggtagcgatgccttagacgactttgatctggacatgctgggctccgatgcactggatgattttgacttggacatgctcggcagcgacgccctggacgacttcgacctggacatgctgggttccgatgctctggacgatttcgatctggatatgcttggctctggcagcggctctggatctggcagcgacctcagccatcctccacctcgtggccacctggatgaactgacaaccacactggaaagcatgaccgaggacctgaacctggacagccccctgacccctgagctgaatgagatcctggataccttcctgaacgacgagtgcctgctgcacgccatgcacatcagcacaggcctgagcatcttcgacaccagcctgttctgataaggtacctttaagaccaatgacttacaaggcagctgtagatcttagc

SEQ ID NO: 122 - DNA, 3896 bp, Artificial Sequence
  Synthetic polynucleotide TFV10
ttcgaacgcgttgaaagaccccacctgtaggtttggcaagctaggatcaaggttaggaacagagagacagcagaatatgggccaaacaggatatctgtggtaagcagttcctgccccggctcagggccaagaacagttggaacagcagaatatgggccaaacaggatatctgtggtaagcagttcctgccccggctcagggccaagaacagatggtccccagatgcggtcccgccctcagcagtttctagagaaccatcagatgtttccagggtgccccaaggacctgaaatgaccctgtgccttatttgaactaaccaatcagttcgcttctcgcttctgttcgcgcgcttctgctccccgagctcaataaaagagcccacaacccctcactcggcgcgatcagaacctcttacgagtcggctagcgccaccatgcctaagaagaaaagaaaggtgtccggtggctctggaggcaagaaaaagggctctgtggtgatcgtgggcagaatcaatctgagcggagataccgcctatgcccagcagacacgcggagaggaaggttgtcaggagacatcccagaccggcagagataaaaaccaggtggaaggcgaggtgcagatcgtgtccaccgctacacaaacatttctggccacatctatcaacggcgtgctgtggaccgtgtaccacggagccggaacaagaaccatcgcctctccaaagggccctgtgacccaaatgtacaccaacgtggacaaggacctcgtgggatggcaggcccctcagggcagccggagcctgaccccttgcacctgcggcagcagcgacctgtacctggtgacacggcacgccgatgtgattcctgtgcggcggaggggcgacagcagaggcagcctgctgagccctagacccatcagctacctgaagggcagcgccggcggacctctgctgtgccccgccggccacgctgtgggcatcttccgtgccgctgtgtctaccagaggcgtcgccaaggccgttgacttcatccccgtcgagagcctggaaaccaccatgagaagccccggctctggcgcggccgctagcggcggcggcggcagcggcggaggcggaagcggcggtgccagacccggcgagcggccttttcagtgccggatctgtatgagaaacttcagcagacaggacagactggaccggcacacaagaacccacaccggcgagaagcctttccagtgcagaatctgcatgaggaatttctctcagaaggaacacctggccggccacctgagaacacacaccggagaaaaaccattccaatgtagaatctgcatgcggaacttctcccgcagagataacctgaacagacacctgaagacccatctgcggggcagcggcagtggggagggcagaggaagccttcttacttgcggcgatgttgaagagaaccccgggccaatggtgagcaagggcgaggaggacaacatggccatcatcaaggagttcatgaggttcaaggtgcacatggagggcagcgtgaacggccacgagttcgagatcgagggcgagggcgagggcaggccctacgagggcacccagaccgccaagctgaaggtgaccaagggcggccccctgcccttcgcctgggacatcctgagcccccagttcatgtacggcagcaaggcctacgtgaagcaccccgccgacatccccgactacctgaagctgagcttccccgagggcttcaagtgggagagggtgatgaacttcgaggacggcggcgtggtgaccgtgacccaggacagcagcctgcaggacggcgagttcatctacaaggtgaagctgaggggcaccaacttccccagcgacggccccgtgatgcagaagaagaccatgggctgggaggccagcagcgagaggatgtaccccgaggacggcgccctgaagggcgagatcaagcagaggctgaagctgaaggacggcggccactacgacgccgaggtgaagaccacctacaaggccaagaagcccgtgcagctgcccggcgcctacaacgtgaacatcaagctggacatcaccagccacaacgaggactacaccatcgtggagcagtacgagagggccgagggcaggcacagcaccggcggcatggacgagctgtacaagggatccggagctactaacttcagcctgctgaagcaggctggagatgtggaggagaaccctggacctatcgattcctccgatgaggaagaggcaagggagctgatcgagagagccaaggaagccgcagagcgggcacaagaggccgctgaacgcacgggagatccacgggtccgcgaactcgctagggaattgaagcgtctagcgcaagaggctgcagaggaagttaaaagagacccatcttcctctgacgtcaatgaggccctgaaactcatcgtcgaggcaattgaagccgccgttgacgcccttgaggcggcagagcgcaccggagatcccgaggttcgcgaactggccagagaacttgttagactggctgtcgaagctgcagaggaggtgcaaaggaacccctcttcttccgatgttaacgaggccttgcattctattgtctacgccatcgaggccgctatctttgccctcgaggccgctgaaaggacgggtgacccagaagtgagagaactggcaagggagttggttcggctggcagtcgaggctgctgaggaggtgcaacggaacccatcctctaggaacgtcgaacacgcgttgatgcgcatcgttctggccatctaccttgccgaggaaaacctgcgggaggcagaagagagcggagatccagaaaaacgagagaaggctcgcgagcgggtcagagaagccgtcgaacgggccgaagaagtgcaaagagatcccagcggctggctgaaccattccggtggaggttcaggagtcgacggtagccccaagaaaaagagaaaggtcggtagcgtcctgcctcaggcccctgctccagctccagcccctgccatggtgtccgccctggcccaggcccctgcacccgtgcccgtgctggccccaggccctccacaagccgtggcccctcctgcccctaagcccacccaggctggcgaaggcaccctgagcgaggcccttttgcagctgcagttcgacgacgaggacctgggcgccctgctcggcaatagcaccgaccccgctgtgttcaccgatctggcttctgtggacaacagcgaattccagcagctgctcaaccagggcatccccgtggccccccacaccaccgagcccatgctgatggaataccccgaggccatcacaagactggtgaccggcgctcagcggccccccgaccccgcccctgcccctctgggagcccctggcctgcctaacggcctgctgagcggagatgaggacttctcctccatcgccgacatggacttctctgccctgctgagcggcagcggcggcttcagcgtggacaccagcgccctgctggacctgttcagccccagcgtgacagtgcctgatatgagcctgcccgatctggacagcagcctggcctctatccaggagctgctgtctcctcaagagcctcctagacctccagaagctgaaaacagcagccctgattccggaaaacagctggtccactacacagcccaacctctgttcctgctggaccctggatctgttgataccggcagcaacgacctgcctgtgctgtttgagctgggcgaaggcagctacttcagcgagggcgacggctttgccgaggaccctacaatcagcctgctgactggaagcgagcctccaaaggccaaggaccctaccgtgtcttgataaggtacctttaagaccaatgacttacaaggcagctgtagatcttagc

SEQ ID NO: 123 - DNA, 3512 bp, Artificial Sequence
  Synthetic polynucleotide TFV11
ttcgaacgcgttgaaagaccccacctgtaggtttggcaagctaggatcaaggttaggaacagagagacagcagaatatgggccaaacaggatatctgtggtaagcagttcctgccccggctcagggccaagaacagttggaacagcagaatatgggccaaacaggatatctgtggtaagcagttcctgccccggctcagggccaagaacagatggtccccagatgcggtcccgccctcagcagtttctagagaaccatcagatgtttccagggtgccccaaggacctgaaatgaccctgtgccttatttgaactaaccaatcagttcgcttctcgcttctgttcgcgcgcttctgctccccgagctcaataaaagagcccacaacccctcactcggcgcgatcagaacctcttacgagtcggctagcgccaccatgcctaagaagaaaagaaaggtgtccggtggctctggaggcaagaaaaagggctctgtggtgatcgtgggcagaatcaatctgagcggagataccgcctatgcccagcagacacgcggagaggaaggttgtcaggagacatcccagaccggcagagataaaaaccaggtggaaggcgaggtgcagatcgtgtccaccgctacacaaacatttctggccacatctatcaacggcgtgctgtggaccgtgtaccacggagccggaacaagaaccatcgcctctccaaagggccctgtgacccaaatgtacaccaacgtggacaaggacctcgtgggatggcaggcccctcagggcagccggagcctgaccccttgcacctgcggcagcagcgacctgtacctggtgacacggcacgccgatgtgattcctgtgcggcggaggggcgacagcagaggcagcctgctgagccctagacccatcagctacctgaagggcagcgccggcggacctctgctgtgccccgccggccacgctgtgggcatcttccgtgccgctgtgtctaccagaggcgtcgccaaggccgttgacttcatccccgtcgagagcctggaaaccaccatgagaagccccggctctggcgcggccgctagcggcggcggcggcagcggcggaggcggaagcggcggtgccagacccggcgagcggccttttcagtgccggatctgtatgagaaacttcagcagacaggacagactggaccggcacacaagaacccacaccggcgagaagcctttccagtgcagaatctgcatgaggaatttctctcagaaggaacacctggccggccacctgagaacacacaccggagaaaaaccattccaatgtagaatctgcatgcggaacttctcccgcagagataacctgaacagacacctgaagacccatctgcggggcagcggcagtggggagggcagaggaagccttcttacttgcggcgatgttgaagagaaccccgggccaatggtgagcaagggcgaggaggacaacatggccatcatcaaggagttcatgaggttcaaggtgcacatggagggcagcgtgaacggccacgagttcgagatcgagggcgagggcgagggcaggccctacgagggcacccagaccgccaagctgaaggtgaccaagggcggccccctgcccttcgcctgggacatcctgagcccccagttcatgtacggcagcaaggcctacgtgaagcaccccgccgacatccccgactacctgaagctgagcttccccgagggcttcaagtgggagagggtgatgaacttcgaggacggcggcgtggtgaccgtgacccaggacagcagcctgcaggacggcgagttcatctacaaggtgaagctgaggggcaccaacttccccagcgacggccccgtgatgcagaagaagaccatgggctgggaggccagcagcgagaggatgtaccccgaggacggcgccctgaagggcgagatcaagcagaggctgaagctgaaggacggcggccactacgacgccgaggtgaagaccacctacaaggccaagaagcccgtgcagctgcccggcgcctacaacgtgaacatcaagctggacatcaccagccacaacgaggactacaccatcgtggagcagtacgagagggccgagggcaggcacagcaccggcggcatggacgagctgtacaagggatccggagctactaacttcagcctgctgaagcaggctggagatgtggaggagaaccctggacctatcgattcctccgatgaggaagaggcaagggagctgatcgagagagccaaggaagccgcagagcgggcacaagaggccgctgaacgcacgggagatccacgggtccgcgaactcgctagggaattgaagcgtctagcgcaagaggctgcagaggaagttaaaagagacccatcttcctctgacgtcaatgaggccctgaaactcatcgtcgaggcaattgaagccgccgttgacgcccttgaggcggcagagcgcaccggagatcccgaggttcgcgaactggccagagaacttgttagactggctgtcgaagctgcagaggaggtgcaaaggaacccctcttcttccgatgttaacgaggccttgcattctattgtctacgccatcgaggccgctatctttgccctcgaggccgctgaaaggacgggtgacccagaagtgagagaactggcaagggagttggttcggctggcagtcgaggctgctgaggaggtgcaacggaacccatcctctaggaacgtcgaacacgcgttgatgcgcatcgttctggccatctaccttgccgaggaaaacctgcgggaggcagaagagagcggagatccagaaaaacgagagaaggctcgcgagcgggtcagagaagccgtcgaacgggccgaagaagtgcaaagagatcccagcggctggctgaaccattccggtggaggttcaggagtcgacggtagccccaagaaaaagagaaaggtcggtagcgtgctgcctcaagcccctgctccagcccccgctccagccatggtgtccgccctggcccaggcccctgcccctgtgcctgtgctggcccctggacctcctcaagccgtcgcccctccagcccctaagcctacacaggccggcgagggaacactgtctgaagccctgctgcagctgcaatttgacgacgaggacctgggagccctgcttggcaatagcaccgatcctgctgtgttcaccgacctggcttctgtggacaacagcgagttccagcagctcctgaaccagggcatccccgttgccccccacacaaccgagcctatgctgatggaataccccgaggccatcaccagactggtgaccggcgctcagcggccccccgaccccgcccctgcaccactgggcgcccctggcctgcctaacggcctgctgtccggcgatgaagatttcagcagcatcgccgatatggacttcagcgccctgctgtgataaggtacctttaagaccaatgacttacaaggcagctgtagatcttagc

SEQ ID NO: 124 - DNA, 3935 bp, Artificial Sequence
  Synthetic polynucleotide TFV12
ttcgaacgcgttgaaagaccccacctgtaggtttggcaagctaggatcaaggttaggaacagagagacagcagaatatgggccaaacaggatatctgtggtaagcagttcctgccccggctcagggccaagaacagttggaacagcagaatatgggccaaacaggatatctgtggtaagcagttcctgccccggctcagggccaagaacagatggtccccagatgcggtcccgccctcagcagtttctagagaaccatcagatgtttccagggtgccccaaggacctgaaatgaccctgtgccttatttgaactaaccaatcagttcgcttctcgcttctgttcgcgcgcttctgctccccgagctcaataaaagagcccacaacccctcactcggcgcgatcagaacctcttacgagtcggctagcgccaccatgcctaagaagaaaagaaaggtgtccggtggctctggaggcaagaaaaagggctctgtggtgatcgtgggcagaatcaatctgagcggagataccgcctatgcccagcagacacgcggagaggaaggttgtcaggagacatcccagaccggcagagataaaaaccaggtggaaggcgaggtgcagatcgtgtccaccgctacacaaacatttctggccacatctatcaacggcgtgctgtggaccgtgtaccacggagccggaacaagaaccatcgcctctccaaagggccctgtgacccaaatgtacaccaacgtggacaaggacctcgtgggatggcaggcccctcagggcagccggagcctgaccccttgcacctgcggcagcagcgacctgtacctggtgacacggcacgccgatgtgattcctgtgcggcggaggggcgacagcagaggcagcctgctgagccctagacccatcagctacctgaagggcagcgccggcggacctctgctgtgccccgccggccacgctgtgggcatcttccgtgccgctgtgtctaccagaggcgtcgccaaggccgttgacttcatccccgtcgagagcctggaaaccaccatgagaagccccggctctggcgcggccgctagcggcggcggcggcagcggcggaggcggaagcggcggtgccagacccggcgagcggccattccagtgcagaatctgcatgcggaacttctccagaaacttcatcctgcagagacacacccggacccacacaggcgaaaaaccttttcagtgccggatctgcatgagaaatttcagcgacagagccaacctgcggagacacctgagaacacacaccggagagaagcctttccaatgtagaatctgtatgcgcaacttttctcgtcatgatcagctgaccagacacctgaagacccacctgaggggcagcggcagtggggagggcagaggaagccttcttacttgcggcgatgttgaagagaaccccgggccaatggtgagcaagggcgaggaggacaacatggccatcatcaaggagttcatgaggttcaaggtgcacatggagggcagcgtgaacggccacgagttcgagatcgagggcgagggcgagggcaggccctacgagggcacccagaccgccaagctgaaggtgaccaagggcggccccctgcccttcgcctgggacatcctgagcccccagttcatgtacggcagcaaggcctacgtgaagcaccccgccgacatccccgactacctgaagctgagcttccccgagggcttcaagtgggagagggtgatgaacttcgaggacggcggcgtggtgaccgtgacccaggacagcagcctgcaggacggcgagttcatctacaaggtgaagctgaggggcaccaacttccccagcgacggccccgtgatgcagaagaagaccatgggctgggaggccagcagcgagaggatgtaccccgaggacggcgccctgaagggcgagatcaagcagaggctgaagctgaaggacggcggccactacgacgccgaggtgaagaccacctacaaggccaagaagcccgtgcagctgcccggcgcctacaacgtgaacatcaagctggacatcaccagccacaacgaggactacaccatcgtggagcagtacgagagggccgagggcaggcacagcaccggcggcatggacgagctgtacaagggatccggagctactaacttcagcctgctgaagcaggctggagatgtggaggagaaccctggacctatcgattcctccgatgaggaagaggcaagggagctgatcgagagagccaaggaagccgcagagcgggcacaagaggccgctgaacgcacgggagatccacgggtccgcgaactcgctagggaattgaagcgtctagcgcaagaggctgcagaggaagttaaaagagacccatcttcctctgacgtcaatgaggccctgaaactcatcgtcgaggcaattgaagccgccgttgacgcccttgaggcggcagagcgcaccggagatcccgaggttcgcgaactggccagagaacttgttagactggctgtcgaagctgcagaggaggtgcaaaggaacccctcttcttccgatgttaacgaggccttgcattctattgtctacgccatcgaggccgctatctttgccctcgaggccgctgaaaggacgggtgacccagaagtgagagaactggcaagggagttggttcggctggcagtcgaggctgctgaggaggtgcaacggaacccatcctctaggaacgtcgaacacgcgttgatgcgcatcgttctggccatctaccttgccgaggaaaacctgcgggaggcagaagagagcggagatccagaaaaacgagagaaggctcgcgagcgggtcagagaagccgtcgaacgggccgaagaagtgcaaagagatcccagcggctggctgaaccattccggtggaggttcaggagctagcgatgcactggatgattttgacttggacatgctcggtagcgacgctcttgatgacttcgatctcgacatgctgggttccgatgccctcgatgatttcgatctggacatgttgggctctgacgccctggacgatttcgacctggatatgctgatcaattcccggagctcagggtctcctaagaaaaagcgcaaagttggcagtggaggcggaagcggagggtcaggttctgtgcttcctcaagcgccggctccggcccctgcacctgcaatggtgtctgctctcgcgcaagcacccgcaccggttccggttctggcaccaggaccccctcaagccgttgccccacctgcaccaaagcccacccaagcgggcgaaggaaccttgtccgaggccttgctccaactgcaatttgatgacgaggacctgggtgcacttctgggcaactcaaccgaccccgctgtattcactgatctggcttctgtggacaatagcgagtttcagcaactactaaaccagggcatccccgtggctcctcacactaccgagcctatgctgatggaataccccgaggcaataacgagactcgttaccggagcccaaaggccacctgatcctgctcctgcgccactcggcgcgcccggcctcccaaatgggctccttagcggcgatgaagacttcagtagtattgccgacatggacttctccgctctcctatccggtggtggaagcggcggctccggctctgacctgtctcatccaccgccacgaggacacctggatgagctgaccacaacactcgaatcaatgacagaggatctgaatttggactccccactgacaccagaactgaacgaaattctggataccttcctgaatgatgagtgccttctgcacgccatgcatatcagcaccggcctctccatcttcgacactagtctgttctgataaggtacctttaagaccaatgacttacaaggcagctgtagatcttagc

SEQ ID NO: 125 - DNA, 3407 bp, Artificial Sequence
  Synthetic polynucleotide TFV13
ttcgaacgcgttgaaagaccccacctgtaggtttggcaagctaggatcaaggttaggaacagagagacagcagaatatgggccaaacaggatatctgtggtaagcagttcctgccccggctcagggccaagaacagttggaacagcagaatatgggccaaacaggatatctgtggtaagcagttcctgccccggctcagggccaagaacagatggtccccagatgcggtcccgccctcagcagtttctagagaaccatcagatgtttccagggtgccccaaggacctgaaatgaccctgtgccttatttgaactaaccaatcagttcgcttctcgcttctgttcgcgcgcttctgctccccgagctcaataaaagagcccacaacccctcactcggcgcgatcagaacctcttacgagtcggctagcgccaccatgcctaagaagaaaagaaaggtgtccggtggctctggaggcaagaaaaagggctctgtggtgatcgtgggcagaatcaatctgagcggagataccgcctatgcccagcagacacgcggagaggaaggttgtcaggagacatcccagaccggcagagataaaaaccaggtggaaggcgaggtgcagatcgtgtccaccgctacacaaacatttctggccacatctatcaacggcgtgctgtggaccgtgtaccacggagccggaacaagaaccatcgcctctccaaagggccctgtgacccaaatgtacaccaacgtggacaaggacctcgtgggatggcaggcccctcagggcagccggagcctgaccccttgcacctgcggcagcagcgacctgtacctggtgacacggcacgccgatgtgattcctgtgcggcggaggggcgacagcagaggcagcctgctgagccctagacccatcagctacctgaagggcagcgccggcggacctctgctgtgccccgccggccacgctgtgggcatcttccgtgccgctgtgtctaccagaggcgtcgccaaggccgttgacttcatccccgtcgagagcctggaaaccaccatgagaagccccggctctggcgcggccgctagcggcggcggcggcagcggcggaggcggaagcggcggtgccagacccggcgagcggccattccagtgcagaatctgcatgcggaacttctccagaaacttcatcctgcagagacacacccggacccacacaggcgaaaaaccttttcagtgccggatctgcatgagaaatttcagcgacagagccaacctgcggagacacctgagaacacacaccggagagaagcctttccaatgtagaatctgtatgcgcaacttttctcgtcatgatcagctgaccagacacctgaagacccacctgaggggcagcggcagtggggagggcagaggaagccttcttacttgcggcgatgttgaagagaaccccgggccaatggtgagcaagggcgaggaggacaacatggccatcatcaaggagttcatgaggttcaaggtgcacatggagggcagcgtgaacggccacgagttcgagatcgagggcgagggcgagggcaggccctacgagggcacccagaccgccaagctgaaggtgaccaagggcggccccctgcccttcgcctgggacatcctgagcccccagttcatgtacggcagcaaggcctacgtgaagcaccccgccgacatccccgactacctgaagctgagcttccccgagggcttcaagtgggagagggtgatgaacttcgaggacggcggcgtggtgaccgtgacccaggacagcagcctgcaggacggcgagttcatctacaaggtgaagctgaggggcaccaacttccccagcgacggccccgtgatgcagaagaagaccatgggctgggaggccagcagcgagaggatgtaccccgaggacggcgccctgaagggcgagatcaagcagaggctgaagctgaaggacggcggccactacgacgccgaggtgaagaccacctacaaggccaagaagcccgtgcagctgcccggcgcctacaacgtgaacatcaagctggacatcaccagccacaacgaggactacaccatcgtggagcagtacgagagggccgagggcaggcacagcaccggcggcatggacgagctgtacaagggatccggagctactaacttcagcctgctgaagcaggctggagatgtggaggagaaccctggacctatcgattcctccgatgaggaagaggcaagggagctgatcgagagagccaaggaagccgcagagcgggcacaagaggccgctgaacgcacgggagatccacgggtccgcgaactcgctagggaattgaagcgtctagcgcaagaggctgcagaggaagttaaaagagacccatcttcctctgacgtcaatgaggccctgaaactcatcgtcgaggcaattgaagccgccgttgacgcccttgaggcggcagagcgcaccggagatcccgaggttcgcgaactggccagagaacttgttagactggctgtcgaagctgcagaggaggtgcaaaggaacccctcttcttccgatgttaacgaggccttgcattctattgtctacgccatcgaggccgctatctttgccctcgaggccgctgaaaggacgggtgacccagaagtgagagaactggcaagggagttggttcggctggcagtcgaggctgctgaggaggtgcaacggaacccatcctctaggaacgtcgaacacgcgttgatgcgcatcgttctggccatctaccttgccgaggaaaacctgcgggaggcagaagagagcggagatccagaaaaacgagagaaggctcgcgagcgggtcagagaagccgtcgaacgggccgaagaagtgcaaagagatcccagcggctggctgaaccattccggtggaggttcaggagtcgacggtagccccaagaaaaagagaaaggtcggtagcgatgccttagacgactttgatctggacatgctgggctccgatgcactggatgattttgacttggacatgctcggcagcgacgccctggacgacttcgacctggacatgctgggttccgatgctctggacgatttcgatctggatatgcttggctctggcagcggctctggatctggcagcgacctcagccatcctccacctcgtggccacctggatgaactgacaaccacactggaaagcatgaccgaggacctgaacctggacagccccctgacccctgagctgaatgagatcctggataccttcctgaacgacgagtgcctgctgcacgccatgcacatcagcacaggcctgagcatcttcgacaccagcctgttctgataaggtacctttaagaccaatgacttacaaggcagctgtagatcttagc

SEQ ID NO: 126 - DNA, 3896 bp, Artificial Sequence
  Synthetic polynucleotide TFV14
ttcgaacgcgttgaaagaccccacctgtaggtttggcaagctaggatcaaggttaggaacagagagacagcagaatatgggccaaacaggatatctgtggtaagcagttcctgccccggctcagggccaagaacagttggaacagcagaatatgggccaaacaggatatctgtggtaagcagttcctgccccggctcagggccaagaacagatggtccccagatgcggtcccgccctcagcagtttctagagaaccatcagatgtttccagggtgccccaaggacctgaaatgaccctgtgccttatttgaactaaccaatcagttcgcttctcgcttctgttcgcgcgcttctgctccccgagctcaataaaagagcccacaacccctcactcggcgcgatcagaacctcttacgagtcggctagcgccaccatgcctaagaagaaaagaaaggtgtccggtggctctggaggcaagaaaaagggctctgtggtgatcgtgggcagaatcaatctgagcggagataccgcctatgcccagcagacacgcggagaggaaggttgtcaggagacatcccagaccggcagagataaaaaccaggtggaaggcgaggtgcagatcgtgtccaccgctacacaaacatttctggccacatctatcaacggcgtgctgtggaccgtgtaccacggagccggaacaagaaccatcgcctctccaaagggccctgtgacccaaatgtacaccaacgtggacaaggacctcgtgggatggcaggcccctcagggcagccggagcctgaccccttgcacctgcggcagcagcgacctgtacctggtgacacggcacgccgatgtgattcctgtgcggcggaggggcgacagcagaggcagcctgctgagccctagacccatcagctacctgaagggcagcgccggcggacctctgctgtgccccgccggccacgctgtgggcatcttccgtgccgctgtgtctaccagaggcgtcgccaaggccgttgacttcatccccgtcgagagcctggaaaccaccatgagaagccccggctctggcgcggccgctagcggcggcggcggcagcggcggaggcggaagcggcggtgccagacccggcgagcggccattccagtgcagaatctgcatgcggaacttctccagaaacttcatcctgcagagacacacccggacccacacaggcgaaaaaccttttcagtgccggatctgcatgagaaatttcagcgacagagccaacctgcggagacacctgagaacacacaccggagagaagcctttccaatgtagaatctgtatgcgcaacttttctcgtcatgatcagctgaccagacacctgaagacccacctgaggggcagcggcagtggggagggcagaggaagccttcttacttgcggcgatgttgaagagaaccccgggccaatggtgagcaagggcgaggaggacaacatggccatcatcaaggagttcatgaggttcaaggtgcacatggagggcagcgtgaacggccacgagttcgagatcgagggcgagggcgagggcaggccctacgagggcacccagaccgccaagctgaaggtgaccaagggcggccccctgcccttcgcctgggacatcctgagcccccagttcatgtacggcagcaaggcctacgtgaagcaccccgccgacatccccgactacctgaagctgagcttccccgagggcttcaagtgggagagggtgatgaacttcgaggacggcggcgtggtgaccgtgacccaggacagcagcctgcaggacggcgagttcatctacaaggtgaagctgaggggcaccaacttccccagcgacggccccgtgatgcagaagaagaccatgggctgggaggccagcagcgagaggatgtaccccgaggacggcgccctgaagggcgagatcaagcagaggctgaagctgaaggacggcggccactacgacgccgaggtgaagaccacctacaaggccaagaagcccgtgcagctgcccggcgcctacaacgtgaacatcaagctggacatcaccagccacaacgaggactacaccatcgtggagcagtacgagagggccgagggcaggcacagcaccggcggcatggacgagctgtacaagggatccggagctactaacttcagcctgctgaagcaggctggagatgtggaggagaaccctggacctatcgattcctccgatgaggaagaggcaagggagctgatcgagagagccaaggaagccgcagagcgggcacaagaggccgctgaacgcacgggagatccacgggtccgcgaactcgctagggaattgaagcgtctagcgcaagaggctgcagaggaagttaaaagagacccatcttcctctgacgtcaatgaggccctgaaactcatcgtcgaggcaattgaagccgccgttgacgcccttgaggcggcagagcgcaccggagatcccgaggttcgcgaactggccagagaacttgttagactggctgtcgaagctgcagaggaggtgcaaaggaacccctcttcttccgatgttaacgaggccttgcattctattgtctacgccatcgaggccgctatctttgccctcgaggccgctgaaaggacgggtgacccagaagtgagagaactggcaagggagttggttcggctggcagtcgaggctgctgaggaggtgcaacggaacccatcctctaggaacgtcgaacacgcgttgatgcgcatcgttctggccatctaccttgccgaggaaaacctgcgggaggcagaagagagcggagatccagaaaaacgagagaaggctcgcgagcgggtcagagaagccgtcgaacgggccgaagaagtgcaaagagatcccagcggctggctgaaccattccggtggaggttcaggagtcgacggtagccccaagaaaaagagaaaggtcggtagcgtcctgcctcaggcccctgctccagctccagcccctgccatggtgtccgccctggcccaggcccctgcacccgtgcccgtgctggccccaggccctccacaagccgtggcccctcctgcccctaagcccacccaggctggcgaaggcaccctgagcgaggcccttttgcagctgcagttcgacgacgaggacctgggcgccctgctcggcaatagcaccgaccccgctgtgttcaccgatctggcttctgtggacaacagcgaattccagcagctgctcaaccagggcatccccgtggccccccacaccaccgagcccatgctgatggaataccccgaggccatcacaagactggtgaccggcgctcagcggccccccgaccccgcccctgcccctctgggagcccctggcctgcctaacggcctgctgagcggagatgaggacttctcctccatcgccgacatggacttctctgccctgctgagcggcagcggcggcttcagcgtggacaccagcgccctgctggacctgttcagccccagcgtgacagtgcctgatatgagcctgcccgatctggacagcagcctggcctctatccaggagctgctgtctcctcaagagcctcctagacctccagaagctgaaaacagcagccctgattccggaaaacagctggtccactacacagcccaacctctgttcctgctggaccctggatctgttgataccggcagcaacgacctgcctgtgctgtttgagctgggcgaaggcagctacttcagcgagggcgacggctttgccgaggaccctacaatcagcctgctgactggaagcgagcctccaaaggccaaggaccctaccgtgtcttgataaggtacctttaagaccaatgacttacaaggcagctgtagatcttagc

SEQ ID NO: 127 - DNA, 3935 bp, Artificial Sequence
  Synthetic polynucleotide TFV15
ttcgaacgcgttgaaagaccccacctgtaggtttggcaagctaggatcaaggttaggaacagagagacagcagaatatgggccaaacaggatatctgtggtaagcagttcctgccccggctcagggccaagaacagttggaacagcagaatatgggccaaacaggatatctgtggtaagcagttcctgccccggctcagggccaagaacagatggtccccagatgcggtcccgccctcagcagtttctagagaaccatcagatgtttccagggtgccccaaggacctgaaatgaccctgtgccttatttgaactaaccaatcagttcgcttctcgcttctgttcgcgcgcttctgctccccgagctcaataaaagagcccacaacccctcactcggcgcgatcagaacctcttacgagtcggctagcgccaccatgcctaagaagaaaagaaaggtgtccggtggctctggaggcaagaaaaagggctctgtggtgatcgtgggcagaatcaatctgagcggagataccgcctatgcccagcagacacgcggagaggaaggttgtcaggagacatcccagaccggcagagataaaaaccaggtggaaggcgaggtgcagatcgtgtccaccgctacacaaacatttctggccacatctatcaacggcgtgctgtggaccgtgtaccacggagccggaacaagaaccatcgcctctccaaagggccctgtgacccaaatgtacaccaacgtggacaaggacctcgtgggatggcaggcccctcagggcagccggagcctgaccccttgcacctgcggcagcagcgacctgtacctggtgacacggcacgccgatgtgattcctgtgcggcggaggggcgacagcagaggcagcctgctgagccctagacccatcagctacctgaagggcagcgccggcggacctctgctgtgccccgccggccacgctgtgggcatcttccgtgccgctgtgtctaccagaggcgtcgccaaggccgttgacttcatccccgtcgagagcctggaaaccaccatgagaagccccggctctggcgcggccgctagcggcggcggcggcagcggcggaggcggaagcggcggtgccagaccaggcgagagacctttccaatgtagaatctgtatgcggaacttcagcgacaagaccaagctgagagtgcacaccagaacacacacaggcgagaagcccttccagtgcagaatctgcatgcgcaacttctccgtgcggcacaacctgacaagacacctgaggacccacaccggagaaaagcctttccagtgccggatctgcatgagaaatttttctcagagcaccagcctgcagagacatctgaaaacccacctgcggggcagcggcagtggggagggcagaggaagccttcttacttgcggcgatgttgaagagaaccccgggccaatggtgagcaagggcgaggaggacaacatggccatcatcaaggagttcatgaggttcaaggtgcacatggagggcagcgtgaacggccacgagttcgagatcgagggcgagggcgagggcaggccctacgagggcacccagaccgccaagctgaaggtgaccaagggcggccccctgcccttcgcctgggacatcctgagcccccagttcatgtacggcagcaaggcctacgtgaagcaccccgccgacatccccgactacctgaagctgagcttccccgagggcttcaagtgggagagggtgatgaacttcgaggacggcggcgtggtgaccgtgacccaggacagcagcctgcaggacggcgagttcatctacaaggtgaagctgaggggcaccaacttccccagcgacggccccgtgatgcagaagaagaccatgggctgggaggccagcagcgagaggatgtaccccgaggacggcgccctgaagggcgagatcaagcagaggctgaagctgaaggacggcggccactacgacgccgaggtgaagaccacctacaaggccaagaagcccgtgcagctgcccggcgcctacaacgtgaacatcaagctggacatcaccagccacaacgaggactacaccatcgtggagcagtacgagagggccgagggcaggcacagcaccggcggcatggacgagctgtacaagggatccggagctactaacttcagcctgctgaagcaggctggagatgtggaggagaaccctggacctatcgattcctccgatgaggaagaggcaagggagctgatcgagagagccaaggaagccgcagagcgggcacaagaggccgctgaacgcacgggagatccacgggtccgcgaactcgctagggaattgaagcgtctagcgcaagaggctgcagaggaagttaaaagagacccatcttcctctgacgtcaatgaggccctgaaactcatcgtcgaggcaattgaagccgccgttgacgcccttgaggcggcagagcgcaccggagatcccgaggttcgcgaactggccagagaacttgttagactggctgtcgaagctgcagaggaggtgcaaaggaacccctcttcttccgatgttaacgaggccttgcattctattgtctacgccatcgaggccgctatctttgccctcgaggccgctgaaaggacgggtgacccagaagtgagagaactggcaagggagttggttcggctggcagtcgaggctgctgaggaggtgcaacggaacccatcctctaggaacgtcgaacacgcgttgatgcgcatcgttctggccatctaccttgccgaggaaaacctgcgggaggcagaagagagcggagatccagaaaaacgagagaaggctcgcgagcgggtcagagaagccgtcgaacgggccgaagaagtgcaaagagatcccagcggctggctgaaccattccggtggaggttcaggagctagcgatgcactggatgattttgacttggacatgctcggtagcgacgctcttgatgacttcgatctcgacatgctgggttccgatgccctcgatgatttcgatctggacatgttgggctctgacgccctggacgatttcgacctggatatgctgatcaattcccggagctcagggtctcctaagaaaaagcgcaaagttggcagtggaggcggaagcggagggtcaggttctgtgcttcctcaagcgccggctccggcccctgcacctgcaatggtgtctgctctcgcgcaagcacccgcaccggttccggttctggcaccaggaccccctcaagccgttgccccacctgcaccaaagcccacccaagcgggcgaaggaaccttgtccgaggccttgctccaactgcaatttgatgacgaggacctgggtgcacttctgggcaactcaaccgaccccgctgtattcactgatctggcttctgtggacaatagcgagtttcagcaactactaaaccagggcatccccgtggctcctcacactaccgagcctatgctgatggaataccccgaggcaataacgagactcgttaccggagcccaaaggccacctgatcctgctcctgcgccactcggcgcgcccggcctcccaaatgggctccttagcggcgatgaagacttcagtagtattgccgacatggacttctccgctctcctatccggtggtggaagcggcggctccggctctgacctgtctcatccaccgccacgaggacacctggatgagctgaccacaacactcgaatcaatgacagaggatctgaatttggactccccactgacaccagaactgaacgaaattctggataccttcctgaatgatgagtgccttctgcacgccatgcatatcagcaccggcctctccatcttcgacactagtctgttctgataaggtacctttaagaccaatgacttacaaggcagctgtagatcttagc

SEQ ID NO: 128 - DNA, 3407 bp, Artificial Sequence
  Synthetic polynucleotide TFV16
ttcgaacgcgttgaaagaccccacctgtaggtttggcaagctaggatcaaggttaggaacagagagacagcagaatatgggccaaacaggatatctgtggtaagcagttcctgccccggctcagggccaagaacagttggaacagcagaatatgggccaaacaggatatctgtggtaagcagttcctgccccggctcagggccaagaacagatggtccccagatgcggtcccgccctcagcagtttctagagaaccatcagatgtttccagggtgccccaaggacctgaaatgaccctgtgccttatttgaactaaccaatcagttcgcttctcgcttctgttcgcgcgcttctgctccccgagctcaataaaagagcccacaacccctcactcggcgcgatcagaacctcttacgagtcggctagcgccaccatgcctaagaagaaaagaaaggtgtccggtggctctggaggcaagaaaaagggctctgtggtgatcgtgggcagaatcaatctgagcggagataccgcctatgcccagcagacacgcggagaggaaggttgtcaggagacatcccagaccggcagagataaaaaccaggtggaaggcgaggtgcagatcgtgtccaccgctacacaaacatttctggccacatctatcaacggcgtgctgtggaccgtgtaccacggagccggaacaagaaccatcgcctctccaaagggccctgtgacccaaatgtacaccaacgtggacaaggacctcgtgggatggcaggcccctcagggcagccggagcctgaccccttgcacctgcggcagcagcgacctgtacctggtgacacggcacgccgatgtgattcctgtgcggcggaggggcgacagcagaggcagcctgctgagccctagacccatcagctacctgaagggcagcgccggcggacctctgctgtgccccgccggccacgctgtgggcatcttccgtgccgctgtgtctaccagaggcgtcgccaaggccgttgacttcatccccgtcgagagcctggaaaccaccatgagaagccccggctctggcgcggccgctagcggcggcggcggcagcggcggaggcggaagcggcggtgccagaccaggcgagagacctttccaatgtagaatctgtatgcggaacttcagcgacaagaccaagctgagagtgcacaccagaacacacacaggcgagaagcccttccagtgcagaatctgcatgcgcaacttctccgtgcggcacaacctgacaagacacctgaggacccacaccggagaaaagcctttccagtgccggatctgcatgagaaatttttctcagagcaccagcctgcagagacatctgaaaacccacctgcggggcagcggcagtggggagggcagaggaagccttcttacttgcggcgatgttgaagagaaccccgggccaatggtgagcaagggcgaggaggacaacatggccatcatcaaggagttcatgaggttcaaggtgcacatggagggcagcgtgaacggccacgagttcgagatcgagggcgagggcgagggcaggccctacgagggcacccagaccgccaagctgaaggtgaccaagggcggccccctgcccttcgcctgggacatcctgagcccccagttcatgtacggcagcaaggcctacgtgaagcaccccgccgacatccccgactacctgaagctgagcttccccgagggcttcaagtgggagagggtgatgaacttcgaggacggcggcgtggtgaccgtgacccaggacagcagcctgcaggacggcgagttcatctacaaggtgaagctgaggggcaccaacttccccagcgacggccccgtgatgcagaagaagaccatgggctgggaggccagcagcgagaggatgtaccccgaggacggcgccctgaagggcgagatcaagcagaggctgaagctgaaggacggcggccactacgacgccgaggtgaagaccacctacaaggccaagaagcccgtgcagctgcccggcgcctacaacgtgaacatcaagctggacatcaccagccacaacgaggactacaccatcgtggagcagtacgagagggccgagggcaggcacagcaccggcggcatggacgagctgtacaagggatccggagctactaacttcagcctgctgaagcaggctggagatgtggaggagaaccctggacctatcgattcctccgatgaggaagaggcaagggagctgatcgagagagccaaggaagccgcagagcgggcacaagaggccgctgaacgcacgggagatccacgggtccgcgaactcgctagggaattgaagcgtctagcgcaagaggctgcagaggaagttaaaagagacccatcttcctctgacgtcaatgaggccctgaaactcatcgtcgaggcaattgaagccgccgttgacgcccttgaggcggcagagcgcaccggagatcccgaggttcgcgaactggccagagaacttgttagactggctgtcgaagctgcagaggaggtgcaaaggaacccctcttcttccgatgttaacgaggccttgcattctattgtctacgccatcgaggccgctatctttgccctcgaggccgctgaaaggacgggtgacccagaagtgagagaactggcaagggagttggttcggctggcagtcgaggctgctgaggaggtgcaacggaacccatcctctaggaacgtcgaacacgcgttgatgcgcatcgttctggccatctaccttgccgaggaaaacctgcgggaggcagaagagagcggagatccagaaaaacgagagaaggctcgcgagcgggtcagagaagccgtcgaacgggccgaagaagtgcaaagagatcccagcggctggctgaaccattccggtggaggttcaggagtcgacggtagccccaagaaaaagagaaaggtcggtagcgatgccttagacgactttgatctggacatgctgggctccgatgcactggatgattttgacttggacatgctcggcagcgacgccctggacgacttcgacctggacatgctgggttccgatgctctggacgatttcgatctggatatgcttggctctggcagcggctctggatctggcagcgacctcagccatcctccacctcgtggccacctggatgaactgacaaccacactggaaagcatgaccgaggacctgaacctggacagccccctgacccctgagctgaatgagatcctggataccttcctgaacgacgagtgcctgctgcacgccatgcacatcagcacaggcctgagcatcttcgacaccagcctgttctgataaggtacctttaagaccaatgacttacaaggcagctgtagatcttagc

SEQ ID NO: 129 - DNA, 3896 bp, Artificial Sequence
  Synthetic polynucleotide TFV17
ttcgaacgcgttgaaagaccccacctgtaggtttggcaagctaggatcaaggttaggaacagagagacagcagaatatgggccaaacaggatatctgtggtaagcagttcctgccccggctcagggccaagaacagttggaacagcagaatatgggccaaacaggatatctgtggtaagcagttcctgccccggctcagggccaagaacagatggtccccagatgcggtcccgccctcagcagtttctagagaaccatcagatgtttccagggtgccccaaggacctgaaatgaccctgtgccttatttgaactaaccaatcagttcgcttctcgcttctgttcgcgcgcttctgctccccgagctcaataaaagagcccacaacccctcactcggcgcgatcagaacctcttacgagtcggctagcgccaccatgcctaagaagaaaagaaaggtgtccggtggctctggaggcaagaaaaagggctctgtggtgatcgtgggcagaatcaatctgagcggagataccgcctatgcccagcagacacgcggagaggaaggttgtcaggagacatcccagaccggcagagataaaaaccaggtggaaggcgaggtgcagatcgtgtccaccgctacacaaacatttctggccacatctatcaacggcgtgctgtggaccgtgtaccacggagccggaacaagaaccatcgcctctccaaagggccctgtgacccaaatgtacaccaacgtggacaaggacctcgtgggatggcaggcccctcagggcagccggagcctgaccccttgcacctgcggcagcagcgacctgtacctggtgacacggcacgccgatgtgattcctgtgcggcggaggggcgacagcagaggcagcctgctgagccctagacccatcagctacctgaagggcagcgccggcggacctctgctgtgccccgccggccacgctgtgggcatcttccgtgccgctgtgtctaccagaggcgtcgccaaggccgttgacttcatccccgtcgagagcctggaaaccaccatgagaagccccggctctggcgcggccgctagcggcggcggcggcagcggcggaggcggaagcggcggtgccagaccaggcgagagacctttccaatgtagaatctgtatgcggaacttcagcgacaagaccaagctgagagtgcacaccagaacacacacaggcgagaagcccttccagtgcagaatctgcatgcgcaacttctccgtgcggcacaacctgacaagacacctgaggacccacaccggagaaaagcctttccagtgccggatctgcatgagaaatttttctcagagcaccagcctgcagagacatctgaaaacccacctgcggggcagcggcagtggggagggcagaggaagccttcttacttgcggcgatgttgaagagaaccccgggccaatggtgagcaagggcgaggaggacaacatggccatcatcaaggagttcatgaggttcaaggtgcacatggagggcagcgtgaacggccacgagttcgagatcgagggcgagggcgagggcaggccctacgagggcacccagaccgccaagctgaaggtgaccaagggcggccccctgcccttcgcctgggacatcctgagcccccagttcatgtacggcagcaaggcctacgtgaagcaccccgccgacatccccgactacctgaagctgagcttccccgagggcttcaagtgggagagggtgatgaacttcgaggacggcggcgtggtgaccgtgacccaggacagcagcctgcaggacggcgagttcatctacaaggtgaagctgaggggcaccaacttccccagcgacggccccgtgatgcagaagaagaccatgggctgggaggccagcagcgagaggatgtaccccgaggacggcgccctgaagggcgagatcaagcagaggctgaagctgaaggacggcggccactacgacgccgaggtgaagaccacctacaaggccaagaagcccgtgcagctgcccggcgcctacaacgtgaacatcaagctggacatcaccagccacaacgaggactacaccatcgtggagcagtacgagagggccgagggcaggcacagcaccggcggcatggacgagctgtacaagggatccggagctactaacttcagcctgctgaagcaggctggagatgtggaggagaaccctggacctatcgattcctccgatgaggaagaggcaagggagctgatcgagagagccaaggaagccgcagagcgggcacaagaggccgctgaacgcacgggagatccacgggtccgcgaactcgctagggaattgaagcgtctagcgcaagaggctgcagaggaagttaaaagagacccatcttcctctgacgtcaatgaggccctgaaactcatcgtcgaggcaattgaagccgccgttgacgcccttgaggcggcagagcgcaccggagatcccgaggttcgcgaactggccagagaacttgttagactggctgtcgaagctgcagaggaggtgcaaaggaacccctcttcttccgatgttaacgaggccttgcattctattgtctacgccatcgaggccgctatctttgccctcgaggccgctgaaaggacgggtgacccagaagtgagagaactggcaagggagttggttcggctggcagtcgaggctgctgaggaggtgcaacggaacccatcctctaggaacgtcgaacacgcgttgatgcgcatcgttctggccatctaccttgccgaggaaaacctgcgggaggcagaagagagcggagatccagaaaaacgagagaaggctcgcgagcgggtcagagaagccgtcgaacgggccgaagaagtgcaaagagatcccagcggctggctgaaccattccggtggaggttcaggagtcgacggtagccccaagaaaaagagaaaggtcggtagcgtcctgcctcaggcccctgctccagctccagcccctgccatggtgtccgccctggcccaggcccctgcacccgtgcccgtgctggccccaggccctccacaagccgtggcccctcctgcccctaagcccacccaggctggcgaaggcaccctgagcgaggcccttttgcagctgcagttcgacgacgaggacctgggcgccctgctcggcaatagcaccgaccccgctgtgttcaccgatctggcttctgtggacaacagcgaattccagcagctgctcaaccagggcatccccgtggccccccacaccaccgagcccatgctgatggaataccccgaggccatcacaagactggtgaccggcgctcagcggccccccgaccccgcccctgcccctctgggagcccctggcctgcctaacggcctgctgagcggagatgaggacttctcctccatcgccgacatggacttctctgccctgctgagcggcagcggcggcttcagcgtggacaccagcgccctgctggacctgttcagccccagcgtgacagtgcctgatatgagcctgcccgatctggacagcagcctggcctctatccaggagctgctgtctcctcaagagcctcctagacctccagaagctgaaaacagcagccctgattccggaaaacagctggtccactacacagcccaacctctgttcctgctggaccctggatctgttgataccggcagcaacgacctgcctgtgctgtttgagctgggcgaaggcagctacttcagcgagggcgacggctttgccgaggaccctacaatcagcctgctgactggaagcgagcctccaaaggccaaggaccctaccgtgtcttgataaggtacctttaagaccaatgacttacaaggcagctgtagatcttagc

SEQ ID NO: 130 - DNA, 3512 bp, Artificial Sequence
  Synthetic polynucleotide TFV18
ttcgaacgcgttgaaagaccccacctgtaggtttggcaagctaggatcaaggttaggaacagagagacagcagaatatgggccaaacaggatatctgtggtaagcagttcctgccccggctcagggccaagaacagttggaacagcagaatatgggccaaacaggatatctgtggtaagcagttcctgccccggctcagggccaagaacagatggtccccagatgcggtcccgccctcagcagtttctagagaaccatcagatgtttccagggtgccccaaggacctgaaatgaccctgtgccttatttgaactaaccaatcagttcgcttctcgcttctgttcgcgcgcttctgctccccgagctcaataaaagagcccacaacccctcactcggcgcgatcagaacctcttacgagtcggctagcgccaccatgcctaagaagaaaagaaaggtgtccggtggctctggaggcaagaaaaagggctctgtggtgatcgtgggcagaatcaatctgagcggagataccgcctatgcccagcagacacgcggagaggaaggttgtcaggagacatcccagaccggcagagataaaaaccaggtggaaggcgaggtgcagatcgtgtccaccgctacacaaacatttctggccacatctatcaacggcgtgctgtggaccgtgtaccacggagccggaacaagaaccatcgcctctccaaagggccctgtgacccaaatgtacaccaacgtggacaaggacctcgtgggatggcaggcccctcagggcagccggagcctgaccccttgcacctgcggcagcagcgacctgtacctggtgacacggcacgccgatgtgattcctgtgcggcggaggggcgacagcagaggcagcctgctgagccctagacccatcagctacctgaagggcagcgccggcggacctctgctgtgccccgccggccacgctgtgggcatcttccgtgccgctgtgtctaccagaggcgtcgccaaggccgttgacttcatccccgtcgagagcctggaaaccaccatgagaagccccggctctggcgcggccgctagcggcggcggcggcagcggcggaggcggaagcggcggtgccagaccaggcgagagacctttccaatgtagaatctgtatgcggaacttcagcgacaagaccaagctgagagtgcacaccagaacacacacaggcgagaagcccttccagtgcagaatctgcatgcgcaacttctccgtgcggcacaacctgacaagacacctgaggacccacaccggagaaaagcctttccagtgccggatctgcatgagaaatttttctcagagcaccagcctgcagagacatctgaaaacccacctgcggggcagcggcagtggggagggcagaggaagccttcttacttgcggcgatgttgaagagaaccccgggccaatggtgagcaagggcgaggaggacaacatggccatcatcaaggagttcatgaggttcaaggtgcacatggagggcagcgtgaacggccacgagttcgagatcgagggcgagggcgagggcaggccctacgagggcacccagaccgccaagctgaaggtgaccaagggcggccccctgcccttcgcctgggacatcctgagcccccagttcatgtacggcagcaaggcctacgtgaagcaccccgccgacatccccgactacctgaagctgagcttccccgagggcttcaagtgggagagggtgatgaacttcgaggacggcggcgtggtgaccgtgacccaggacagcagcctgcaggacggcgagttcatctacaaggtgaagctgaggggcaccaacttccccagcgacggccccgtgatgcagaagaagaccatgggctgggaggccagcagcgagaggatgtaccccgaggacggcgccctgaagggcgagatcaagcagaggctgaagctgaaggacggcggccactacgacgccgaggtgaagaccacctacaaggccaagaagcccgtgcagctgcccggcgcctacaacgtgaacatcaagctggacatcaccagccacaacgaggactacaccatcgtggagcagtacgagagggccgagggcaggcacagcaccggcggcatggacgagctgtacaagggatccggagctactaacttcagcctgctgaagcaggctggagatgtggaggagaaccctggacctatcgattcctccgatgaggaagaggcaagggagctgatcgagagagccaaggaagccgcagagcgggcacaagaggccgctgaacgcacgggagatccacgggtccgcgaactcgctagggaattgaagcgtctagcgcaagaggctgcagaggaagttaaaagagacccatcttcctctgacgtcaatgaggccctgaaactcatcgtcgaggcaattgaagccgccgttgacgcccttgaggcggcagagcgcaccggagatcccgaggttcgcgaactggccagagaacttgttagactggctgtcgaagctgcagaggaggtgcaaaggaacccctcttcttccgatgttaacgaggccttgcattctattgtctacgccatcgaggccgctatctttgccctcgaggccgctgaaaggacgggtgacccagaagtgagagaactggcaagggagttggttcggctggcagtcgaggctgctgaggaggtgcaacggaacccatcctctaggaacgtcgaacacgcgttgatgcgcatcgttctggccatctaccttgccgaggaaaacctgcgggaggcagaagagagcggagatccagaaaaacgagagaaggctcgcgagcgggtcagagaagccgtcgaacgggccgaagaagtgcaaagagatcccagcggctggctgaaccattccggtggaggttcaggagtcgacggtagccccaagaaaaagagaaaggtcggtagcgtgctgcctcaagcccctgctccagcccccgctccagccatggtgtccgccctggcccaggcccctgcccctgtgcctgtgctggcccctggacctcctcaagccgtcgcccctccagcccctaagcctacacaggccggcgagggaacactgtctgaagccctgctgcagctgcaatttgacgacgaggacctgggagccctgcttggcaatagcaccgatcctgctgtgttcaccgacctggcttctgtggacaacagcgagttccagcagctcctgaaccagggcatccccgttgccccccacacaaccgagcctatgctgatggaataccccgaggccatcaccagactggtgaccggcgctcagcggccccccgaccccgcccctgcaccactgggcgcccctggcctgcctaacggcctgctgtccggcgatgaagatttcagcagcatcgccgatatggacttcagcgccctgctgtgataaggtacctttaagaccaatgacttacaaggcagctgtagatcttagc

SEQ ID NO: 131 - DNA, 4034 bp, Artificial Sequence
  Synthetic polynucleotide TFV19
ttcgaacgcgttgaaagaccccacctgtaggtttggcaagctaggatcaaggttaggaacagagagacagcagaatatgggccaaacaggatatctgtggtaagcagttcctgccccggctcagggccaagaacagttggaacagcagaatatgggccaaacaggatatctgtggtaagcagttcctgccccggctcagggccaagaacagatggtccccagatgcggtcccgccctcagcagtttctagagaaccatcagatgtttccagggtgccccaaggacctgaaatgaccctgtgccttatttgaactaaccaatcagttcgcttctcgcttctgttcgcgcgcttctgctccccgagctcaataaaagagcccacaacccctcactcggcgcgatcagaacctcttacgagtcggctagcgccaccatgcctaagaagaaaagaaaggtgtccggtggctctggaggcaagaaaaagggctctgtggtgatcgtgggcagaatcaatctgagcggagataccgcctatgcccagcagacacgcggagaggaaggttgtcaggagacatcccagaccggcagagataaaaaccaggtggaaggcgaggtgcagatcgtgtccaccgctacacaaacatttctggccacatctatcaacggcgtgctgtggaccgtgtaccacggagccggaacaagaaccatcgcctctccaaagggccctgtgacccaaatgtacaccaacgtggacaaggacctcgtgggatggcaggcccctcagggcagccggagcctgaccccttgcacctgcggcagcagcgacctgtacctggtgacacggcacgccgatgtgattcctgtgcggcggaggggcgacagcagaggcagcctgctgagccctagacccatcagctacctgaagggcagcgccggcggacctctgctgtgccccgccggccacgctgtgggcatcttccgtgccgctgtgtctaccagaggcgtcgccaaggccgttgacttcatccccgtcgagagcctggaaaccaccatgagaagccccggctctggcgcggccgctagcggccagcggatgaaacagctggaagataaggtggaagagctgctgagcaagaactaccacctggagaacgaggtggccagactgaagaagctggtgggcgacgccgctagaagcggcggaggcggaagcggcggtacacctccccacgagagacctttccagtgccggatctgcatgcggaacttctccaacaacgccatgctggtgcggcacaccagaacccacacaggagaaaaacctttccaatgtagaatctgtatgcgcaacttcagcctgagccagaccctgcagagacatctgagaacacacaccggcgagaagccatttcagtgcagaatctgcatgagaaatttcagcatgcagggcaacctgtctagacacctgaagacccacctgcggggcagcggcagtggggagggcagaggaagccttcttacttgcggcgatgttgaagagaaccccgggccaatggtgagcaagggcgaggaggacaacatggccatcatcaaggagttcatgaggttcaaggtgcacatggagggcagcgtgaacggccacgagttcgagatcgagggcgagggcgagggcaggccctacgagggcacccagaccgccaagctgaaggtgaccaagggcggccccctgcccttcgcctgggacatcctgagcccccagttcatgtacggcagcaaggcctacgtgaagcaccccgccgacatccccgactacctgaagctgagcttccccgagggcttcaagtgggagagggtgatgaacttcgaggacggcggcgtggtgaccgtgacccaggacagcagcctgcaggacggcgagttcatctacaaggtgaagctgaggggcaccaacttccccagcgacggccccgtgatgcagaagaagaccatgggctgggaggccagcagcgagaggatgtaccccgaggacggcgccctgaagggcgagatcaagcagaggctgaagctgaaggacggcggccactacgacgccgaggtgaagaccacctacaaggccaagaagcccgtgcagctgcccggcgcctacaacgtgaacatcaagctggacatcaccagccacaacgaggactacaccatcgtggagcagtacgagagggccgagggcaggcacagcaccggcggcatggacgagctgtacaagggatccggagctactaacttcagcctgctgaagcaggctggagatgtggaggagaaccctggacctatcgattcctccgatgaggaagaggcaagggagctgatcgagagagccaaggaagccgcagagcgggcacaagaggccgctgaacgcacgggagatccacgggtccgcgaactcgctagggaattgaagcgtctagcgcaagaggctgcagaggaagttaaaagagacccatcttcctctgacgtcaatgaggccctgaaactcatcgtcgaggcaattgaagccgccgttgacgcccttgaggcggcagagcgcaccggagatcccgaggttcgcgaactggccagagaacttgttagactggctgtcgaagctgcagaggaggtgcaaaggaacccctcttcttccgatgttaacgaggccttgcattctattgtctacgccatcgaggccgctatctttgccctcgaggccgctgaaaggacgggtgacccagaagtgagagaactggcaagggagttggttcggctggcagtcgaggctgctgaggaggtgcaacggaacccatcctctaggaacgtcgaacacgcgttgatgcgcatcgttctggccatctaccttgccgaggaaaacctgcgggaggcagaagagagcggagatccagaaaaacgagagaaggctcgcgagcgggtcagagaagccgtcgaacgggccgaagaagtgcaaagagatcccagcggctggctgaaccattccggtggaggttcaggagctagcgatgcactggatgattttgacttggacatgctcggtagcgacgctcttgatgacttcgatctcgacatgctgggttccgatgccctcgatgatttcgatctggacatgttgggctctgacgccctggacgatttcgacctggatatgctgatcaattcccggagctcagggtctcctaagaaaaagcgcaaagttggcagtggaggcggaagcggagggtcaggttctgtgcttcctcaagcgccggctccggcccctgcacctgcaatggtgtctgctctcgcgcaagcacccgcaccggttccggttctggcaccaggaccccctcaagccgttgccccacctgcaccaaagcccacccaagcgggcgaaggaaccttgtccgaggccttgctccaactgcaatttgatgacgaggacctgggtgcacttctgggcaactcaaccgaccccgctgtattcactgatctggcttctgtggacaatagcgagtttcagcaactactaaaccagggcatccccgtggctcctcacactaccgagcctatgctgatggaataccccgaggcaataacgagactcgttaccggagcccaaaggccacctgatcctgctcctgcgccactcggcgcgcccggcctcccaaatgggctccttagcggcgatgaagacttcagtagtattgccgacatggacttctccgctctcctatccggtggtggaagcggcggctccggctctgacctgtctcatccaccgccacgaggacacctggatgagctgaccacaacactcgaatcaatgacagaggatctgaatttggactccccactgacaccagaactgaacgaaattctggataccttcctgaatgatgagtgccttctgcacgccatgcatatcagcaccggcctctccatcttcgacactagtctgttctgataaggtacctttaagaccaatgacttacaaggcagctgtagatcttagc

SEQ ID NO: 132 - DNA, 4034 bp, Artificial Sequence
  Synthetic polynucleotide TFV20
ttcgaacgcgttgaaagaccccacctgtaggtttggcaagctaggatcaaggttaggaacagagagacagcagaatatgggccaaacaggatatctgtggtaagcagttcctgccccggctcagggccaagaacagttggaacagcagaatatgggccaaacaggatatctgtggtaagcagttcctgccccggctcagggccaagaacagatggtccccagatgcggtcccgccctcagcagtttctagagaaccatcagatgtttccagggtgccccaaggacctgaaatgaccctgtgccttatttgaactaaccaatcagttcgcttctcgcttctgttcgcgcgcttctgctccccgagctcaataaaagagcccacaacccctcactcggcgcgatcagaacctcttacgagtcggctagcgccaccatgcctaagaagaaaagaaaggtgtccggtggctctggaggcaagaaaaagggctctgtggtgatcgtgggcagaatcaatctgagcggagataccgcctatgcccagcagacacgcggagaggaaggttgtcaggagacatcccagaccggcagagataaaaaccaggtggaaggcgaggtgcagatcgtgtccaccgctacacaaacatttctggccacatctatcaacggcgtgctgtggaccgtgtaccacggagccggaacaagaaccatcgcctctccaaagggccctgtgacccaaatgtacaccaacgtggacaaggacctcgtgggatggcaggcccctcagggcagccggagcctgaccccttgcacctgcggcagcagcgacctgtacctggtgacacggcacgccgatgtgattcctgtgcggcggaggggcgacagcagaggcagcctgctgagccctagacccatcagctacctgaagggcagcgccggcggacctctgctgtgccccgccggccacgctgtgggcatcttccgtgccgctgtgtctaccagaggcgtcgccaaggccgttgacttcatccccgtcgagagcctggaaaccaccatgagaagccccggctctggcgcggccgctagcggccagcggatgaaacagctggaagataaggtggaagagctgctgagcaagaactaccacctggagaacgaggtggccagactgaagaagctggtgggcgacgccgctagaagcggcggaggcggaagcggcggtgccagaccaggcgagagacctttccaatgtagaatctgtatgcggaacttcagcgacaagaccaagctgagagtgcacaccagaacacacacaggcgagaagcccttccagtgcagaatctgcatgcgcaacttctccgtgcggcacaacctgacaagacacctgaggacccacaccggagaaaagcctttccagtgccggatctgcatgagaaatttttctcagagcaccagcctgcagagacatctgaaaacccacctgcggggcagcggcagtggggagggcagaggaagccttcttacttgcggcgatgttgaagagaaccccgggccaatggtgagcaagggcgaggaggacaacatggccatcatcaaggagttcatgaggttcaaggtgcacatggagggcagcgtgaacggccacgagttcgagatcgagggcgagggcgagggcaggccctacgagggcacccagaccgccaagctgaaggtgaccaagggcggccccctgcccttcgcctgggacatcctgagcccccagttcatgtacggcagcaaggcctacgtgaagcaccccgccgacatccccgactacctgaagctgagcttccccgagggcttcaagtgggagagggtgatgaacttcgaggacggcggcgtggtgaccgtgacccaggacagcagcctgcaggacggcgagttcatctacaaggtgaagctgaggggcaccaacttccccagcgacggccccgtgatgcagaagaagaccatgggctgggaggccagcagcgagaggatgtaccccgaggacggcgccctgaagggcgagatcaagcagaggctgaagctgaaggacggcggccactacgacgccgaggtgaagaccacctacaaggccaagaagcccgtgcagctgcccggcgcctacaacgtgaacatcaagctggacatcaccagccacaacgaggactacaccatcgtggagcagtacgagagggccgagggcaggcacagcaccggcggcatggacgagctgtacaagggatccggagctactaacttcagcctgctgaagcaggctggagatgtggaggagaaccctggacctatcgattcctccgatgaggaagaggcaagggagctgatcgagagagccaaggaagccgcagagcgggcacaagaggccgctgaacgcacgggagatccacgggtccgcgaactcgctagggaattgaagcgtctagcgcaagaggctgcagaggaagttaaaagagacccatcttcctctgacgtcaatgaggccctgaaactcatcgtcgaggcaattgaagccgccgttgacgcccttgaggcggcagagcgcaccggagatcccgaggttcgcgaactggccagagaacttgttagactggctgtcgaagctgcagaggaggtgcaaaggaacccctcttcttccgatgttaacgaggccttgcattctattgtctacgccatcgaggccgctatctttgccctcgaggccgctgaaaggacgggtgacccagaagtgagagaactggcaagggagttggttcggctggcagtcgaggctgctgaggaggtgcaacggaacccatcctctaggaacgtcgaacacgcgttgatgcgcatcgttctggccatctaccttgccgaggaaaacctgcgggaggcagaagagagcggagatccagaaaaacgagagaaggctcgcgagcgggtcagagaagccgtcgaacgggccgaagaagtgcaaagagatcccagcggctggctgaaccattccggtggaggttcaggagctagcgatgcactggatgattttgacttggacatgctcggtagcgacgctcttgatgacttcgatctcgacatgctgggttccgatgccctcgatgatttcgatctggacatgttgggctctgacgccctggacgatttcgacctggatatgctgatcaattcccggagctcagggtctcctaagaaaaagcgcaaagttggcagtggaggcggaagcggagggtcaggttctgtgcttcctcaagcgccggctccggcccctgcacctgcaatggtgtctgctctcgcgcaagcacccgcaccggttccggttctggcaccaggaccccctcaagccgttgccccacctgcaccaaagcccacccaagcgggcgaaggaaccttgtccgaggccttgctccaactgcaatttgatgacgaggacctgggtgcacttctgggcaactcaaccgaccccgctgtattcactgatctggcttctgtggacaatagcgagtttcagcaactactaaaccagggcatccccgtggctcctcacactaccgagcctatgctgatggaataccccgaggcaataacgagactcgttaccggagcccaaaggccacctgatcctgctcctgcgccactcggcgcgcccggcctcccaaatgggctccttagcggcgatgaagacttcagtagtattgccgacatggacttctccgctctcctatccggtggtggaagcggcggctccggctctgacctgtctcatccaccgccacgaggacacctggatgagctgaccacaacactcgaatcaatgacagaggatctgaatttggactccccactgacaccagaactgaacgaaattctggataccttcctgaatgatgagtgccttctgcacgccatgcatatcagcaccggcctctccatcttcgacactagtctgttctgataaggtacctttaagaccaatgacttacaaggcagctgtagatcttagc

SEQ ID NO: 133 - protein, 196 aa, Artificial Sequence
  Synthetic polypeptide NS3a1b
MAKGSVVIVGRINLSGDTAYSQQTRGLLGCIITSATGRDKNQVDGEVQVLSTATQSFLATCVNGVCWTVYHGAGSKTLAGPKGPITQMYTNVDQDLVGWPAPPGARSMTPCTCGSSDLYLVTRHADVIPVRRRGDSRGSLLSPRPVSYLKGSAGGPLLCPSGHVVGIFRAAVCTRGVAKAVDFIPVESMETTMRSP

SEQ ID NO: 134 - protein, 197 aa, Artificial Sequence
  Synthetic polypeptide NS3aH1
MKKKGSVVIVGRINLSGDTAYSQQTRGLEGCQETSQTGRDKNQVEGEVQVVSTATQSFLATSINGVLWTVYHGAGTRTIASPKGPVTQMYTNVDKDLVGWQAPQGSRSLTPCTCGSSDLYLVTRHADVIPVRRRGDSRGSLLSPRPISYLKGSAGGPLLCPAGHAVGIFRAAVSTRGVAKAVDFIPVESLETTMRSP

SEQ ID NO: 135 - protein, 43 aa, Artificial Sequence
  Synthetic polypeptide P2a-T2a
GSGATNFSLLKQAGDVEENPGPGSGEGRGSLLTCGDVEENPGP

SEQ ID NO: 136 - protein, 43 aa, Artificial Sequence
  Synthetic polypeptide T2a-P2a
GSGEGRGSLLTCGDVEENPGPGSGATNFSLLKQAGDVEENPGP

SEQ ID NO: 137 - DNA, 528 bp, Artificial Sequence
  Synthetic polynucleotide CMV
cgttacataacttacggtaaatggcccgcctggctgaccgcccaacgacccccgcccattgacgtcaataatgacgtatgttcccatagtaacgccaatagggactttccattgacgtcaatgggtggagtatttacggtaaactgcccacttggcagtacatcaagtgtatcatatgccaagtacgccccctattgacgtcaatgacggtaaatggcccgcctggcattatgcccagtacatgaccttatgggactttcctacttggcagtacatctacgtattagtcatcgctattaccatgctgatgcggttttggcagtacatcaatgggcgtggatagcggtttgactcacggggatttccaagtctccaccccattgacgtcaatgggagtttgttttggcaccaaaatcaacgggactttccaaaatgtcgtaacaactccgccccattgacgcaaatgggcggtaggcgtgtacggtgggaggtctatataagcagagctggtttagtgaaccgtcagat

SEQ ID NO: 138 - DNA, 533 bp, Artificial Sequence
  Synthetic polynucleotide CAG
attgacgtcaataatgacgtatgttcccatagtaacgccaatagggactttccattgacgtcaatgggtggagtatttacggtaaactgcccacttggcagtacatcaagtgtatcatatgccaagtacgccccctattgacgtcaatgacggtaaatggcccgcctggcattatgcccagtacatgaccttatgggactttcctacttggcagtacatctacgtattagtcatcgctattaccatggtcgaggtgagccccacgttctgcttcactctccccatctcccccccctccccacccccaattttgtatttatttattttttaattattttgtgcagcgatgggggcggggggggggggggggcgcgcgccaggcggggcggggcggggcgaggggcggggcggggcgaggcggagaggtgcggcggcagccaatcagagcggcgcgctccgaaagtttccttttatggcgaggcggcggcggcggcggccctataaaaagcgaagcgcgcggcgggcgatcgatt

SEQ ID NO: 139 - DNA, 408 bp, Artificial Sequence
  Synthetic polynucleotide SFFV
gtaacgccattttgcaaggcatggaaaaataccaaaccaagaatagagaagttcagatcaagggcgggtacatgaaaatagctaacgttgggccaaacaggatatctgcggtgagcagtttcggccccggcccggggccaagaacagatggtcaccgcagtttcggccccggcccgaggccaagaacagatggtccccagatatggcccaaccctcagcagtttcttaagacccatcagatgtttccaggctcccccaaggacctgaaatgaccctgcgccttatttgaattaaccaatcagcctgcttctcgcttctgttcgcgcgcttctgcttcccgagctctataaaagagctcacaacccctcactcggcgcgccagtcctccgacagactgagtcgcccggg

SEQ ID NO: 140 - DNA, 212 bp, Artificial Sequence
  Synthetic polynucleotide EF1alpha
gggcagagcgcacatcgcccacagtccccgagaagttggggggaggggtcggcaattgaaccggtgcctagagaaggtggcgcggggtaaactgggaaagtgatgtcgtgtactggctccgcctttttcccgagggtgggggagaaccgtatataagtgcagtagtcgccgtgaacgttctttttcgcaacgggtttgccgccagaacacag

SEQ ID NO: 141 - DNA, 1219 bp, Artificial Sequence
  Synthetic polynucleotide UBC
ggcctccgcgccgggttttggcgcctcccgcgggcgcccccctcctcacggcgagcgctgccacgtcagacgaagggcgcagcgagcgtcctgatccttccgcccggacgctcaggacagcggcccgctgctcataagactcggccttagaaccccagtatcagcagaaggacattttaggacgggacttgggtgactctagggcactggttttctttccagagagcggaacaggcgaggaaaagtagtcccttctcggcgattctgcggagggatctccgtggggcggtgaacgccgatgattatataaggacgcgccgggtgtggcacagctagttccgtcgcagccgggatttgggtcgcggttcttgtttgtggatcgctgtgatcgtcacttggtgagtagcgggctgctgggctggccggggctttcgtggccgccgggccgctcggtgggacggaagcgtgtggagagaccgccaagggctgtagtctgggtccgcgagcaaggttgccctgaactgggggttggggggagcgcagcaaaatggcggctgttcccgagtcttgaatggaagacgcttgtgaggcgggctgtgaggtcgttgaaacaaggtggggggcatggtgggcggcaagaacccaaggtcttgaggccttcgctaatgcgggaaagctcttattcgggtgagatgggctggggcaccatctggggaccctgacgtgaagtttgtcactgactggagaactcggtttgtcgtctgttgcgggggcggcagttatggcggtgccgttgggcagtgcacccgtacctttgggagcgcgcgccctcgtcgtgtcgtgacgtcacccgttctgttggcttataatgcagggtggggccacctgccggtaggtgtgcggtaggcttttctccgtcgcaggacgcagggttcgggcctagggtaggctctcctgaatcgacaggcgccggacctctggtgaggggagggataagtgaggcgtcagtttctttggtcggttttatgtacctatcttcttaagtagctgaagctccggttttgaactatgcgctcggggttggcgagtgtgttttgtgaagttttttaggcaccttttgaaatgtaatcatttgggtcaatatgtaattttcagtgttagactagtaaattgtccgctaaattctggccgtttttggcttttttgttagacatcgatt

SEQ ID NO: 142 - DNA, 779 bp, Artificial Sequence
  Synthetic polynucleotide CD43
agttctcaggctcacattcccaccacccacctctgagcccagccctccctagcatcaccacttccatcccattcctcagccaagagccaggaatcctgattccagatcccacgcttccctgcctccctcaggtgagccccagacccccaggcaccccgctggcccctgaaggagcaggtgatggtgctgtcttcgcccagcagctgtgggagcaggcgggtggggcaggatggaggggtgggtggggtgggtggagccagggcccacttcctttccccttggggccctgtccttcccagtcttgccccagcctcgggaggtggtggagtgacctggccccagtgctgcgtccttatcagccgagccggtaagagggtgagacttggtggggtaggggcctcagtgggcctgggaatgtgcctgtggcttgaaaagactctgacaggttatgatgggaagagattgggagccattgggctgcacagggtcagggaaggccaggaggggctggtcactgctggaatctaagctgctgaggctggagggagcctcaggatggggctgatgggggagctgccagcatctgttcctctgtcatttctgataacagtaaaagccagcatggaaaaaaccgttaaaccgcaggttgggcctggccgttggcagggaagtgggcagaggggaggcccggccaggtcctccggcaactcccgcgtgttctgcttctccggctgcccacctgcaggtcccagctcttgctcctgcctgtttgcctggaa

SEQ ID NO: 143 - DNA, 85 bp, Artificial Sequence
  Synthetic polynucleotide 6xHIV2RE
agatgctgcaactagagatgctgcaacgcgagatgctgcatgagctgatgctgcagacgctgatgctgcaaaattagatgctgca

SEQ ID NO: 144 - DNA, 1029 bp, Artificial Sequence
  Synthetic polynucleotide IPV16
ttcgaacgcgtgtcttaaagttcgaacaggcggagcactgtcctccgaacgtcggagcactgtcctccgaacgtcggagcactgtcctccgaacgtcggagcactgtcctccgaacggcggagcactgtcctccgcacgtggaattcagggctgggcataaaagtcagggcagagccatctattgcttacatttgcttctgacacaactgtgttcactagcaacctcaaacagacacccgaaggatccgccaccatggtgagcaagggcgaggagctgttcaccggggtggtgcccatcctggtcgagctggacggcgacgtaaacggccacaagttcagcgtgtccggcgagggcgagggcgatgccacctacggcaagctgaccctgaagttcatctgcaccaccggcaagctgcccgtgccctggcccaccctcgtgaccaccctgacctacggcgtgcagtgcttcagccgctaccccgaccacatgaagcagcacgacttcttcaagtccgccatgcccgaaggctacgtccaggagcgcaccatcttcttcaaggacgacggcaactacaagacccgcgccgaggtgaagttcgagggcgacaccctggtgaaccgcatcgagctgaagggcatcgacttcaaggaggacggcaacatcctggggcacaagctggagtacaactacaacagccacaacgtctatatcatggccgacaagcagaagaacggcatcaaggtgaacttcaagatccgccacaacatcgaggacggcagcgtgcagctcgccgaccactaccagcagaacacccccatcggcgacggccccgtgctgctgcccgacaaccactacctgagcacccagtccgccctgagcaaagaccccaacgagaagcgcgatcacatggtcctgctggagttcgtgaccgccgccgggatcactctcggcatggacgagctgtacaagtgagcggccgctggtacctttaagaccaatgacttacaaggcagctgtagatcttagc

SEQ ID NO: 145 - DNA, 1644 bp, Artificial Sequence
  Synthetic polynucleotide IPV17
ttcgaacgcgtgtcttaaagttcgaacaggcggagcactgtcctccgaacgtcggagcactgtcctccgaacgtcggagcactgtcctccgaacgtcggagcactgtcctccgaacggcggagcactgtcctccgcacgtggaattcagggctgggcataaaagtcagggcagagccatctattgcttacatttgcttctgacacaactgtgttcactagcaacctcaaacagacacccgaaggatccgccaccatggtgagcaagggcgaggagctgttcaccggggtggtgcccatcctggtcgagctggacggcgacgtaaacggccacaagttcagcgtgtccggcgagggcgagggcgatgccacctacggcaagctgaccctgaagttcatctgcaccaccggcaagctgcccgtgccctggcccaccctcgtgaccaccctgacctacggcgtgcagtgcttcagccgctaccccgaccacatgaagcagcacgacttcttcaagtccgccatgcccgaaggctacgtccaggagcgcaccatcttcttcaaggacgacggcaactacaagacccgcgccgaggtgaagttcgagggcgacaccctggtgaaccgcatcgagctgaagggcatcgacttcaaggaggacggcaacatcctggggcacaagctggagtacaactacaacagccacaacgtctatatcatggccgacaagcagaagaacggcatcaaggtgaacttcaagatccgccacaacatcgaggacggcagcgtgcagctcgccgaccactaccagcagaacacccccatcggcgacggccccgtgctgctgcccgacaaccactacctgagcacccagtccgccctgagcaaagaccccaacgagaagcgcgatcacatggtcctgctggagttcgtgaccgccgccgggatcactctcggcatggacgagctgtacaagggatccggagctactaacttcagcctgctgaagcaggctggagatgtggaggagaaccctggacctatgaagctactgtcttctatcgaacaagcatgcgatatttgccgacttaaaaagctcaagtgctccaaagaaaaaccgaagtgcgccaagtgtctgaagaacaactgggagtgtcgctactctcccaaaaccaaaaggtctccgctgactagggcacatctgacagaagtggaatcaaggctagaaagactggaacagctatttctactgatttttcctcgagaagaccttgacatgattttgaaaatggattctttacaggatataaaagcattgttgggtactcctgcagctgcgggcctaggtggaggcggctccgcaggctctggcggagatgccaagagcctgaccgcctggtccagaacactggtgacattcaaggacgttttcgtggacttcaccagagaggaatggaagctgctggatacagcccagcagatcgtgtaccggaacgtgatgctggaaaactataaaaacctggtcagcctgggctaccagctgacaaagcctgacgtgatcctgcggctggaaaagggagaagaaccttaatgagcggccgctggtacctttaagaccaatgacttacaaggcagctgtagatcttagc

SEQ ID NO: 146 - DNA, 1839 bp, Artificial Sequence
  Synthetic polynucleotide IPV18
ttcgaacgcgtgtcttaaagttcgaacaggcggagcactgtcctccgaacgtcggagcactgtcctccgaacgtcggagcactgtcctccgaacgtcggagcactgtcctccgaacggcggagcactgtcctccgcacgtggaattcagggctgggcataaaagtcagggcagagccatctattgcttacatttgcttctgacacaactgtgttcactagcaacctcaaacagacacccgaaggatccgccaccatggtgagcaagggcgaggagctgttcaccggggtggtgcccatcctggtcgagctggacggcgacgtaaacggccacaagttcagcgtgtccggcgagggcgagggcgatgccacctacggcaagctgaccctgaagttcatctgcaccaccggcaagctgcccgtgccctggcccaccctcgtgaccaccctgacctacggcgtgcagtgcttcagccgctaccccgaccacatgaagcagcacgacttcttcaagtccgccatgcccgaaggctacgtccaggagcgcaccatcttcttcaaggacgacggcaactacaagacccgcgccgaggtgaagttcgagggcgacaccctggtgaaccgcatcgagctgaagggcatcgacttcaaggaggacggcaacatcctggggcacaagctggagtacaactacaacagccacaacgtctatatcatggccgacaagcagaagaacggcatcaaggtgaacttcaagatccgccacaacatcgaggacggcagcgtgcagctcgccgaccactaccagcagaacacccccatcggcgacggccccgtgctgctgcccgacaaccactacctgagcacccagtccgccctgagcaaagaccccaacgagaagcgcgatcacatggtcctgctggagttcgtgaccgccgccgggatcactctcggcatggacgagctgtacaagggcagtggggagggcagaggaagccttcttacttgcggcgatgttgaagagaaccccgggccaggagaactggacgagctggtgtacctgctggacggccctggctacgaccccatccactctgatgtggtgactcggggcggcagccatctgttcaacttctccggttcctcaggaggcagcggagtcaacatctctggacagaacacgatgaacatggtgaaagtacctgaatgccgactggcggacgagctgggcggcctttgggaaaactcccgcttcaccgactgttgcctgtgcgtggctggccaggagttccaggcccacaaggccatcctggctgctcgctcccccgttttttcagccatgttcgagcacgagatggaggagagcaagaagaaccgcgtcgaaattaacgacgtggagcccgaggtgttcaaggagatgatgtgctttatctacaccggcaaagcacccaacctggacaaaatggccgatgacctgctggccgccgctgacaaatacgcgctggagaggctcaaagtgatgtgcgaggacgcattatgttctaatctttccgtggagaacgcggccgagatcctcatcctagcggacttgcattcggcggaccagctgaagacccaggctgtcgatttcattaattatcacgccagcgatgtgctggagacttctgggtggaagtccatggttgtcagtcacccccatctcgtggcggaggcctaccggtccttggcttccgcccaatgtccattcctgggtccgccgcgcaagcgcctgaagcagagctgataagcggccgctggtacctttaagaccaatgacttacaaggcagctgtagatcttagc

SEQ ID NO: 147 - DNA, 2076 bp, Artificial Sequence
  Synthetic polynucleotide IPV19
ttcgaacgcgtgtcttaaagttcgaacaggcggagcactgtcctccgaacgtcggagcactgtcctccgaacgtcggagcactgtcctccgaacgtcggagcactgtcctccgaacggcggagcactgtcctccgcacgtggaattcagggctgggcataaaagtcagggcagagccatctattgcttacatttgcttctgacacaactgtgttcactagcaacctcaaacagacacccgaaggatccgccaccatggtgagcaagggcgaggagctgttcaccggggtggtgcccatcctggtcgagctggacggcgacgtaaacggccacaagttcagcgtgtccggcgagggcgagggcgatgccacctacggcaagctgaccctgaagttcatctgcaccaccggcaagctgcccgtgccctggcccaccctcgtgaccaccctgacctacggcgtgcagtgcttcagccgctaccccgaccacatgaagcagcacgacttcttcaagtccgccatgcccgaaggctacgtccaggagcgcaccatcttcttcaaggacgacggcaactacaagacccgcgccgaggtgaagttcgagggcgacaccctggtgaaccgcatcgagctgaagggcatcgacttcaaggaggacggcaacatcctggggcacaagctggagtacaactacaacagccacaacgtctatatcatggccgacaagcagaagaacggcatcaaggtgaacttcaagatccgccacaacatcgaggacggcagcgtgcagctcgccgaccactaccagcagaacacccccatcggcgacggccccgtgctgctgcccgacaaccactacctgagcacccagtccgccctgagcaaagaccccaacgagaagcgcgatcacatggtcctgctggagttcgtgaccgccgccgggatcactctcggcatggacgagctgtacaagggctccggtgcaacgaacttcagcctgctgaagcaggccggagatgttgaggaaaatccaggtcccggaagcggtgaacagaagctgatctctgaggaagatctgggcggctccggctcccccgagttcctggagaacctgcggcgccacttggaccgcctgcgcaagcacatccgcaaactcgaggagatcctggaagagatcgatgaccagatggtgaaggaggccatcgacctgtcccgccgctccgtggagattgtcgaggaagtgattgagaccttcgagcgcgctggggacgcttccccaaccaagctggacgagctggagaagatactgcagcgcgccgaggagatcatcgacagggcggacaagctgctggagtacaggcggcgtggcggtggtggctctggtggaggcggctccgtcaacatctctggacagaacacgatgaacatggtgaaagtacctgaatgccgactggcggacgagctgggcggcctttgggaaaactcccgcttcaccgactgttgcctgtgcgtggctggccaggagttccaggcccacaaggccatcctggctgctcgctcccccgttttttcagccatgttcgagcacgagatggaggagagcaagaagaaccgcgtcgaaattaacgacgtggagcccgaggtgttcaaggagatgatgtgctttatctacaccggcaaagcacccaacctggacaaaatggccgatgacctgctggccgccgctgacaaatacgcgctggagaggctcaaagtgatgtgcgaggacgcattatgttctaatctttccgtggagaacgcggccgagatcctcatcctagcggacttgcattcggcggaccagctgaagacccaggctgtcgatttcattaattatcacgccagcgatgtgctggagacttctgggtggaagtccatggttgtcagtcacccccatctcgtggcggaggcctaccggtccttggcttccgcccaatgtccattcctgggtccgccgcgcaagcgcctgaagcagagctgataagcggccgctggtacctttaagaccaatgacttacaaggcagctgtagatcttagc

SEQ ID NO: 148 - DNA, 3191 bp, Artificial Sequence
  Synthetic polynucleotide TFV21
ttcgaacgcgttgaaagaccccacctgtaggtttggcaagctaggatcaaggttaggaacagagagacagcagaatatgggccaaacaggatatctgtggtaagcagttcctgccccggctcagggccaagaacagttggaacagcagaatatgggccaaacaggatatctgtggtaagcagttcctgccccggctcagggccaagaacagatggtccccagatgcggtcccgccctcagcagtttctagagaaccatcagatgtttccagggtgccccaaggacctgaaatgaccctgtgccttatttgaactaaccaatcagttcgcttctcgcttctgttcgcgcgcttctgctccccgagctcaataaaagagcccacaacccctcactcggcgcgatcagaacctcttacgagtcggctagcgccaccatgaagctactgtcttctatcgaacaagcatgcgatatttgccgacttaaaaagctcaagtgctccaaagaaaaaccgaagtgcgccaagtgtctgaagaacaactgggagtgtcgctactctcccaaaaccaaaaggtctccgctgactagggcacatctgacagaagtggaatcaaggctagaaagactggaacagctatttctactgatttttcctcgagaagaccttgacatgattttgaaaatggattctttacaggatataaaagcattgttgggtactcctgcagctgcgggcctaggtggaggcggctccgcaggctctggcggaaagaagaaaggcagcgtggttatagttgggcgaattaatctgagtggagacaccgcatatgctcaacaaactaggggcgaggaaggatgtcaggaaaccagccagacaggccgcgacaagaaccaagtggagggagaggttcaaatcgtgtctactgcgacccagacttttctggccacgtccatcaacggagttctctggactgtctatcacggcgccggaactcgcaccattgcatcacccaaaggacccgtcactcaaatgtacaccaatgtggacaaggacttggtcggttggcaggcgccgcaaggctctcgatctctgactccatgcacctgcggtagctctgatttgtacctcgtgacacggcacgctgatgtgatcccggtccgtcggcgaggggattctagaggcagtctgctgagccctagaccaatatcatacctcaagggttctgctggcggacccctgttgtgccctgccggccatgccgtcggaatatttcgcgcggcagttagtacacggggcgttgccaaggcagtagacttcattcctgtcgagtcccttgagacaacaatgagatctcctggcagtggggagggcagaggaagccttcttacttgcggcgatgttgaagagaaccccgggccaggatccggagctactaacttcagcctgctgaagcaggctggagatgtggaggagaaccctggacctatcgattcctccgatgaggaagaggcaagggagctgatcgagagagccaaggaagccgcagagcgggcacaagaggccgctgaacgcacgggagatccacgggtccgcgaactcgctagggaattgaagcgtctagcgcaagaggctgcagaggaagttaaaagagacccatcttcctctgacgtcaatgaggccctgaaactcatcgtcgaggcaattgaagccgccgttgacgcccttgaggcggcagagcgcaccggagatcccgaggttcgcgaactggccagagaacttgttagactggctgtcgaagctgcagaggaggtgcaaaggaacccctcttcttccgatgttaacgaggccttgcattctattgtctacgccatcgaggccgctatctttgccctcgaggccgctgaaaggacgggtgacccagaagtgagagaactggcaagggagttggttcggctggcagtcgaggctgctgaggaggtgcaacggaacccatcctctaggaacgtcgaacacgcgttgatgcgcatcgttctggccatctaccttgccgaggaaaacctgcgggaggcagaagagagcggagatccagaaaaacgagagaaggctcgcgagcgggtcagagaagccgtcgaacgggccgaagaagtgcaaagagatcccagcggctggctgaaccattccggtggaggttcaggagctagcgatgcactggatgattttgacttggacatgctcggtagcgacgctcttgatgacttcgatctcgacatgctgggttccgatgccctcgatgatttcgatctggacatgttgggctctgacgccctggacgatttcgacctggatatgctgatcaattcccggagctcagggtctcctaagaaaaagcgcaaagttggcagtggaggcggaagcggagggtcaggttctgtgcttcctcaagcgccggctccggcccctgcacctgcaatggtgtctgctctcgcgcaagcacccgcaccggttccggttctggcaccaggaccccctcaagccgttgccccacctgcaccaaagcccacccaagcgggcgaaggaaccttgtccgaggccttgctccaactgcaatttgatgacgaggacctgggtgcacttctgggcaactcaaccgaccccgctgtattcactgatctggcttctgtggacaatagcgagtttcagcaactactaaaccagggcatccccgtggctcctcacactaccgagcctatgctgatggaataccccgaggcaataacgagactcgttaccggagcccaaaggccacctgatcctgctcctgcgccactcggcgcgcccggcctcccaaatgggctccttagcggcgatgaagacttcagtagtattgccgacatggacttctccgctctcctatccggtggtggaagcggcggctccggctctgacctgtctcatccaccgccacgaggacacctggatgagctgaccacaacactcgaatcaatgacagaggatctgaatttggactccccactgacaccagaactgaacgaaattctggataccttcctgaatgatgagtgccttctgcacgccatgcatatcagcaccggcctctccatcttcgacactagtctgttctgataaggtacctttaagaccaatgacttacaaggcagctgtagatcttagc

SEQ ID NO: 149 - DNA, 3737 bp, Artificial Sequence
  Synthetic polynucleotide TFV22
ttcgaacgcgttgaaagaccccacctgtaggtttggcaagctaggatcaaggttaggaacagagagacagcagaatatgggccaaacaggatatctgtggtaagcagttcctgccccggctcagggccaagaacagttggaacagcagaatatgggccaaacaggatatctgtggtaagcagttcctgccccggctcagggccaagaacagatggtccccagatgcggtcccgccctcagcagtttctagagaaccatcagatgtttccagggtgccccaaggacctgaaatgaccctgtgccttatttgaactaaccaatcagttcgcttctcgcttctgttcgcgcgcttctgctccccgagctcaataaaagagcccacaacccctcactcggcgcgatcagaacctcttacgagtcggctagcgccaccatgaagctactgtcttctatcgaacaagcatgcgatatttgccgacttaaaaagctcaagtgctccaaagaaaaaccgaagtgcgccaagtgtctgaagaacaactgggagtgtcgctactctcccaaaaccaaaaggtctccgctgactagggcacatctgacagaagtggaatcaaggctagaaagactggaacagctatttctactgatttttcctcgagaagaccttgacatgattttgaaaatggattctttacaggatataaaagcattgttgggtactcctgcagctgcgggcctaggtggaggcggctccgcaggctctggcggaaagaagaaaggcagcgtggttatagttgggcgaattaatctgagtggagacaccgcatatgctcaacaaactaggggcgaggaaggatgtcaggaaaccagccagacaggccgcgacaagaaccaagtggagggagaggttcaaatcgtgtctactgcgacccagacttttctggccacgtccatcaacggagttctctggactgtctatcacggcgccggaactcgcaccattgcatcacccaaaggacccgtcactcaaatgtacaccaatgtggacaaggacttggtcggttggcaggcgccgcaaggctctcgatctctgactccatgcacctgcggtagctctgatttgtacctcgtgacacggcacgctgatgtgatcccggtccgtcggcgaggggattctagaggcagtctgctgagccctagaccaatatcatacctcaagggttctgctggcggacccctgttgtgccctgccggccatgccgtcggaatatttcgcgcggcagttagtacacggggcgttgccaaggcagtagacttcattcctgtcgagtcccttgagacaacaatgagatctcctggcagtggggagggcagaggaagccttcttacttgcggcgatgttgaagagaaccccgggccaatgaagctactgtcttctatcgaacaagcatgcgatatttgccgacttaaaaagctcaagtgctccaaagaaaaaccgaagtgcgccaagtgtctgaagaacaactgggagtgtcgctactctcccaaaaccaaaaggtctccgctgactagggcacatctgacagaagtggaatcaaggctagaaagactggaacagctatttctactgatttttcctcgagaagaccttgacatgattttgaaaatggattctttacaggatataaaagcattgttgggtactcctgcagctgcgggcctaggtggaggcggctccgcaggctctggcggagatgccaagagcctgaccgcctggtccagaacactggtgacattcaaggacgttttcgtggacttcaccagagaggaatggaagctgctggatacagcccagcagatcgtgtaccggaacgtgatgctggaaaactataaaaacctggtcagcctgggctaccagctgacaaagcctgacgtgatcctgcggctggaaaagggagaagaacctggatccggagctactaacttcagcctgctgaagcaggctggagatgtggaggagaaccctggacctatcgattcctccgatgaggaagaggcaagggagctgatcgagagagccaaggaagccgcagagcgggcacaagaggccgctgaacgcacgggagatccacgggtccgcgaactcgctagggaattgaagcgtctagcgcaagaggctgcagaggaagttaaaagagacccatcttcctctgacgtcaatgaggccctgaaactcatcgtcgaggcaattgaagccgccgttgacgcccttgaggcggcagagcgcaccggagatcccgaggttcgcgaactggccagagaacttgttagactggctgtcgaagctgcagaggaggtgcaaaggaacccctcttcttccgatgttaacgaggccttgcattctattgtctacgccatcgaggccgctatctttgccctcgaggccgctgaaaggacgggtgacccagaagtgagagaactggcaagggagttggttcggctggcagtcgaggctgctgaggaggtgcaacggaacccatcctctaggaacgtcgaacacgcgttgatgcgcatcgttctggccatctaccttgccgaggaaaacctgcgggaggcagaagagagcggagatccagaaaaacgagagaaggctcgcgagcgggtcagagaagccgtcgaacgggccgaagaagtgcaaagagatcccagcggctggctgaaccattccggtggaggttcaggagctagcgatgcactggatgattttgacttggacatgctcggtagcgacgctcttgatgacttcgatctcgacatgctgggttccgatgccctcgatgatttcgatctggacatgttgggctctgacgccctggacgatttcgacctggatatgctgatcaattcccggagctcagggtctcctaagaaaaagcgcaaagttggcagtggaggcggaagcggagggtcaggttctgtgcttcctcaagcgccggctccggcccctgcacctgcaatggtgtctgctctcgcgcaagcacccgcaccggttccggttctggcaccaggaccccctcaagccgttgccccacctgcaccaaagcccacccaagcgggcgaaggaaccttgtccgaggccttgctccaactgcaatttgatgacgaggacctgggtgcacttctgggcaactcaaccgaccccgctgtattcactgatctggcttctgtggacaatagcgagtttcagcaactactaaaccagggcatccccgtggctcctcacactaccgagcctatgctgatggaataccccgaggcaataacgagactcgttaccggagcccaaaggccacctgatcctgctcctgcgccactcggcgcgcccggcctcccaaatgggctccttagcggcgatgaagacttcagtagtattgccgacatggacttctccgctctcctatccggtggtggaagcggcggctccggctctgacctgtctcatccaccgccacgaggacacctggatgagctgaccacaacactcgaatcaatgacagaggatctgaatttggactccccactgacaccagaactgaacgaaattctggataccttcctgaatgatgagtgccttctgcacgccatgcatatcagcaccggcctctccatcttcgacactagtctgttctgataaggtacctttaagaccaatgacttacaaggcagctgtagatcttagc

SEQ ID NO: 150 - DNA, 3935 bp, Artificial Sequence
  Synthetic polynucleotide TFV23
ttcgaacgcgttgaaagaccccacctgtaggtttggcaagctaggatcaaggttaggaacagagagacagcagaatatgggccaaacaggatatctgtggtaagcagttcctgccccggctcagggccaagaacagttggaacagcagaatatgggccaaacaggatatctgtggtaagcagttcctgccccggctcagggccaagaacagatggtccccagatgcggtcccgccctcagcagtttctagagaaccatcagatgtttccagggtgccccaaggacctgaaatgaccctgtgccttatttgaactaaccaatcagttcgcttctcgcttctgttcgcgcgcttctgctccccgagctcaataaaagagcccacaacccctcactcggcgcgatcagaacctcttacgagtcggctagcgccaccatgaagctactgtcttctatcgaacaagcatgcgatatttgccgacttaaaaagctcaagtgctccaaagaaaaaccgaagtgcgccaagtgtctgaagaacaactgggagtgtcgctactctcccaaaaccaaaaggtctccgctgactagggcacatctgacagaagtggaatcaaggctagaaagactggaacagctatttctactgatttttcctcgagaagaccttgacatgattttgaaaatggattctttacaggatataaaagcattgttgggtactcctgcagctgcgggcctaggtggaggcggctccgcaggctctggcggaaagaagaaaggcagcgtggttatagttgggcgaattaatctgagtggagacaccgcatatgctcaacaaactaggggcgaggaaggatgtcaggaaaccagccagacaggccgcgacaagaaccaagtggagggagaggttcaaatcgtgtctactgcgacccagacttttctggccacgtccatcaacggagttctctggactgtctatcacggcgccggaactcgcaccattgcatcacccaaaggacccgtcactcaaatgtacaccaatgtggacaaggacttggtcggttggcaggcgccgcaaggctctcgatctctgactccatgcacctgcggtagctctgatttgtacctcgtgacacggcacgctgatgtgatcccggtccgtcggcgaggggattctagaggcagtctgctgagccctagaccaatatcatacctcaagggttctgctggcggacccctgttgtgccctgccggccatgccgtcggaatatttcgcgcggcagttagtacacggggcgttgccaaggcagtagacttcattcctgtcgagtcccttgagacaacaatgagatctcctggcagtggggagggcagaggaagccttcttacttgcggcgatgttgaagagaaccccgggccaggagaactggacgagctggtgtacctgctggacggccctggctacgaccccatccactctgatgtggtgactcggggcggcagccatctgttcaacttctccggttcctcaggaggcagcggagtcaacatctctggacagaacacgatgaacatggtgaaagtacctgaatgccgactggcggacgagctgggcggcctttgggaaaactcccgcttcaccgactgttgcctgtgcgtggctggccaggagttccaggcccacaaggccatcctggctgctcgctcccccgttttttcagccatgttcgagcacgagatggaggagagcaagaagaaccgcgtcgaaattaacgacgtggagcccgaggtgttcaaggagatgatgtgctttatctacaccggcaaagcacccaacctggacaaaatggccgatgacctgctggccgccgctgacaaatacgcgctggagaggctcaaagtgatgtgcgaggacgcattatgttctaatctttccgtggagaacgcggccgagatcctcatcctagcggacttgcattcggcggaccagctgaagacccaggctgtcgatttcattaattatcacgccagcgatgtgctggagacttctgggtggaagtccatggttgtcagtcacccccatctcgtggcggaggcctaccggtccttggcttccgcccaatgtccattcctgggtccgccgcgcaagcgcctgaagcagagcggatccggagctactaacttcagcctgctgaagcaggctggagatgtggaggagaaccctggacctatcgattcctccgatgaggaagaggcaagggagctgatcgagagagccaaggaagccgcagagcgggcacaagaggccgctgaacgcacgggagatccacgggtccgcgaactcgctagggaattgaagcgtctagcgcaagaggctgcagaggaagttaaaagagacccatcttcctctgacgtcaatgaggccctgaaactcatcgtcgaggcaattgaagccgccgttgacgcccttgaggcggcagagcgcaccggagatcccgaggttcgcgaactggccagagaacttgttagactggctgtcgaagctgcagaggaggtgcaaaggaacccctcttcttccgatgttaacgaggccttgcattctattgtctacgccatcgaggccgctatctttgccctcgaggccgctgaaaggacgggtgacccagaagtgagagaactggcaagggagttggttcggctggcagtcgaggctgctgaggaggtgcaacggaacccatcctctaggaacgtcgaacacgcgttgatgcgcatcgttctggccatctaccttgccgaggaaaacctgcgggaggcagaagagagcggagatccagaaaaacgagagaaggctcgcgagcgggtcagagaagccgtcgaacgggccgaagaagtgcaaagagatcccagcggctggctgaaccattccggtggaggttcaggagctagcgatgcactggatgattttgacttggacatgctcggtagcgacgctcttgatgacttcgatctcgacatgctgggttccgatgccctcgatgatttcgatctggacatgttgggctctgacgccctggacgatttcgacctggatatgctgatcaattcccggagctcagggtctcctaagaaaaagcgcaaagttggcagtggaggcggaagcggagggtcaggttctgtgcttcctcaagcgccggctccggcccctgcacctgcaatggtgtctgctctcgcgcaagcacccgcaccggttccggttctggcaccaggaccccctcaagccgttgccccacctgcaccaaagcccacccaagcgggcgaaggaaccttgtccgaggccttgctccaactgcaatttgatgacgaggacctgggtgcacttctgggcaactcaaccgaccccgctgtattcactgatctggcttctgtggacaatagcgagtttcagcaactactaaaccagggcatccccgtggctcctcacactaccgagcctatgctgatggaataccccgaggcaataacgagactcgttaccggagcccaaaggccacctgatcctgctcctgcgccactcggcgcgcccggcctcccaaatgggctccttagcggcgatgaagacttcagtagtattgccgacatggacttctccgctctcctatccggtggtggaagcggcggctccggctctgacctgtctcatccaccgccacgaggacacctggatgagctgaccacaacactcgaatcaatgacagaggatctgaatttggactccccactgacaccagaactgaacgaaattctggataccttcctgaatgatgagtgccttctgcacgccatgcatatcagcaccggcctctccatcttcgacactagtctgttctgataaggtacctttaagaccaatgacttacaaggcagctgtagatcttagc

SEQ ID NO: 151 - DNA, 4064 bp, Artificial Sequence
  Synthetic polynucleotide TFV24
ttcgaacgcgttgaaagaccccacctgtaggtttggcaagctaggatcaaggttaggaacagagagacagcagaatatgggccaaacaggatatctgtggtaagcagttcctgccccggctcagggccaagaacagttggaacagcagaatatgggccaaacaggatatctgtggtaagcagttcctgccccggctcagggccaagaacagatggtccccagatgcggtcccgccctcagcagtttctagagaaccatcagatgtttccagggtgccccaaggacctgaaatgaccctgtgccttatttgaactaaccaatcagttcgcttctcgcttctgttcgcgcgcttctgctccccgagctcaataaaagagcccacaacccctcactcggcgcgatcagaacctcttacgagtcggctagcgccaccatgaagctactgtcttctatcgaacaagcatgcgatatttgccgacttaaaaagctcaagtgctccaaagaaaaaccgaagtgcgccaagtgtctgaagaacaactgggagtgtcgctactctcccaaaaccaaaaggtctccgctgactagggcacatctgacagaagtggaatcaaggctagaaagactggaacagctatttctactgatttttcctcgagaagaccttgacatgattttgaaaatggattctttacaggatataaaagcattgttgggtactcctgcagctgcgggcctaggtggaggcggctccgcaggctctggcggaaagaagaaaggcagcgtggttatagttgggcgaattaatctgagtggagacaccgcatatgctcaacaaactaggggcgaggaaggatgtcaggaaaccagccagacaggccgcgacaagaaccaagtggagggagaggttcaaatcgtgtctactgcgacccagacttttctggccacgtccatcaacggagttctctggactgtctatcacggcgccggaactcgcaccattgcatcacccaaaggacccgtcactcaaatgtacaccaatgtggacaaggacttggtcggttggcaggcgccgcaaggctctcgatctctgactccatgcacctgcggtagctctgatttgtacctcgtgacacggcacgctgatgtgatcccggtccgtcggcgaggggattctagaggcagtctgctgagccctagaccaatatcatacctcaagggttctgctggcggacccctgttgtgccctgccggccatgccgtcggaatatttcgcgcggcagttagtacacggggcgttgccaaggcagtagacttcattcctgtcgagtcccttgagacaacaatgagatctcctgactacaaggaccatgacggcgattacaaggaccatgacattgactacaaggatgacgatgacaagggcggctccggctccggagatcccaaggtggtggaggaatacgtgcgcctgctggaggagcacgagaaggcagtgcgagagctcctcgagatcgcgaaaggcagtggggagggcagaggaagccttcttacttgcggcgatgttgaagagaaccccgggccaatggtgagcaagggcgaggaggacaacatggccatcatcaaggagttcatgaggttcaaggtgcacatggagggcagcgtgaacggccacgagttcgagatcgagggcgagggcgagggcaggccctacgagggcacccagaccgccaagctgaaggtgaccaagggcggccccctgcccttcgcctgggacatcctgagcccccagttcatgtacggcagcaaggcctacgtgaagcaccccgccgacatccccgactacctgaagctgagcttccccgagggcttcaagtgggagagggtgatgaacttcgaggacggcggcgtggtgaccgtgacccaggacagcagcctgcaggacggcgagttcatctacaaggtgaagctgaggggcaccaacttccccagcgacggccccgtgatgcagaagaagaccatgggctgggaggccagcagcgagaggatgtaccccgaggacggcgccctgaagggcgagatcaagcagaggctgaagctgaaggacggcggccactacgacgccgaggtgaagaccacctacaaggccaagaagcccgtgcagctgcccggcgcctacaacgtgaacatcaagctggacatcaccagccacaacgaggactacaccatcgtggagcagtacgagagggccgagggcaggcacagcaccggcggcatggacgagctgtacaagggatccggagctactaacttcagcctgctgaagcaggctggagatgtggaggagaaccctggacctatcgattcctccgatgaggaagaggcaagggagctgatcgagagagccaaggaagccgcagagcgggcacaagaggccgctgaacgcacgggagatccacgggtccgcgaactcgctagggaattgaagcgtctagcgcaagaggctgcagaggaagttaaaagagacccatcttcctctgacgtcaatgaggccctgaaactcatcgtcgaggcaattgaagccgccgttgacgcccttgaggcggcagagcgcaccggagatcccgaggttcgcgaactggccagagaacttgttagactggctgtcgaagctgcagaggaggtgcaaaggaacccctcttcttccgatgttaacgaggccttgcattctattgtctacgccatcgaggccgctatctttgccctcgaggccgctgaaaggacgggtgacccagaagtgagagaactggcaagggagttggttcggctggcagtcgaggctgctgaggaggtgcaacggaacccatcctctaggaacgtcgaacacgcgttgatgcgcatcgttctggccatctaccttgccgaggaaaacctgcgggaggcagaagagagcggagatccagaaaaacgagagaaggctcgcgagcgggtcagagaagccgtcgaacgggccgaagaagtgcaaagagatcccagcggctggctgaaccattccggtggaggttcaggagctagcgatgcactggatgattttgacttggacatgctcggtagcgacgctcttgatgacttcgatctcgacatgctgggttccgatgccctcgatgatttcgatctggacatgttgggctctgacgccctggacgatttcgacctggatatgctgatcaattcccggagctcagggtctcctaagaaaaagcgcaaagttggcagtggaggcggaagcggagggtcaggttctgtgcttcctcaagcgccggctccggcccctgcacctgcaatggtgtctgctctcgcgcaagcacccgcaccggttccggttctggcaccaggaccccctcaagccgttgccccacctgcaccaaagcccacccaagcgggcgaaggaaccttgtccgaggccttgctccaactgcaatttgatgacgaggacctgggtgcacttctgggcaactcaaccgaccccgctgtattcactgatctggcttctgtggacaatagcgagtttcagcaactactaaaccagggcatccccgtggctcctcacactaccgagcctatgctgatggaataccccgaggcaataacgagactcgttaccggagcccaaaggccacctgatcctgctcctgcgccactcggcgcgcccggcctcccaaatgggctccttagcggcgatgaagacttcagtagtattgccgacatggacttctccgctctcctatccggtggtggaagcggcggctccggctctgacctgtctcatccaccgccacgaggacacctggatgagctgaccacaacactcgaatcaatgacagaggatctgaatttggactccccactgacaccagaactgaacgaaattctggataccttcctgaatgatgagtgccttctgcacgccatgcatatcagcaccggcctctccatcttcgacactagtctgttctgataaggtacctttaagaccaatgacttacaaggcagctgtagatcttagc

SEQ ID NO: 152 - protein, 134 aa, Artificial Sequence
  Synthetic polypeptide ZFHD1
DYPAAKRVKLDSRERPYACPVESCDRRFSRSDELTRHIRIHTGQKPFQCRICMRNFSRSDHLTTHIRTHTGGGRRRKKRTSIETNIRVALEKSFLENQKPTSEEITMIADQLNMEKEVIRVWFCNRRQKEKRIN

SEQ ID NO: 153 - protein, 342 aa, Artificial Sequence
  Synthetic polypeptide ZFHD1-NS3a
DYPAAKRVKLDSRERPYACPVESCDRRFSRSDELTRHIRIHTGQKPFQCRICMRNFSRSDHLTTHIRTHTGGGRRRKKRTSIETNIRVALEKSFLENQKPTSEEITMIADQLNMEKEVIRVWFCNRRQKEKRINGLGGGGSAGSGGKKKGSVVIVGRINLSGDTAYAQQTRGEEGCQETSQTGRDKNQVEGEVQIVSTATQTFLATSINGVLWTVYHGAGTRTIASPKGPVTQMYTNVDKDLVGWQAPQGSRSLTPCTCGSSDLYLVTRHADVIPVRRRGDSRGSLLSPRPISYLKGSAGGPLLCPAGHAVGIFRAAVSTRGVAKAVDFIPVESLETTMRSP

SEQ ID NO: 154 - protein, 52 aa, Artificial Sequence
  Synthetic polypeptide VP64
DALDDFDLDMLGSDALDDFDLDMLGSDALDDFDLDMLGSDALDDFDLDMLGS

SEQ ID NO: 155 - protein, 71 aa, Artificial Sequence
  Synthetic polypeptide KRAB
DAKSLTAWSRTLVTFKDVFVDFTREEWKLLDTAQQIVYRNVMLENYKNLVSLGYQLTKPDVILRLEKGEEP

SEQ ID NO: 156 - protein, 207 aa, Artificial Sequence
  Synthetic polypeptide SPOP
VNISGQNTMNMVKVPECRLADELGGLWENSRFTDCCLCVAGQEFQAHKAILAARSPVFSAMFEHEMEESKKNRVEINDVEPEVFKEMMCFIYTGKAPNLDKMADDLLAAADKYALERLKVMCEDALCSNLSVENAAEILILADLHSADQLKTQAVDFINYHASDVLETSGWKSMVVSHPHLVAEAYRSLASAQCPFLGPPRKRLKQS

SEQ ID NO: 157 - protein, 248 aa, Artificial Sequence
  Synthetic polypeptide ANR-SPOP
GELDELVYLLDGPGYDPIHSDVVTRGGSHLFNFSGSSGGSGVNISGQNTMNMVKVPECRLADELGGLWENSRFTDCCLCVAGQEFQAHKAILAARSPVFSAMFEHEMEESKKNRVEINDVEPEVFKEMMCFIYTGKAPNLDKMADDLLAAADKYALERLKVMCEDALCSNLSVENAAEILILADLHSADQLKTQAVDFINYHASDVLETSGWKSMVVSHPHLVAEAYRSLASAQCPFLGPPRKRLKQS

SEQ ID NO: 158 - protein, 112 aa, Artificial Sequence
  Synthetic polypeptide ANR-KRAB
GELDELVYLLDGPGYDPIHSDVVTRGGSHLFNFSGSSGGSGDAKSLTAWSRTLVTFKDVFVDFTREEWKLLDTAQQIVYRNVMLENYKNLVSLGYQLTKPDVILRLEKGEEP

SEQ ID NO: 159 - protein, 181 aa, Artificial Sequence
  Synthetic polypeptide Gal4-KRAB
KLLSSIEQACDICRLKKLKCSKEKPKCAKCLKNNWECRYSPKTKRSPLTRAHLTEVESRLERLEQLFLLIFPREDLDMILKMDSLQDIKALLGTPAAAGLGGGGSAGSGGDAKSLTAWSRTLVTFKDVFVDFTREEWKLLDTAQQIVYRNVMLENYKNLVSLGYQLTKPDVILRLEKGEEP

SEQ ID NO: 160 - protein, 308 aa, Artificial Sequence
  Synthetic polypeptide DHD37-2A-SPOP
PEFLENLRRHLDRLRKHIRKLEEILEEIDDQMVKEAIDLSRRSVEIVEEVIETFERAGDASPTKLDELEKILQRAEEIIDRADKLLEYRRRGGGGSGGGGSVNISGQNTMNMVKVPECRLADELGGLWENSRFTDCCLCVAGQEFQAHKAILAARSPVFSAMFEHEMEESKKNRVEINDVEPEVFKEMMCFIYTGKAPNLDKMADDLLAAADKYALERLKVMCEDALCSNLSVENAAEILILADLHSADQLKTQAVDFINYHASDVLETSGWKSMVVSHPHLVAEAYRSLASAQCPFLGPPRKRLKQS

SEQ ID NO: 161 - protein, 361 aa, Artificial Sequence
  Synthetic polypeptide Gal4-NS3a-DHD37-2B
KLLSSIEQACDICRLKKLKCSKEKPKCAKCLKNNWECRYSPKTKRSPLTRAHLTEVESRLERLEQLFLLIFPREDLDMILKMDSLQDIKALLGTPAAAGLGGGGSAGSGGKKKGSVVIVGRINLSGDTAYAQQTRGEEGCQETSQTGRDKNQVEGEVQIVSTATQTFLATSINGVLWTVYHGAGTRTIASPKGPVTQMYTNVDKDLVGWQAPQGSRSLTPCTCGSSDLYLVTRHADVIPVRRRGDSRGSLLSPRPISYLKGSAGGPLLCPAGHAVGIFRAAVSTRGVAKAVDFIPVESLETTMRSPDYKDHDGDYKDHDIDYKDDDDKGGSGSGDPKVVEEYVRLLEEHEKAVRELLEIAK

SEQ ID NO: 162 - protein, 296 aa, Artificial Sequence
  Synthetic polypeptide DNCR2-VP64
SSDEEEARELIERAKEAAERAQEAAERTGDPRVRELARELKRLAQEAAEEVKRDPSSSDVNEALKLIVEAIEAAVDALEAAERTGDPEVRELARELVRLAVEAAEEVQRNPSSSDVNEALHSIVYAIEAAIFALEAAERTGDPEVRELARELVRLAVEAAEEVQRNPSSRNVEHALMRIVLAIYLAEENLREAEESGDPEKREKARERVREAVERAEEVQRDPSGWLNHSGGGSGASPKKKRKVDALDDFDLDMLGSDALDDFDLDMLGSDALDDFDLDMLGSDALDDFDLDMLGS

SEQ ID NO: 163 - DNA, 586 bp, Artificial Sequence
  Synthetic polynucleotide IRES
cctctccctcccccccccctaacgttactggccgaagccgcttggaataaggccggtgtgcgtttgtctatatgtgattttccaccatattgccgtcttttggcaatgtgagggcccggaaacctggccctgtcttcttgacgagcattcctaggggtctttcccctctcgccaaaggaatgcaaggtctgttgaatgtcgtgaaggaagcagttcctctggaagcttcttgaagacaaacaacgtctgtagcgaccctttgcaggcagcggaaccccccacctggcgacaggtgcctctgcggccaaaagccacgtgtataagatacacctgcaaaggcggcacaaccccagtgccacgttgtgagttggatagttgtggaaagagtcaaatggctctcctcaagcgtattcaacaaggggctgaaggatgcccagaaggtaccccattgtatgggatctgatctggggcctcggtgcacatgctttacatgtgtttagtcgaggttaaaaaaacgtctaggccccccgaaccacggggacgtggttttcctttgaaaaacacgatgataagcttgccacaaccc

SEQ ID NO: 164 - DNA, 174 bp, Artificial Sequence
  Synthetic polynucleotide 12xZFHD1-RE
taatgatgggcgatctaatgatgggcgtattaatgatgggcgcataatgatgggcggtataatgatgggcgacataatgatgggcgactaatgatgggcgtattaatgatgggcgttctaatgatgggcgctataatgatgggcgtataatgatgggcgtcctaatgatgggcg

SEQ ID NO: 165 - protein, 386 aa, Artificial Sequence
  Synthetic polypeptide ZFHD1
MEAMDVKYRPALYPNGSVKKVRQAAVPSPPPPVLEAVPAYKECLKNHAAAIGAHAVDGCGEWMPVVELNTADPASYKCAACGCHRNFHRLVMVEGSPPPPPPQPQPALLPAPPMPMPMPMPATVLHGLPQRAPETPDDRLPGVDGDDSDSDSDGSEYDDERSVSPPQHPPSAHHLAPVAQQPPPYMSSAPHPHMLLSLNSSAPGAPAQGHSRLPAQLSPATAPPPHAMMPARKRFRTKFTAEQKQRMQELSERLGWRLQKRDEGVVDEWCRDIGVSKGVFKVWMHNNKHNYLGGHSARRSASAAASSAATTPTAPAAGGPFRLSPATGAPPAAPFNPSASHSSPAPTATGFNMNGTASSASTATATPAAIFAAGRTVNGASSPQSA

SEQ ID NO: 166 - protein, 1307 aa, Artificial Sequence
  Synthetic polypeptide Cas12a
MTQFEGFTNLYQVSKTLRFELIPQGKTLKHIQEQGFIEEDKARNDHYKELKPIIDRIYKTYADQCLQLVQLDWENLSAAIDSYRKEKTEETRNALIEEQATYRNAIHDYFIGRTDNLTDAINKRHAEIYKGLFKAELFNGKVLKQLGTVTTTEHENALLRSFDKFTTYFSGFYENRKNVFSAEDISTAIPHRIVQDNFPKFKENCHIFTRLITAVPSLREHFENVKKAIGIFVSTSIEEVFSFPFYNQLLTQTQIDLYNQLLGGISREAGTEKIKGLNEVLNLAIQKNDETAHIIASLPHRFIPLFKQILSDRNTLSFILEEFKSDEEVIQSFCKYKTLLRNENVLETAEALFNELNSIDLTHIFISHKKLETISSALCDHWDTLRNALYERRISELTGKITKSAKEKVQRSLKHEDINLQEIISAAGKELSEAFKQKTSEILSHAHAALDQPLPTTLKKQEEKEILKSQLDSLLGLYHLLDWFAVDESNEVDPEFSARLTGIKLEMEPSLSFYNKARNYATKKPYSVEKFKLNFQMPTLASGWDVNKEKNNGAILFVKNGLYYLGIMPKQKGRYKALSFEPTEKTSEGFDKMYYDYFPDAAKMIPKCSTQLKAVTAHFQTHTTPILLSNNFIEPLEITKEIYDLNNPEKEPKKFQTAYAKKTGDQKGYREALCKWIDFTRDFLSKYTKTTSIDLSSLRPSSQYKDLGEYYAELNPLLYHISFQRIAEKEIMDAVETGKLYLFQIYNKDFAKGHHGKPNLHTLYWTGLFSPENLAKTSIKLNGQAELFYRPKSRMKRMAHRLGEKMLNKKLKDQKTPIPDTLYQELYDYVNHRLSHDLSDEARALLPNVITKEVSHEIIKDRRFTSDKFFFHVPITLNYQAANSPSKFNQRVNAYLKEHPETPIIGIDRGERNLIYITVIDSTGKILEQRSLNTIQQFDYQKKLDNREKERVAARQAWSVVGTIKDLKQGYLSQVIHEIVDLMIHYQAVVVLENLNFGFKSKRTGIAEKAVYQQFEKMLIDKLNCLVLKDYPAEKVGGVLNPYQLTDQFTSFAKMGTQSGFLFYVPAPYTSKIDPLTGFVDPFVWKTIKNHESRKHFLEGFDFLHYDVKTGDFILHFKMNRNLSFQRGLPGFMPAWDIVFEKNETQFDAKGTPFIAGKRIVPVIENHRFTGRYRDLYPANELIALLEEKGIVFRDGSNILPKLLENDDSHAIDTMVALIRSVLQMRNSNAATGEDYINSPVRDLNGVCFDSRFQNPEWPMDADANGAYHIALKGQLLLNHLKESKDLKLQNGISNQDWLAYIQELRN

SEQ ID NO: 167 - protein, 1368 aa, Streptococcus pyogenes [sequence omitted]

SEQ ID NO: 168 - protein, 763 aa, Artificial Sequence
  Synthetic polypeptide CasPhi
MPKPAVESEFSKVLKKHFPGERFRSSYMKRGGKILAAQGEEAVVAYLQGKSEEEPPNFQPPAKCHVVTKSRDFAEWPIMKASEAIQRYIYALSTTERAACKPGKSSESHAAWFAATGVSNHGYSHVQGLNLIFDHTLGRYDGVLKKVQLRNEKARARLESINASRADEGLPEIKAEEEEVATNETGHLLQPPGINPSFYVYQTISPQAYRPRDEIVLPPEYAGYVRDPNAPIPLGVVRNRCDIQKGCPGYIPEWQREAGTAISPKTGKAVTVPGLSPKKNKRMRRYWRSEKEKAQDALLVTVRIGTDWVVIDVRGLLRNARWRTIAPKDISLNALLDLFTGDPVIDVRRNIVTFTYTLDACGTYARKWTLKGKQTKATLDKLTATQTVALVAIDLGQTNPISAGISRVTQENGALQCEPLDRFTLPDDLLKDISAYRIAWDRNEEELRARSVEALPEAQQAEVRALDGVSKETARTQLCADFGLDPKRLPWDKMSSNTTFISEALLSNSVSRDQVFFTPAPKKGAKKKAPVEVMRKDRTWARAYKPRLSVEAQKLKNEALWALKRTSPEYLKLSRRKEELCRRSINYVIEKTRRRTQCQIVIPVIEDLNVRFFHGSGKRLPGWDNFFTAKKENRWFIQGLHKAFSDLRTHRSFYVFEVRPERTSITCPKCGHCEVGNRDGEAFQCLSCGKTCNADLDVATHNLTQVALTGKTMPKREEPRDAQGTAPARKTKKASKSKAPPAEREDQTPAQEPSQTSHHHHHH

SEQ ID NO: 169 - protein, 34 aa, Artificial Sequence
  Synthetic polypeptide TALE
  MOD_RES (12)..(13): Any amino acid
LTPEQVVAIASXXGGKQALETVQRLLPVLCQAHG

SEQ ID NO: 170 - protein, 486 aa, Artificial Sequence
  Synthetic polypeptide MeCP2, isoform A
MVAGMLGLREEKSEDQDLQGLKDKPLKFKKVKKDKKEEKEGKHEPVQPSAHHSAEPAEAGKAETSEGSGSAPAVPEASASPKQRRSIIRDRGPMYDDPTLPEGWTRKLKQRKSGRSAGKYDVYLINPQGKAFRSKVELIAYFEKVGDTSLDPNDFDFTVTGRGSPSRREQKPPKKPKSPKAPGTGRGRGRPKGSGTTRPKAATSEGVQVKRVLEKSPGKLLVKMPFQTSPGGKAEGGGATTSTQVMVIKRPGRKRKAEADPQAIPKKRGRKPGSVVAAAAAEAKKKAVKESSIRSVQETVLPIKKRKTRETVSIEVKEVVKPLLVSTLGEKSGKGLKTCKSPGRKSKESSPKGRSSSASSPPKKEHHHHHHHSESPKAPVPLLPPLPPPPPEPESSEDPTSPPEPQDLSSSVCKEEKMPRGGSLESDGCPKEPAKTQPAVATAATAAEKYKHRGEGERKDIVSSSMPRPNREEPVDSRTPVTERVS

SEQ ID NO: 171 - protein, 498 aa, Artificial Sequence [sequence omitted]

SEQ ID NO: 172 - protein, 550 aa, Artificial Sequence
  Synthetic polypeptide p65, isoform 1
MDELFPLIFPAEPAQASGPYVEIIEQPKQRGMRFRYKCEGRSAGSIPGERSTDTTKTHPTIKINGYTGPGTVRISLVTKDPPHRPHPHELVGKDCRDGFYEAELCPDRCIHSFQNLGIQCVKKRDLEQAISQRIQTNNNPFQVPIEEQRGDYDLNAVRLCFQVTVRDPSGRPLRLPPVLSHPIFDNRAPNTAELKICRVNRNSGSCLGGDEIFLLCDKVQKEDIEVYFTGPGWEARGSFSQADVHRQVAIVFRTPPYADPSLQAPVRVSMQLRRPSDRELSEPMEFQYLPDTDDRHRIEEKRKRTYETFKSIMKKSPFSGPTDPRPPPRRIAVPSRSSASVPKPAPQPYPFTSSLSTINYDEFPTMVFPSGQISQASALAPAPPQVLPQAPAPAPAPAMVSALAQAPAPVPVLAPGPPQAVAPPAPKPTQAGEGTLSEALLQLQFDDEDLGALLGNSTDPAVFTDLASVDNSEFQQLLNQGIPVAPHTTEPMLMEYPEAITRLVTGAQRPPDPAPAPLGAPGLPNGLLSGDEDFSSIADMDFSALLSQIS

SEQ ID NO: 173 - protein, 536 aa, Artificial Sequence
  Synthetic polypeptide p65, isoform 2
MDELFPLIFPAEQPKQRGMRFRYKCEGRSAGSIPGERSTDTTKTHPTIKINGYTGPGTVRISLVTKDPPHRPHPHELVGKDCRDGFYEAELCPDRCIHSFQNLGIQCVKKRDLEQAISQRIQTNNNPFQVPIEEQRGDYDLNAVRLCFQVTVRDPSGRPLRLPPVLSHPIFDNRAPNTAEKICRVNRNSGSCLGGDEIFLLCDKVQKEDIEVYFTGPGWEARGSFSQADVHRQVAIVFRTPPYADPSLQAPVRVSMQLRRPSDRELSEPMEFQYLPDTDDRHRIEEKRKRTYETFKSIMKKSPFSGPTDPRPPPRRIAVPSRSSASVPKPAPQPYPFTSSLSTINYDEFPTMVFPSGQISQASALAPAPPQVLPQAPAPAPAPAMVSALAQAPAPVPVLAPGPPQAVAPPAPKPTQAGEGTLSEALLQLQFDDEDLGALLGNSTDPAVFTDLASVDNSEFQQLLNQGIPVAPHTTEPMLMEYPEAITRLVTAQRPPDPAPAPLGAPGLPNGLLSGDEDFSSIADMDFSALLSQISS

SEQ ID NO: 174 - protein, 541 aa, Artificial Sequence
  Synthetic polypeptide p65, isoform 3
MDELFPLIFPAEPAQASGPYVEIIEQPKQRGMRFRYKCEGRSAGSIPGERSTDTTKTHPTIKINGYTGPGTVRISLVTKDPPHRPHPHELVGKDCRDGFYEAELCPDRCIHSFQNLGIQCVKKRDLEQAISQRIQTNNNPFQVPIEEQRGDYDLNAVRLCFQVTVRDPSGRPLRLPPVLSHPIFDNRAPNTAELKICRVNRNSGSCLGGDEIFLLCDKVQKGWEARGSFSQADVHRQVAIVFRTPPYADPSLQAPVRVSMQLRRPSDRELSEPMEFQYLPDTDDRHRIEEKRKRTYETFKSIMKKSPFSGPTDPRPPPRRIAVPSRSSASVPKPAPQPYPFTSSLSTINYDEFPTMVFPSGQISQASALAPAPPQVLPQAPAPAPAPAMVSALAQAPAPVPVLAPGPPQAVAPPAPKPTQAGEGTLSEALLQLQFDDEDLGALLGNSTDPAVFTDLASVDNSEFQQLLNQGIPVAPHTTEPMLMEYPEAITRLVTGAQRPPDPAPAPLGAPGLPNGLLSGDEDFSSIADMDFSALLSQISS

SEQ ID NO: 175 - protein, 548 aa, Artificial Sequence
  Synthetic polypeptide p65, isoform 4
MDELFPLIFPAEPAQASGPYVEIIEQPKQRGMRFRYKCEGRSAGSIPGERSTDTTKTHPTIKINGYTGPGTVRISLVTKDPPHRPHPHELVGKDCRDGFYEAELCPDRCIHSFQNLGIQCVKKRDLEQAISQRIQTNNNPFQEEQRGDYDLNAVRLCFQVTVRDPSGRPLRLPPVLSHPIFDNRAPNTAELKICRVNRNSGSCLGGDEIFLLCDKVQKEDIEVYFTGPGWEARGSFSQADVHRQVAIVFRTPPYADPSLQAPVRVSMQLRRPSDRELSEPMEFQYLPDTDDRHRIEEKRKRTYETFKSIMKKSPFSGPTDPRPPPRRIAVPSRSSASVPKPAPQPYPFTSSLSTINYDEFPTMVFPSGQISQASALAPAPPQVLPQAPAPAPAPAMVSALAQAPAPVPVLAPGPPQAVAPPAPKPTQAGEGTLSEALLQLQFDDEDLGALLGNSTDPAVFTDLASVDNSEFQQLLNQGIPVAPHTTEPMLMEYPEAITRLVTGAQRPPDPAPAPLGAPGLPNGLLSGDEDFSSIADMDFSALLSQISS

SEQ ID NO: 176 - protein, 490 aa, Artificial Sequence
  Synthetic polypeptide VP16
MDLLVDELFADMNADGASPPPPRPAGGPKNTPAAPPLYATGRLSQAQLMPSPPMPVPPAALFNRLLDDLGFSAGPALCTMLDTWNEDLFSALPTNADLYRECKFLSTLPSDVVEWGDAYVPERTQIDIRAHGDVAFPTLPATRDGLGLYYEALSRFFHAELRAREESYRTVLANFCSALYRYLRASVRQLHRQAHMRGRDRDLGEMLRATIADRYYRETARLARVLFLHLYLFLTREILWAAYAEQMMRPDLFDCLCCDLESWRQLAGLFQPFMFVNGALTVRGVPIEARRLRELNHIREHLNLPLVRSAATEEPGAPLTTPPTLHGNQARASGYFMVLIRAKLDSYSSFTTSPSEAVMREHAYSRARTKNNYGSTIEGLLDLPDDDAPEEAGLAAPRLSFLPAGHTRRLSTAPPTDVSLGDELHLDGEDVAMAHADALDDFDLDMLGDGDSPGPGFTPHDSAPYGALDMADFEFEQMFTDALGIDEYGG

SEQ ID NO: 177 - protein, 50 aa, Artificial Sequence
  Synthetic polypeptide VP64
DALDDFDLDMLGSDALDDFDLDMLGSDALDDFDLDMLGSDALDDFDLDML

SEQ ID NO: 178-181 - skipped (4 entries)

SEQ ID NO: 182 - protein, 598 aa, Homo sapiens
MPCIQAQYGTPAPSPGPRDHLASDPLTPEFIKPTMDLASPEAAPAAPTALPSFSTFMDGYTGEFDTFLYQLPGTVQPCSSASSSASSTSSSSATSPASASFKFEDFQVYGCYPGPLSGPVDEALSSSGSDYYGSPCSAPSPSTPSFQPPQLSPWDGSFGHFSPSQTYEGLRAWTEQLPKASGPPQPPAFFSFSPPTGPSPSLAQSPLKLFPSQATHQLGEGESYSMPTAFPGLAPTSPHLEGSGILDTPVTSTKARSGAPGGSEGRCAVCGDNASCQHYGVRTCEGCKGFFKRTVQKNAKYICLANKDCPVDKRRRNRCQFCRFQKCLAVGMVKEVVRTDSLKGRRGRLPSKPKQPPDASPANLLTSLVRAHLDSGPSTAKLDYSKFQELVLPHFGKEDAGDVQQFYDLLSGSLEVIRKWAEKIPGFAELSPADQDLLLESAFLELFILRLAYRSKPGEGKLIFCSGLVLHRLQCARGFGDWIDSILAFSRSLHSLLVDVPAFACLSALVLITDRHGLQEPRRVEELQNRIASCLKEHVAAVAGEPQPASCLSRLLGKLPELRTLCTQGLQRIFYLKLEDLVPPPPIIDKIFMDTLPF

SEQ ID NO: 183 - protein, 611 aa, Homo sapiens
MWLAKACWSIQSEMPCIQAQYGTPAPSPGPRDHLASDPLTPEFIKPTMDLASPEAAPAAPTALPSFSTFMDGYTGEFDTFLYQLPGTVQPCSSASSSASSTSSSSATSPASASFKFEDFQVYGCYPGPLSGPVDEALSSSGSDYYGSPCSAPSPSTPSFQPPQLSPWDGSFGHFSPSQTYEGLRAWTEQLPKASGPPQPPAFFSFSPPTGPSPSLAQSPLKLFPSQATHQLGEGESYSMPTAFPGLAPTSPHLEGSGILDTPVTSTKARSGAPGGSEGRCAVCGDNASCQHYGVRTCEGCKGFFKRTVQKNAKYICLANKDCPVDKRRRNRCQFCRFQKCLAVGMVKEVVRTDSLKGRRGRLPSKPKQPPDASPANLLTSLVRAHLDSGPSTAKLDYSKFQELVLPHFGKEDAGDVQQFYDLLSGSLEVIRKWAEKIPGFAELSPADQDLLLESAFLELFILRLAYRSKPGEGKLIFCSGLVLHRLQCARGFGDWIDSILAFSRSLHSLLVDVPAFACLSALVLITDRHGLQEPRRVEELQNRIASCLKEHVAAVAGEPQPASCLSRLLGKLPELRTLCTQGLQRIFYLKLEDLVPPPPIIDKIFMDTLPF

SEQ ID NO: 184 - protein, 325 aa, Homo sapiens
MPCIQAQYGTPAPSPGPRDHLASDPLTPEFIKPTMDLASPEAAPAAPTALPSFSTFMDGYTGEFDTFLYQLPGTVQPCSSASSSASSTSSSSATSPASASFKFEDFQVYGCYPGPLSGPVDEALSSSGSDYYGSPCSAPSPSTPSFQPPQLSPWDGSFGHFSPSQTYEGLRAWTEQLPKASGPPQPPAFFSFSPPTGPSPSLAQSPLKLFPSQATHQLGEGESYSMPTAFPGLAPTSPHLEGSGILDTPVTSTKARSGAPGGSEGRCAVCGDNASCQHYGVRTCEGCKGFFKVPRSPRWGLLLEMERGWPHPIGTCGLPLGSPPS

SEQ ID NO: 185 - protein, 598 aa, Homo sapiens
MPCVQAQYGSSPQGASPASQSYSYHSSGEYSSDFLTPEFVKFSMDLTNTEITATTSLPSFSTFMDNYSTGYDVKPPCLYQMPLSGQQSSIKVEDIQMHNYQQHSHLPPQSEEMMPHSGSVYYKPSSPPTPTTPGFQVQHSPMWDDPGSLHNFHQNYVATTHMIEQRKTPVSRLSLFSFKQSPPGTPVSSCQMRFDGPLHVPMNPEPAGSHHVVDGQTFAVPNPIRKPASMGFPGLQIGHASQLLDTQVPSPPSRGSPSNEGLCAVCGDNAACQHYGVRTCEGCKGFFKRTVQKNAKYVCLANKNCPVDKRRRNRCQYCRFQKCLAVGMVKEVVRTDSLKGRRGRLPSKPKSPQEPSPPSPPVSLISALVRAHVDSNPAMTSLDYSRFQANPDYQMSGDDTQHIQQFYDLLTGSMEIIRGWAEKIPGFADLPKADQDLLFESAFLELFVLRLAYRSNPVEGKLIFCNGVVLHRLQCVRGFGEWIDSIVEFSSNLQNMNIDISAFSCIAALAMVTERHGLKEPKRVEELQNKIVNCLKDHVTFNNGGLNRPNYLSKLLGKLPELRTLCTQGLQRIFYLKLEDLVPPPAIIDKLFLDTLPF

SEQ ID NO: 186 - protein, 500 aa, Homo sapiens
MDNYSTGYDVKPPCLYQMPLSGQQSSIKVEDIQMHNYQQHSHLPPQSEEMMPHSGSVYYKPSSPPTPTTPGFQVQHSPMWDDPGSLHNFHQNYVATTHMIEQRKTPVSRLSLFSFKQSPPGTPVSSCQMRFDGPLHVPMNPEPAGSHHVVDGQTFAVPNPIRKPASMGFPGLQIGHASQLLDTQVPSPPSRGSPSNEGLCAVCGDNAACQHYGVRTCEGCKGFFKRTVQKNAKYVCLANKNCPVDKRRRNRCQYCRFQKCLAVGMVKEVVRTDSLKGRRGRLPSKPKSPQEPSPPSPPVSLISALVRAHVDSNPAMTSLDYSRFQANPDYQMSGDDTQHIQQFYDLLTGSMEIIRGWAEKIPGFADLPKADQDLLFESAFLELFVLRLAYRSNPVEGKLIFCNGVVLHRLQCVRGFGEWIDSIVEFSSNLQNMNIDISAFSCIAALAMVTERHGLKEPKRVEELQNKIVNCLKDHVTFNNGGLNRPNYLSKLLGKLPELR

SEQ ID NO: 187 - protein, 626 aa, Homo sapiens
MPCVQAQYSPSPPGSSYAAQTYSSEYTTEIMNPDYTKLTMDLGSTEITATATTSLPSISTFVEGYSSNYELKPSCVYQMQRPLIKVEEGRAPSYHHHHHHHHHHHHHHQQQHQQPSIPPASSPEDEVLPSTSMYFKQSPPSTPTTPAFPPQAGALWDEALPSAPGCIAPGPLLDPPMKAVPTVAGARFPLFHFKPSPPHPPAPSPAGGHHLGYDPTAAAALSLPLGAAAAAGSQAAALESHPYGLPLAKRAAPLAFPPLGLTPSPTASSLLGESPSLPSPPSRSSSSGEGTCAVCGDNAACQHYGVRTCEGCKGFFKRTVQKNAKYVCLANKNCPVDKRRRNRCQYCRFQKCLSVGMVKEVVRTDSLKGRRGRLPSKPKSPLQQEPSQPSPPSPPICMMNALVRALTDSTPRDLDYSRYCPTDQAAAGTDAEHVQQFYNLLTASIDVSRSWAEKIPGFTDLPKEDQTLLIESAFLELFVLRLSIRSNTAEDKFVFCNGLVLHRLQCLRGFGEWLDSIKDFSLNLQSLNLDIQALACLSALSMITERHGLKEPKRVEELCNKITSSLKDHQSKGQALEPTESKVLGALVELRKICTLGLQRIFYLKLEDLVSPPSIIDKLFLDTLPF

SEQ ID NO: 188 - protein, 443 aa, Homo sapiens
MPCVQAQYSPSPPGSSYAAQTYSSEYTTEIMNPDYTKLTMDLGSTEITATATTSLPSISTFVEGYSSNYELKPSCVYQMQRPLIKVEEGRAPSYHHHHHHHHHHHHHHQQQHQQPSIPPASSPEDEVLPSTSMYFKQSPPSTPTTPAFPPQAGALWDEALPSAPGCIAPGPLLDPPMKAVPTVAGARFPLFHFKPSPPHPPAPSPAGGHHLGYDPTAAAALSLPLGAAAAAGSQAAALESHPYGLPLAKRAAPLAFPPLGLTPSPTASSLLGESPSLPSPPSRSSSSGEGTCAVCGDNAACQHYGVRTCEGCKGFFKRTVQKNAKYVCLANKNCPVDKRRRNRCQYCRFQKCLSVGMVKEVVRTDSLKGRRGRLPSKPKSPLQQEPSQPSPPSPPICMMNALVRALTDSTPRDLDYSRVSFMISCFQMNDQGLYLWLLVIRVD

SEQ ID NO: 189 - protein, 637 aa, Homo sapiens
MHDSIRFGNVDMPCVQAQYSPSPPGSSYAAQTYSSEYTTEIMNPDYTKLTMDLGSTEITATATTSLPSISTFVEGYSSNYELKPSCVYQMQRPLIKVEEGRAPSYHHHHHHHHHHHHHHQQQHQQPSIPPASSPEDEVLPSTSMYFKQSPPSTPTTPAFPPQAGALWDEALPSAPGCIAPGPLLDPPMKAVPTVAGARFPLFHFKPSPPHPPAPSPAGGHHLGYDPTAAAALSLPLGAAAAAGSQAAALESHPYGLPLAKRAAPLAFPPLGLTPSPTASSLLGESPSLPSPPSRSSSSGEGTCAVCGDNAACQHYGVRTCEGCKGFFKRTVQKNAKYVCLANKNCPVDKRRRNRCQYCRFQKCLSVGMVKEVVRTDSLKGRRGRLPSKPKSPLQQEPSQPSPPSPPICMMNALVRALTDSTPRDLDYSRYCPTDQAAAGTDAEHVQQFYNLLTASIDVSRSWAEKIPGFTDLPKEDQTLLIESAFLELFVLRLSIRSNTAEDKFVFCNGLVLHRLQCLRGFGEWLDSIKDFSLNLQSLNLDIQALACLSALSMITERHGLKEPKRVEELCNKITSSLKDHQSKGQALEPTESKVLGALVELRKICTLGLQRIFYLKLEDLVSPPSIIDKLFLDTLPF

SEQ ID NO: 190 - protein, 526 aa, Homo sapiens
MDVRFYPPPAQPAAAPDAPCLGPSPCLDPYYCNKFDGENMYMSMTEPSQDYVPASQSYPGPSLESEDFNIPPITPPSLPDHSLVHLNEVESGYHSLCHPMNHNGLLPFHPQNMDLPEITVSNMLGQDGTLLSNSISVMPDIRNPEGTQYSSHPQMAAMRPRGQPADIRQQPGMMPHGQLTTINQSQLSAQLGLNMGGSNVPHNSPSPPGSKSATPSPSSSVHEDEGDDTSKINGGEKRPASDMGKKPKTPKKKKKKDPNEPQKPVSAYALFFRDTQAAIKGQNPNATFGEVSKIVASMWDGLGEEQKQVYKKKTEAAKKEYLKQLAAYRASLVSKSYSEPVDVKTSQPPQLINSKPSVFHGPSQAHSALYLSSHYHQQPGMNPHLTAMHPSLPRNIAPKPNNQMPVTVSIANMAVSPPPPLQISPPLHQHLNMQQHQPLTMQQPLGNQLPMQVQSALHSPTMQQGFTLQPDYQTIINPTSTAAQVVTQAMEYVRSGCRNPPPQPVDWNNDYCSSGGMQRDKALYLT

SEQ ID NO: 191 - protein, 488 aa, Homo sapiens
MQQTRTEAVAGAFSRCLGFCGMRLGLLLLARHWCIAGVFPQKFDGDSAYVGMSDGNPELLSTSQTYNGQSENNEDYEIPPITPPNLPEPSLLHLGDHEASYHSLCHGLTPNGLLPAYSYQAMDLPAIMVSNMLAQDSHLLSGQLPTIQEMVHSEVAAYDSGRPGPLLGRPAMLASHMSALSQSQLISQMGIRSSIAHSSPSPPGSKSATPSPSSSTQEEESEVHFKISGEKRPSADPGKKAKNPKKKKKKDPNEPQKPVSAYALFFRDTQAAIKGQNPSATFGDVSKIVASMWDSLGEEQKQSSPDQGETKSTQANPPAKMLPPKQPMYAMPGLASFLTPSDLQAFRSGASPASLARTLGSKSLLPGLSASPPPPPSFPLSPTLHQQLSLPPHAQGALLSPPVSMSPAPQPPVLPTPMALQVQLAMSPSPPGPQDFPHISEFPSSSGSCSPGPSNPTSSGDWDSSYPSGECGISTCSLLPRDKSLYLT

SEQ ID NO: 192 - protein, 515 aa, Homo sapiens
MQQTRTEAVAGAFSRCLGFCGMRLGLLLLARHWCIAGVFPQKFDGDSAYVGMSDGNPELLSTSQTYNGQSENNEDYEIPPITPPNLPEPSLLHLGDHEASYHSLCHGLTPNGLLPAYSYQAMDLPAIMVSNMLAQDSHLLSGQLPTIQEMVHSEVAAYDSGRPGPLLGRPAMLASHMSALSQSQLISQMGIRSSIAHSSPSPPGSKSATPSPSSSTQEEESEVHFKISGEKRPSADPGKKAKNPKKKKKKDPNEPQKPVSAYALFFRDTQAAIKGQNPSATFGDVSKIVASMWDSLGEEQKQAYKRKTEAAKKEYLKALAAYRASLVSKSSPDQGETKSTQANPPAKMLPPKQPMYAMPGLASFLTPSDLQAFRSGASPASLARTLGSKSLLPGLSASPPPPPSFPLSPTLHQQLSLPPHAQGALLSPPVSMSPAPQPPVLPTPMALQVQLAMSPSPPGPQDFPHISEFPSSSGSCSPGPSNPTSSGDWDSSYPSGECGISTCSLLPRDKSLYLT

SEQ ID NO: 193 - protein, 464 aa, Homo sapiens
MSDGNPELLSTSQTYNGQSENNEDYEIPPITPPNLPEPSLLHLGDHEASYHSLCHGLTPNGLLPAYSYQAMDLPAIMVSNMLAQDSHLLSGQLPTIQEMVHSEVAAYDSGRPGPLLGRPAMLASHMSALSQSQLISQMGIRSSIAHSSPSPPGSKSATPSPSSSTQEEESEVHFKISGEKRPSADPGKKAKNPKKKKKKDPNEPQKPVSAYALFFRDTQAAIKGQNPSATFGDVSKIVASMWDSLGEEQKQAYKRKTEAAKKEYLKALAAYRASLVSKSSPDQGETKSTQANPPAKMLPPKQPMYAMPGLASFLTPSDLQAFRSGASPASLARTLGSKSLLPGLSASPPPPPSFPLSPTLHQQLSLPPHAQGALLSPPVSMSPAPQPPVLPTPMALQVQLAMSPSPPGPQDFPHISEFPSSSGSCSPGPSNPTSSGDWDSSYPSGECGISTCSLLPRDKSLYLT

SEQ ID NO: 194 - protein, 506 aa, Homo sapiens
MDVRLYPSAPAVGARPGAEPAGLAHLDYYHGGKFDGDSAYVGMSDGNPELLSTSQTYNGQSENNEDYEIPPITPPNLPEPSLLHLGDHEASYHSLCHGLTPNGLLPAYSYQAMDLPAIMVSNMLAQDSHLLSGQLPTIQEMVHSEVAAYDSGRPGPLLGRPAMLASHMSALSQSQLISQMGIRSSIAHSSPSPPGSKSATPSPSSSTQEEESEVHFKISGEKRPSADPGKKAKNPKKKKKKDPNEPQKPVSAYALFFRDTQAAIKGQNPSATFGDVSKIVASMWDSLGEEQKQAYKRKTEAAKKEYLKALAAYRASLVSKSSPDQGETKSTQANPPAKMLPPKQPMYAMPGLASFLTPSDLQAFRSGASPASLARTLGSKSLLPGLSASPPPPPSFPLSPTLHQQLSLPPHAQGALLSPPVSMSPAPQPPVLPTPMALQVQLAMSPSPPGPQDFPHISEFPSSSGSCSPGPSNPTSSGDWDSSYPSGECGISTCSLLPRDKSLYLT

SEQ ID NO: 195 - protein, 451 aa, Homo sapiens
MNLEGGGRGGEFGMSAVSCGNGKLRQWLIDQIDSGKYPGLVWENEEKSIFRIPWKHAGKQDYNREEDAALFKAWALFKGKFREGIDKPDPPTWKTRLRCALNKSNDFEELVERSQLDISDPYKVYRIVPEGAKKGAKQLTLEDPQMSMSHPYTMTTPYPSLPAQQVHNYMMPPLDRSWRDYVPDQPHPEIPYQCPMTFGPRGHHWQGPACENGCQVTGTFYACAPPESQAPGVPTEPSIRSAEALAFSDCRLHICLYYREILVKELTTSSPEGCRISHGHTYDASNLDQVLFPYPEDNGQRKNIEKLLSHLERGVVLWMAPDGLYAKRLCQSRIYWDGPLALCNDRPNKLERDQTCKLFDTQQFLSELQAFAHHGRSLPRFQVTLCFGEEFPDPQRQRKLITAHVEPLLARQLYYFAQQNSGHFLRGYDLPEHISNPEDYHRSIRHSSIQE

SEQ ID NO: 196 - protein, 450 aa, Homo sapiens
MNLEGGGRGGEFGMSAVSCGNGKLRQWLIDQIDSGKYPGLVWENEEKSIFRIPWKHAGKQDYNREEDAALFKAWALFKGKFREGIDKPDPPTWKTRLRCALNKSNDFEELVERSQLDISDPYKVYRIVPEGAKKGAKQLTLEDPQMSMSHPYTMTTPYPSLPAQVHNYMMPPLDRSWRDYVPDQPHPEIPYQCPMTFGPRGHHWQGPACENGCQVTGTFYACAPPESQAPGVPTEPSIRSAEALAFSDCRLHICLYYREILVKELTTSSPEGCRISHGHTYDASNLDQVLFPYPEDNGQRKNIEKLLSHLERGVVLWMAPDGLYAKRLCQSRIYWDGPLALCNDRPNKLERDQTCKLFDTQQFLSELQAFAHHGRSLPRFQVTLCFGEEFPDPQRQRKLITAHVEPLLARQLYYFAQQNSGHFLRGYDLPEHISNPEDYHRSIRHSSIQE

SEQ ID NO: 197 - protein, 125 aa, Homo sapiens
MPHSSDSSDSSFSRSPPPGKQDSSDDVRRVQRREKNRIAAQKSRQRQTQKADTLHLESEDLEKQNAALRKEIKQLTEELKYFTSVLNSHEPLCSVLAASTPSPPEVVYSAHAFHQPHVSSPRFQP

SEQ ID NO: 198 - protein, 274 aa, Homo sapiens
MHLCGGNGLLTQTDPKEQQRQLKKQKNRAAAQRSRQKHTDKADALHQQHESLEKDNLALRKEIQSLQAELAWWSRTLHVHERLCPMDCASCSAPGLLGCWDQAEGLLGPGPQGQHGCREQLELFQTPGSCYPAQPLSPGPQPHDSPSLLQCPLPSLSLGPAVVAEPPVQLSPSPLLFASHTGSSLQGSSSKLSALQPSLTAQTAPPQPLELEHPTRGKLGSSPDNPSSALGLARLQSREHKPALSAATWQGLVVDPSPHPLLAFPLLSSAQVHF

SEQ ID NO: 199 - protein, 189 aa, Homo sapiens
MDCASCSAPGLLGCWDQAEGLLGPGPQGQHGCREQLELFQTPGSCYPAQPLSPGPQPHDSPSLLQCPLPSLSLGPAVVAEPPVQLSPSPLLFASHTGSSLQGSSSKLSALQPSLTAQTAPPQPLELEHPTRGKLGSSPDNPSSALGLARLQSREHKPALSAATWQGLVVDPSPHPLLAFPLLSSAQVHF

SEQ ID NO: 200 - protein, 127 aa, Homo sapiens
MSQGLPAAGSVLQRSVAAPGNQPQPQPQQQSPEDDDRKVRRREKNRVAAQRSRKKQTQKADKLHEEYESLEQENTMLRREIGKLTEELKHLTEALKEHEKMCPLLLCPMNFVPVPPRPDPVAGCLPR

SEQ ID NO: 201 - protein, 261 aa, Homo sapiens
MVVVAAAPNPADGTPKVLLLSGQPASAAGAPAGQALPLMVPAQRGASPEAASGGLPQARKRQRLTHLSPEEKALRRKLKNRVAAQTARDRKKARMSELEQQVVDLEEENQKLLLENQLLREKTHGLVVENQELRQRLGMDALVAEEEAEAKGNEVRPVAGSAESAALRLRAPLQQVQAQLSPLQNISPWILAVLTLQIQSLISCWAFWTTWTQSCSSNALPQSLPAWRSSQRSTQKDPVPYQPPFLCQWGRHQPSWKPLMN

SEQ ID NO: 202 - protein, 376 aa, Homo sapiens
MVVVAAAPNPADGTPKVLLLSGQPASAAGAPAGQALPLMVPAQRGASPEAASGGLPQARKRQRLTHLSPEEKALRRKLKNRVAAQTARDRKKARMSELEQQVVDLEEENQKLLLENQLLREKTHGLVVENQELRQRLGMDALVAEEEAEAKGNEVRPVAGSAESAAGAGPVVTPPEHLPMDSGGIDSSDSESDILLGILDNLDPVMFFKCPSPEPASLEELPEVYPEGPSSLPASLSLSVGTSSAKLEAINELIRFDHIYTKPLVLEIPSETESQANVVVKIEEAPLSPSENDHPEFIVSVKEEPVEDDLVPELGISNLLSSSHCPKPSSCLLDAYSDCGYGGSLSPFSDMSSLLGVNHSWEDTFANELFPQLISV

SEQ ID NO: 203 - protein, 331 aa, Homo sapiens
MTAKMETTFYDDALNASFLPSESGPYGYSNPKILKQSMTLNLADPVGSLKPHLRAKNSDLLTSPDVGLLKLASPELERLIIQSSNGHITTTPTPTQFLCPKNVTDEQEGFAEGFVRALAELHSQNTLPSVTSAAQPVNGAGMVAPAVASVAGGSGSGGFSASLHSEPPVYANLSNFNPGALSSGGGAPSYGAAGLAFPAQPQQQQQPPHHLPQQMPVQHPRLQALKEEPQTVPEMPGETPPLSPIDMESQERIKAERKRMRNRIAASKCRKRKLERIARLEEKVKTLKAQNSELASTANMLREQVAQLKQKVMNHVNSGCQLMLTQQLQTF

SEQ ID NO: 204 - protein, 380 aa, Homo sapiens
MMFSGFNADYEASSSRCSSASPAGDSLSYYHSPADSFSSMGSPVNAQDFCTDLAVSSANFIPTVTAISTSPDLQWLVQPALVSSVAPSQTRAPHPFGVPAPSAGAYSRAGVVKTMTGGRAQSIGRRGKVEQLSPEEEEKRRIRRERNKMAAAKCRNRRRELTDTLQAETDQLEDEKSALQTEIANLLKEKEKLEFILAAHRPACKIPDDLGFPEEMSVASLDLTGGLPEVATPESEEAFTLPLLNDPEPKPSVEPVKSISSMELKTEPFDDFLFPASSRPSGSETARSVPDMDLSGSFYAADWEPLHSGSLGMGPMATELEPLCTPVVTCTPSCTAYTSSFVFTYPEADSFPSCAAAHRKGSSSNEPSSDSLSSPTLLAL

SEQ ID NO: 205 - protein, 266 aa, Homo sapiens
MTGGRAQSIGRRGKVEQLSPEEEEKRRIRRERNKMAAAKCRNRRRELTDTLQAETDQLEDEKSALQTEIANLLKEKEKLEFILAAHRPACKIPDDLGFPEEMSVASLDLTGGLPEVATPESEEAFTLPLLNDPEPKPSVEPVKSISSMELKTEPFDDFLFPASSRPSGSETARSVPDMDLSGSFYAADWEPLHSGSLGMGPMATELEPLCTPVVTCTPSCTAYTSSFVFTYPEADSFPSCAAAHRKGSSSNEPSSDSLSSPTLLAL

SEQ ID NO: 206 - protein, 344 aa, Homo sapiens
MMFSGFNADYEASSSRCSSASPAGDSLSYYHSPADSFSSMGSPVNAQDFCTDLAVSSANFIPTVTAISTSPDLQWLVQPALVSSVAPSQTRAPHPFGVPAPSAGAYSRAGVVKTMTGGRAQSIGRRGKVEQETDQLEDEKSALQTEIANLLKEKEKLEFILAAHRPACKIPDDLGFPEEMSVASLDLTGGLPEVATPESEEAFTLPLLNDPEPKPSVEPVKSISSMELKTEPFDDFLFPASSRPSGSETARSVPDMDLSGSFYAADWEPLHSGSLGMGPMATELEPLCTPVVTCTPSCTAYTSSFVFTYPEADSFPSCAAAHRKGSSSNEPSSDSLSSPTLLAL

SEQ ID NO: 207 - protein, 157 aa, Homo sapiens
MQFMLLFSRQGKLRLQKWYVPLSDKEKKKITRELVQTVLARKPKMCSFLEWRDLKIVYKRYASLYFCCAIEDQDNELITLEIIHRYVELLDKYFGSVCELDIIFNFEKAYFILDEFLLGGEVQETSKKNVLKAIEQADLLQEEAETPRSVLEEIGLT

SEQ ID NO: 208 - protein, 202 aa, Homo sapiens
MPAGCPPHSTTASLPQHGDRGFPFAAAAAAGQAPPRPRPAAAMQFMLLFSRQGKLRLQKWYVPLSDKEKKKITRELVQTVLARKPKMCSFLEWRDLKIVYKRYASLYFCCAIEDQDNELITLEIIHRYVELLDKYFGSVCELDIIFNFEKAYFILDEFLLGGEVQETSKKNVLKAIEQADLLQEKTETMYHSKSFIGFKKAY

SEQ ID NO: 209 - protein, 158 aa, Homo sapiens
MMRFMLLFSRQGKLRLQKWYLATSDKERKKMVRELMQVVLARKPKMCSFLEWRDLKVVYKRYASLYFCCAIEGQDNELITLELIHRYVELLDKYFGSVCELDIIFNFEKAYFILDEFLMGGDVQDTSKKSVLKAIEQADLLQEEDESPRSVLEEMGLA

SEQ ID NO: 210 - protein, 133 aa, Homo sapiens
MMRFMLLFSRQGKLRLQKWYLATSDKERKKMVRELMQVVLARKPKMCSFLEWRDLKVVYKRYASLYFCCAIEGQDNELITLELIHRYVELLDKYFGSVCELDIIFNFEKAYFILDEFLMGGDVQDTSTFPFSH

SEQ ID NO: 211 - protein, 154 aa, Homo sapiens
MIHFILLFSRQGKLRLQKWYITLPDKERKKITREIVQIILSRGHRTSSFVDWKELKLVYKRYASLYFCCAIENQDNELLTLEIVHRYVELLDKYFGNVCELDIIFNFEKAYFILDEFIIGGEIQETSKKIAVKAIEDSDMLQEVSTVSQTMGER

SEQ ID NO: 212 - protein, 164 aa, Homo sapiens
MIHFILLFSRQGKLRLQKWYITLPDKERKKITREIVQIILSRGHRTSSFVDWKELKLVYKRYASLYFCCAIENQDNELLTLEIVHRYVELLDKYFGNVCELDIIFNFEKAYFILDEFIIGGEIQETSKKIAVKAIEDSDMLQENRLSPRGRDCSEPRSCHCTLA

SEQ ID NO: 213 - protein, 104 aa, Homo sapiens
MIHFILLFSRQGKLRLQKWYITLPDKERKKITREIVQIILSRGHRTSSFVDWKELKLVYKRYASLYFCCAIENQDNELLTLEIVHRYVELLDKYFGNTWPFARA

SEQ ID NO: 214 - protein, 154 aa, Homo sapiens
MIHFILLFSRQGKLRLQKWYITLPDKERKKITREIVQIILSRGHRTSSFVDWKELKLVYKRYASLYFCCAIENQDNELLTLEIVHRYVELLDKYFGNVCELDIIFNFEKAYFILDEFIIGGEIQETSKKIAVKAIEDSDMLQETMEEYMNKPTF

SEQ ID NO: 215 - protein, 822 aa, Homo sapiens
MPAPIRLRELIRTIRTARTQAEEREMIQKECAAIRSSFREEDNTYRCRNVAKLLYMHMLGYPAHFGQLECLKLIASQKFTDKRIGYLGAMLLLDERQDVHLLMTNCIKNDLNHSTQFVQGLALCTLGCMGSSEMCRDLAGEVEKLLKTSNSYLRKKAALCAVHVIRKVPELMEMFLPATKNLLNEKNHGVLHTSVVLLTEMCERSPDMLAHFRKLVPQLVRILKNLIMSGYSPEHDVSGISDPFLQVRILRLLRILGRNDDDSSEAMNDILAQVATNTETSKNVGNAILYETVLTIMDIKSESGLRVLAINILGRFLLNNDKNIRYVALTSLLKTVQTDHNAVQRHRSTIVDCLKDLDVSIKRRAMELSFALVNGNNIRGMMKELLYFLDSCEPEFKADCASGIFLAAEKYAPSKRWHIDTIMRVLTTAGSYVRDDAVPNLIQLITNSVEMHAYTVQRLYKAILGDYSQQPLVQVAAWCIGEYGDLLVSGQCEEEEPIQVTEDEVLDILESVLISNMSTSVTRGYALTAIMKLSTRFTCTVNRIKKVVSIYGSSIDVELQQRAVEYNALFKKYDHMRSALLERMPVMEKVTTNGPTEIVQTNGETEPAPLETKPPPSGPQPTSQANDLLDLLGGNDITPVIPTAPTSKPSSAGGELLDLLGDINLTGAPAAAPAPASVPQISQPPFLLDGLSSQPLFNDIAAGIPSITAYSKNGLKIEFTFERSNTNPSVTVITIQASNSTELDMTDFVFQAAVPKTFQLQLLSPSSSIVPAFNTGTITQVIKVLNPQKQQLRMRIKLTYNHKGSAMQDLAEVNNFPPQSWQ

SEQ ID NO: 216 - protein, 825 aa, Homo sapiens
MPAPIRLRELIRTIRTARTQAEEREMIQKECAAIRSSFREEDNTYRCRNVAKLLYMHMLGYPAHFGQLECLKLIASQKFTDKRIGYLGAMLLLDERQDVHLLMTNCIKNDLNHSTQFVQGLALCTLGCMGSSEMCRDLAGEVEKLLKTSNSYLRKKAALCAVHVIRKVPELMEMFLPATKNLLNEKNHGVLHTSVVLLTEMCERSPDMLAHFRKNEKLVPQLVRILKNLIMSGYSPEHDVSGISDPFLQVRILRLLRILGRNDDDSSEAMNDILAQVATNTETSKNVGNAILYETVLTIMDIKSESGLRVLAINILGRFLLNNDKNIRYVALTSLLKTVQTDHNAVQRHRSTIVDCLKDLDVSIKRRAMELSFALVNGNNIRGMMKELLYFLDSCEPEFKADCASGIFLAAEKYAPSKRWHIDTIMRVLTTAGSYVRDDAVPNLIQLITNSVEMHAYTVQRLYKAILGDYSQQPLVQVAAWCIGEYGDLLVSGQCEEEEPIQVTEDEVLDILESVLISNMSTSVTRGYALTAIMKLSTRFTCTVNRIKKVVSIYGSSIDVELQQRAVEYNALFKKYDHMRSALLERMPVMEKVTTNGPTEIVQTNGETEPAPLETKPPPSGPQPTSQANDLLDLLGGNDITPVIPTAPTSKPSSAGGELLDLLGDINLTGAPAAAPAPASVPQISQPPFLLDGLSSQPLFNDIAAGIPSITAYSKNGLKIEFTFERSNTNPSVTVITIQASNSTELDMTDFVFQAAVPKTFQLQLLSPSSSIVPAFNTGTITQVIKVLNPQKQQLRMRIKLTYNHKGSAMQDLAEVNNFPPQSWQ

SEQ ID NO: 217 - protein, 423 aa, Homo sapiens
MSASAVYVLDLKGKVLICRNYRGDVDMSEVEHFMPILMEKEEEGMLSPILAHGGVRFMWIKHNNLYLVATSKKNACVSLVFSFLYKVVQVFSEYFKELEEESIRDNFVIIYELLDELMDFGYPQTTDSKILQEYITQEGHKLETGAPRPPATVTNAVSWRSEGIKYRKNEVFLDVIESVNLLVSANGNVLRSEIVGSIKMRVFLSGMPELRLGLNDKVLFDNTGRGKSKSVELEDVKFHQCVRLSRFENDRTISFIPPDGEFELMSYRLNTHVKPLIWIESVIEKHSHSRIEYMIKAKSQFKRRSTANNVEIHIPVPNDADSPKFKTTVGSVKWVPENSEIVWSIKSFPGGKEYLMRAHFGLPSVEAEDKEGKPPISVKFEIPYFTTSGIQVRYLKIIEKSGYQALPWVRYITQNGDYQLRTQ

SEQ ID NO: 218 - protein, 435 aa, Homo sapiens
MSASAVYVLDLKGKVLICRNYRGDVDMSEVEHFMPILMEKEEEGMLSPILAHGGVRFMWIKHNNLYLVATSKKNACVSLVFSFLYKVVQVFSEYFKELEEESIRDNFVIIYELLDELMDFGYPQTTDSKILQEYITQEGHKLETGAPRPPATVTNAVSWRSEGIKYRKNEVFLDVIESVNLLGKYPGVGWLGHTVSANGNVLRSEIVGSIKMRVFLSGMPELRLGLNDKVLFDNTGRGKSKSVELEDVKFHQCVRLSRFENDRTISFIPPDGEFELMSYRLNTHVKPLIWIESVIEKHSHSRIEYMIKAKSQFKRRSTANNVEIHIPVPNDADSPKFKTTVGSVKWVPENSEIVWSIKSFPGGKEYLMRAHFGLPSVEAEDKEGKPPISVKFEIPYFTTSGIQVRYLKIIEKSGYQALPWVRYITQNGDYQLRTQ

SEQ ID NO: 219 - protein, 949 aa, Homo sapiens
MTDSKYFTTTKKGEIFELKAELNSDKKEKKKEAVKKVIASMTVGKDVSALFPDVVNCMQTDNLELKKLVYLYLMNYAKSQPDMAIMAVNTFVKDCEDPNPLIRALAVRTMGCIRVDKITEYLCEPLRKCLKDEDPYVRKTAAVCVAKLHDINAQLVEDQGFLDTLKDLISDSNPMVVANAVAALSEIAESHPSSNLLDLNPQSINKLLTALNECTEWGQIFILDCLANYMPKDDREAQSICERVTPRLSHANSAVVLSAVKVLMKFMEMLSKDLDYYGTLLKKLAPPLVTLLSAEPELQYVALRNINLIVQKRPEILKHEMKVFFVKYNDPIYVKLEKLDIMIRLASQANIAQVLAELKEYATEVDVDFVRKAVRAIGRCAIKVEQSAERCVSTLLDLIQTKVNYVVQEAIVVIKDIFRKYPNKYESVIATLCENLDSLDEPEARAAMIWIVGEYAERIDNADELLESFLEGFHDESTQVQLQLLTAIVKLFLKKPTETQELVQQVLSLATQDSDNPDLRDRGYIYWRLLSTDPVAAKEVVLAEKPLISEETDLIEPTLLDELICYIGTLASVYHKPPSAFVEGGRGVVHKSLPPRTASSESAESPETAPTGAPPGEQPDVIPAQGDLLGDLLNLDLGPPVSGPPLATSSVQMGAVDLLGGGLDSLMGDEPEGIGGTNFVAPPTAAVPANLGAPIGSGLSDLFDLTSGVGTLSGSYVAPKAVWLPAMKAKGLEISGTFTRQVGSISMDLQLTNKALQVMTDFAIQFNRNSFGLAPATPLQVHAPLSPNQTVEISLPLSTVGSVMKMEPLNNLQVAVKNNIDVFYFSTLYPLHILFVEDGKMDRQMFLATWKDIPNENEAQFQIRDCPLNAEAASSKLQSSNIFTVAKRNVEGQDMLYQSLKLTNGIWVLAELRIQPGNPSCTDLELSLKCRAPEVSQHVYQAYETILKN

SEQ ID NO: 220 - protein, 942 aa, Homo sapiens
MTDSKYFTTTKKGEIFELKAELNSDKKEKKKEAVKKVIASMTVGKDVSALFPDVVNCMQTDNLELKKLVYLYLMNYAKSQPDMAIMAVNTFVKDCEDPNPLIRALAVRTMGCIRVDKITEYLCEPLRKCLKDEDPYVRKTAAVCVAKLHDINAQLVEDQGFLDTLKDLISDSNPMVVANAVAALSEIAESHPSSNLLDLNPQSINKLLTALNECTEWGQIFILDCLANYMPKDDREAQSICERVTPRLSHANSAVVLSAVKVLMKFMEMLSKDLDYYGTLLKKLAPPLVTLLSAEPELQYVALRNINLIVQKRPEILKHEMKVFFVKYNDPIYVKLEKLDIMIRLASQANIAQVLAELKEYATEVDVDFVRKAVRAIGRCAIKVEQSAERCVSTLLDLIQTKVNYVVQEAIVVIKDIFRKYPNKYESVIATLCENLDSLDEPEARAAMIWIVGEYAERIDNADELLESFLEGFHDESTQVQLQLLTAIVKLFLKKPTETQELVQQVLSLATQDSDNPDLRDRGYIYWRLLSTDPVAAKEVVLAEKPLISEETDLIEPTLLDELICYIGTLASVYHKPPSAFVEGGRGVVHKSLPPRTASSESAESPETAPTGAPPGEQPDVIPAQGDLLGDLLNLDLGPPVSGPPLATSSVQMGAVDLLGGGLDSLIGGTNFVAPPTAAVPANLGAPIGSGLSDLFDLTSGVGTLSGSYVAPKAVWLPAMKAKGLEISGTFTRQVGSISMDLQLTNKALQVMTDFAIQFNRNSFGLAPATPLQVHAPLSPNQTVEISLPLSTVGSVMKMEPLNNLQVAVKNNIDVFYFSTLYPLHILFVEDGKMDRQMFLATWKDIPNENEAQFQIRDCPLNAEAASSKLQSSNIFTVAKRNVEGQDMLYQSLKLTNGIWVLAELRIQPGNPSCTDLELSLKCRAPEVSQHVYQAYETILKN

SEQ ID NO: 221 - protein, 939 aa, Homo sapiens
MTDSKYFTTTKKGEIFELKAELNSDKKEKKKEAVKKVIASMTVGKDVSALFPDVVNCMQTDNLELKKLVYLYLMNYAKSQPDMAIMAVNTFVKDCEDPNPLIRALAVRTMGCIRVDKITEYLCEPLRKCLKDEDPYVRKTAAVCVAKLHDINAQLVEDQGFLDTLKDLISDSNPMVVANAVAALSEIAESHPSSNLLDLNPQSINKLLTALNECTEWGQIFILDCLANYMPKDDREAQSICERVTPRLSHANSAVVLSAVKVLMKFMEMLSKDLDYYGTLLKKLAPPLVTLLSAEPELQYVALRNINLIVQKRPEILKHEMKVFFVKYNDPIYVKLEKLDIMIRLASQANIAQVLAELKEYATEVDVDFVRKAVRAIGRCAIKVEQSAERCVSTLLDLIQTKVNYVVQEAIVVIKDIFRKYPNKYESVIATLCENLDSLDEPEARAAMIWIVGEYAERIDNADELLESFLEGFHDESTQVQLQLLTAIVKLFLKKPTETQELVQQVLSLATQDSDNPDLRDRGYIYWRLLSTDPVAAKEVVLAEKPLISEETDLIEPTLLDELICYIGTLASVYHKPPSAFVEGGRGVVHKSLPPRTASSESAESPETAPTGAPPGEQPDVIPAQGDLLGDLLNLDLGPPVSGPPLATSSVQMGAVDLLGGGLDSLIGGTNFVAPPTAAVPANLGAPIGSGLSDLFDLTSGVGTLSGSYVAPKAVWLPAMKAKGLEISGTFTRQVGSISMDLQLTNKALQVMTDFAIQFNRNSFGLAPATPLQVHAPLSPNQTVEISLPLSTVGSVMKMEPLNNLQVAVKNNIDVFYFSTLYPLHILFVEDGKMDRQMFLATWKDIPNENEAQFQIRDCPLNAEAASSKLQSSNIFTVAKRNVEGQDMLYQSLKLTNGIWVLAELRIQPGNPSCTLSLKCRAPEVSQHVYQAYETILKN

SEQ ID NO: 222 - protein, 919 aa, Homo sapiens
MTDSKYFTTTKKGEIFELKAELNSDKKEKKKEAVKKVIASMTVGKDVSALFPDVVNCMQTDNLELKKLVYLYLMNYAKSQPDMAIMAVNTFVKDCEDPNPLIRALAVRTMGCIRVDKITEYLCEPLRKCLKDEDPYVRKTAAVCVAKLHDINAQLVEDQGFLDTLKDLISDSNPMVVANAVAALSEIAESHPSSNLLDLNPQSINKLLTALNECTEWGQIFILDCLANYMPKDDREAQSICERVTPRLSHANSAVVLSAVKVLMKFMEMLSKDLDYYGTLLKKLAPPLVTLLSAEPELQYVALRNINLIVQKRPEILKHEMKVFFVKYNDPIYVKLEKLDIMIRLASQANIAQVLAELKEYATEVDVDFVRKAVRAIGRCAIKVEQSAERCVSTLLDLIQTKVNYVVQEAIVVIKDIFRKYPNKYESVIATLCENLDSLDEPEARAAMIWIVGEYAERIDNADELLESFLEGFHDESTQVQLQLLTAIVKLFLKKPTETQELVQQVLSLATQDSDNPDLRDRGYIYWRLLSTDPVAAKEVVLAEKPLISEETDLIEPTLLDELICYIGTLASVYHKPPSAFVEGGRGVVHKSLPPRTASSESAESPETAPTGAPPGEQPDVIPAQGDLLGDLLNLDLGPPVSGPPLATSSVQMGAVDLLGGGLDSLIGGTNFVAPPTAAVPANLGAPIGSGLSDLFDLTSGVGTLSGSYVAPKAVGSISMDLQLTNKALQVMTDFAIQFNRNSFGLAPATPLQVHAPLSPNQTVEISLPLSTVGSVMKMEPLNNLQVAVKNNIDVFYFSTLYPLHILFVEDGKMDRQMFLATWKDIPNENEAQFQIRDCPLNAEAASSKLQSSNIFTVAKRNVEGQDMLYQSLKLTNGIWVLAELRIQPGNPSCTLSLKCRAPEVSQHVYQAYETILKN

SEQ ID NO: 223 - protein, 423 aa, Homo sapiens
MSASAVFILDVKGKPLISRNYKGDVAMSKIEHFMPLLVQREEEGALAPLLSHGQVHFLWIKHSNLYLVATTSKNANASLVYSFLYKTIEVFCEYFKELEEESIRDNFVIVYELLDELMDFGFPQTTDSKILQEYITQQSNKLETGKSRVPPTVTNAVSWRSEGIKYKKNEVFIDVIESVNLLVNANGSVLLSEIVGTIKLKVFLSGMPELRLGLNDRVLFELTGRSKNKSVELEDVKFHQCVRLSRFDNDRTISFIPPDGDFELMSYRLSTQVKPLIWIESVIEKFSHSRVEIMVKAKGQFKKQSVANGVEISVPVPSDADSPRFKTSVGSAKYVPERNVVIWSIKSFPGGKEYLMRAHFGLPSVEKEEVEGRPPIGVKFEIPYFTVSGIQVRYMKIIEKSGYQALPWVRYITQSGDYQLRTS

SEQ ID NO: 224 - protein, 425 aa, Homo sapiens
MSASAVFILDVKGKPLISRNYKGDVAMSKIEHFMPLLVQREEEGALAPLLSHGQVHFLWIKHSNLYLVATTSKNANASLVYSFLYKTIEVFCEYFKELEEESIRDNFVIVYELLDELMDFGFPQTTDSKILQEYITQQSNKLETGKSRVPPTVTNAVSWRSEGIKYKKNEVFIDVIESVNLLVNANGSVLLSEIVGTIKLKVFLSGMPELRLGLNDRVLFELTGLSGSKNKSVELEDVKFHQCVRLSRFDNDRTISFIPPDGDFELMSYRLSTQVKPLIWIESVIEKFSHSRVEIMVKAKGQFKKQSVANGVEISVPVPSDADSPRFKTSVGSAKYVPERNVVIWSIKSFPGGKEYLMRAHFGLPSVEKEEVEGRPPIGVKFEIPYFTVSGIQVRYMKIIEKSGYQALPWVRYITQSGDYQLRTS

SEQ ID NO: 225 - protein, 785 aa, Homo sapiens
MVVPSLKLQDLIEEIRGAKTQAQEREVIQKECAHIRASFRDGDPVHRHRQLAKLLYVHMLGYPAHFGQMECLKLIASSRFTDKRVGYLGAMLLLDERHDAHLLITNSIKNDLSQGIQPVQGLALCTLSTMGSAEMCRDLAPEVEKLLLQPSPYVRKKAILTAVHMIRKVPELSSVFLPPCAQLLHERHHGILLGTITLITELCERSPAALRHFRKVVPQLVHILRTLVTMGYSTEHSISGVSDPFLQVQILRLLRILGRNHEESSETMNDLLAQVATNTDTSRNAGNAVLFETVLTIMDIRSAAGLRVLAVNILGRFLLNSDRNIRYVALTSLLRLVQSDHSAVQRHRPTVVECLRETDASLSRRALELSLALVNSSNVRAMMQELQAFLESCPPDLRADCASGILLAAERFAPTKRWHIDTILHVLTTAGTHVRDDAVANLTQLIGGAQELHAYSVRRLYNALAEDISQQPLVQVAAWCIGEYGDLLLAGNCEEIEPLQVDEEEVLALLEKVLQSHMSLPATRGYALTALMKLSTRLCGDNNRIRQVVSIYGSCLDVELQQRAVEYDTLFRKYDHMRAAILEKMPLVERDGPQADEEAKESKEAAQLSEAAPVPTEPQASQLLDLLDLLDGASGDVQHPPHLDPSPGGALVHLLDLPCVPPPPAPIPDLKVFEREGVQLNLSFIRPPENPALLLITITATNFSEGDVTHFICQAAVPKSLQLQLQAPSGNTVPARGGLPITQLFRILNPNKAPLRLKLRLTYDHFHQSVQEIFEVNNLPVESWQ

SEQ ID NO: 226 - protein, 841 aa, Homo sapiens
MSVDEKPDSPMYVYESTVHCTNILLGLNDQRKKDILCDVTLIVERKEFRAHRAVLAACSEYFWQALVGQTKNDLVVSLPEEVTARGFGPLLQFAYTAKLLLSRENIREVIRCAEFLRMHNLEDSCFSFLQTQLLNSEDGLFVCRKDAACQRPHEDCENSAGEEEDEEEETMDSETAKMACPRDQMLPEPISFEAAAIPVAEKEEALLPEPDVPTDTKESSEKDALTQYPRYKKYQLACTKNVYNASSHSTSGFASTFREDNSSNSLKPGLARGQIKSEPPSEENEEESITLCLSGDEPDAKDRAGDVEMDRKQPSPAPTPTAPAGAACLERSRSVASPSCLRSLFSITKSVELSGLPSTSQQHFARSPACPFDKGITQGDLKTDYTPFTGNYGQPHVGQKEVSNFTMGSPLRGPGLEALCKQEGELDRRSVIFSSSACDQVSTSVHSYSGVSSLDKDLSEPVPKGLWVGAGQSLPSSQAYSHGGLMADHLPGRMRPNTSCPVPIKVCPRSPPLETRTRTSSSCSSYSYAEDGSGGSPCSLPLCEFSSSPCSQGARFLATEHQEPGLMGDGMYNQVRPQIKCEQSYGTNSSDESGSFSEADSESCPVQDRGQEVKLPFPVDQITDLPRNDFQMMIKMHKLTSEQLEFIHDVRRRSKNRIAAQRCRKRKLDCIQNLECEIRKLVCEKEKLLSERNQLKACMGELLDNFSCLSQEVCRDIQSPEQIQALHRYCPVLRPMDLPTASSINPAPLGAEQNIAASQCAVGENVPCCLEPGAAPPGPPWAPSNTSENCTSGRRLEGTDPGTFSERGPPLEPRSQTVTVDFCQEMTDKCTTDEQPRKDYT

SEQ ID NO: 227 - protein, 384 aa, Homo sapiens
MPQLDSGGGGAGGGDDLGAPDELLAFQDEGEEQDDKSRDSAAGPERDLAELKSSLVNESEGAAGGAGIPGVPGAGAGARGEAEALGREHAAQRLFPDKLPEPLEDGLKAPECTSGMYKETVYSAFNLLMHYPPPSGAGQHPQPQPPLHKANQPPHGVPQLSLYEHFNSPHPTPAPADISQKQVHRPLQTPDLSGFYSLTSGSMGQLPHTVSWFTHPSLMLGSGVPGHPAAIPHPAIVPPSGKQELQPFDRNLKTQAESKAEKEAKKPTIKKPLNAFMLYMKEMRAKVIAECTLKESAAINQILGRRWHALSREEQAKYYELARKERQLHMQLYPGWSARDNYGKKKRRSREKHQESTTETNWPRELKDGNGQESLSMSSSSSPA

SEQ ID NO: 228 - protein, 269 aa, Homo sapiens
MYKETVYSAFNLLMHYPPPSGAGQHPQPQPPLHKANQPPHGVPQLSLYEHFNSPHPTPAPADISQKQVHRPLQTPDLSGFYSLTSGSMGQLPHTVSWFTHPSLMLGSGVPGHPAAIPHPAIVPPSGKQELQPFDRNLKTQAESKAEKEAKKPTIKKPLNAFMLYMKEMRAKVIAECTLKESAAINQILGRRWHALSREEQAKYYELARKERQLHMQLYPGWSARDNYGKKKRRSREKHQESTTETNWPRELKDGNGQESLSMSSSSSPA

SEQ ID NO: 229 - protein, 495 aa, Homo sapiens
MPQLDSGGGGAGGGDDLGAPDELLAFQDEGEEQDDKSRDSAAGPERDLAELKSSLVNESEGAAGGAGIPGVPGAGAGARGEAEALGREHAAQRLFPDKLPEPLEDGLKAPECTSGMYKETVYSAFNLLMHYPPPSGAGQHPQPQPPLHKANQPPHGVPQLSLYEHFNSPHPTPAPADISQKQVHRPLQTPDLSGFYSLTSGSMGQLPHTVSWFTHPSLMLGSGVPGHPAAIPHPAIVPPSGKQELQPFDRNLKTQAESKAEKEAKKPTIKKPLNAFMLYMKEMRAKVIAECTLKESAAINQILGRRWHALSREEQAKYYELARKERQLHMQLYPGWSARDNYGKKKRRSREKHQESTTDPGSPKKCRARFGLNQQTDWCGPCRRKKKCIRYLPGEGRCPSPVPSDDSALGCPGSPAPQDSPSYHLLPRFPTELLTSPAERHLHPQVSPLLSASQPQGPHRPPAAPCRAHRYSNRNLRDRWPSRHRTPGRLQEPTP

SEQ ID NO: 230 - protein, 380 aa, Homo sapiens
MYKETVYSAFNLLMHYPPPSGAGQHPQPQPPLHKANQPPHGVPQLSLYEHFNSPHPTPAPADISQKQVHRPLQTPDLSGFYSLTSGSMGQLPHTVSWFTHPSLMLGSGVPGHPAAIPHPAIVPPSGKQELQPFDRNLKTQAESKAEKEAKKPTIKKPLNAFMLYMKEMRAKVIAECTLKESAAINQILGRRWHALSREEQAKYYELARKERQLHMQLYPGWSARDNYGKKKRRSREKHQESTTDPGSPKKCRARFGLNQQTDWCGPCRRKKKCIRYLPGEGRCPSPVPSDDSALGCPGSPAPQDSPSYHLLPRFPTELLTSPAERHLHPQVSPLLSASQPQGPHRPPAAPCRAHRYSNRNLRDRWPSRHRTPGRLQEPTP

SEQ ID NO: 231 - protein, 365 aa, Homo sapiens
MPQLDSGGGGAGGGDDLGAPDELLAFQDEGEEQDDKSRDSAAGPERDLAELKSSLVNESEGAAGGAGIPGVPGAGAGARGEAEALGREHAAQRLFPDKLPEPLEDGLKAPECTSGMYKETVYSAFNLLMHYPPPSGAGQHPQPQPPLHKANQPPHGVPQLSLYEHFNSPHPTPAPADISQKQVHRPLQTPDLSGFYSLTSGSMGQLPHTVSWFTHPSLMLGSGVPGHPAAIPHPAIVPPSGKQELQPFDRNLKTQAESKAEKEAKKPTIKKPLNAFMLYMKEMRAKVIAECTLKESAAINQILGRRWHALSREEQAKYYELARKERQLHMQLYPGWSARDNYGKKKRRSREKHQESTTDNSLHYS

SEQ ID NO: 232 - protein, 250 aa, Homo sapiens
MYKETVYSAFNLLMHYPPPSGAGQHPQPQPPLHKANQPPHGVPQLSLYEHFNSPHPTPAPADISQKQVHRPLQTPDLSGFYSLTSGSMGQLPHTVSWFTHPSLMLGSGVPGHPAAIPHPAIVPPSGKQELQPFDRNLKTQAESKAEKEAKKPTIKKPLNAFMLYMKEMRAKVIAECTLKESAAINQILGRRWHALSREEQAKYYELARKERQLHMQLYPGWSARDNYGKKKRRSREKHQESTTDNSLHYS

SEQ ID NO: 233 - protein, 494 aa, Homo sapiens
MPQLDSGGGGAGGGDDLGAPDELLAFQDEGEEQDDKSRDSAAGPERDLAELKSSLVNESEGAAGGAGIPGVPGAGAGARGEAEALGREHAAQRLFPDKLPEPLEDGLKAPECTSGMYKETVYSAFNLLMHYPPPSGAGQHPQPQPPLHKANQPPHGVPQLSLYEHFNSPHPTPAPADISQKQVHRPLQTPDLSGFYSLTSGSMGQLPHTVSWFTHPSLMLGSGVPGHPAAIPHPAIVPPSGKQELQPFDRNLKTQAESKAEKEAKKPTIKKPLNAFMLYMKEMRAKVIAECTLKESAAINQILGRRWHALSREEQAKYYELARKERQLHMQLYPGWSARDNYGKKKRRSREKHQESTTDPGSPKKCRARFGLNQQTDWCGPCRKKKCIRYLPGEGRCPSPVPSDDSALGCPGSPAPQDSPSYHLLPRFPTELLTSPAERHLHPQVSPLLSASQPQGPHRPPAAPCRAHRYSNRNLRDRWPSRHRTPGRLQEPTP

SEQ ID NO: 234 - protein, 379 aa, Homo sapiens
MYKETVYSAFNLLMHYPPPSGAGQHPQPQPPLHKANQPPHGVPQLSLYEHFNSPHPTPAPADISQKQVHRPLQTPDLSGFYSLTSGSMGQLPHTVSWFTHPSLMLGSGVPGHPAAIPHPAIVPPSGKQELQPFDRNLKTQAESKAEKEAKKPTIKKPLNAFMLYMKEMRAKVIAECTLKESAAINQILGRRWHALSREEQAKYYELARKERQLHMQLYPGWSARDNYGKKKRRSREKHQESTTDPGSPKKCRARFGLNQQTDWCGPCRKKKCIRYLPGEGRCPSPVPSDDSALGCPGSPAPQDSPSYHLLPRFPTELLTSPAERHLHPQVSPLLSASQPQGPHRPPAAPCRAHRYSNRNLRDRWPSRHRTPGRLQEPTP

SEQ ID NO: 235 - protein, 369 aa, Homo sapiens
MPQLDSGGGGAGGGDDLGAPDELLAFQDEGEEQDDKSRDSAAGPERDLAELKSSLVNESEGAAGGAGIPGVPGAGAGARGEAEALGREHAAQRLFPDKLPEPLEDGLKAPECTSGMYKETVYSAFNLLMHYPPPSGAGQHPQPQPPLHKANQPPHGVPQLSLYEHFNSPHPTPAPADISQKQVHRPLQTPDLSGFYSLTSGSMGQLPHTVSWFTHPSLMLGSGVPGHPAAIPHPAIVPPSGKQELQPFDRNLKTQAESKAEKEAKKPTIKKPLNAFMLYMKEMRAKVIAECTLKESAAINQILGRRWHALSREEQAKYYELARKERQLHMQLYPGWSARDNYGKKKRRSREKHQESTTDGIPACTILSP

SEQ ID NO: 236 - protein, 254 aa, Homo sapiens
MYKETVYSAFNLLMHYPPPSGAGQHPQPQPPLHKANQPPHGVPQLSLYEHFNSPHPTPAPADISQKQVHRPLQTPDLSGFYSLTSGSMGQLPHTVSWFTHPSLMLGSGVPGHPAAIPHPAIVPPSGKQELQPFDRNLKTQAESKAEKEAKKPTIKKPLNAFMLYMKEMRAKVIAECTLKESAAINQILGRRWHALSREEQAKYYELARKERQLHMQLYPGWSARDNYGKKKRRSREKHQESTTDGIPACTILSP

SEQ ID NO: 237 - protein, 370 aa, Homo sapiens
MPQLDSGGGGAGGGDDLGAPDELLAFQDEGEEQDDKSRDSAAGPERDLAELKSSLVNESEGAAGGAGIPGVPGAGAGARGEAEALGREHAAQRLFPDKLPEPLEDGLKAPECTSGMYKETVYSAFNLLMHYPPPSGAGQHPQPQPPLHKANQPPHGVPQLSLYEHFNSPHPTPAPADISQKQVHRPLQTPDLSGFYSLTSGSMGQLPHTVSWFTHPSLMLGSGVPGHPAAIPHPAIVPPSGKQELQPFDRNLKTQAESKAEKEAKKPTIKKPLNAFMLYMKEMRAKVIAECTLKESAAINQILGRRWHALSREEQAKYYELARKERQLHMQLYPGWSARDNYGKKKRRSREKHQESTTQLEDWDGWARKP

SEQ ID NO: 238 - skipped

SEQ ID NO: 239 - protein, 384 aa, Homo sapiens
MPQLDSGGGGAGGGDDLGAPDELLAFQDEGEEQDDKSRDSAAGPERDLAELKSSLVNESEGAAGGAGIPGVPGAGAGARGEAEALGREHAAQRLFPDKLPEPLEDGLKAPECTSGMYKETVYSAFNLLMHYPPPSGAGQHPQPQPPLHKANQPPHGVPQLSLYEHFNSPHPTPAPADISQKQVHRPLQTPDLSGFYSLTSGSMGQLPHTVSWFTHPSLMLGSGVPGHPAAIPHPAIVPPSGKQELQPFDRNLKTQAESKAEKEAKKPTIKKPLNAFMLYMKEMRAKVIAECTLKESAAINQILGRRWHALSREEQAKYYELARKERQLHMQLYPGWSARDNYGKKKRRSREKHQESTTGGKRNAFGTYPEKAAAPAPFLPMTVL

SEQ ID NO: 240 - protein, 269 aa, Homo sapiens
MYKETVYSAFNLLMHYPPPSGAGQHPQPQPPLHKANQPPHGVPQLSLYEHFNSPHPTPAPADISQKQVHRPLQTPDLSGFYSLTSGSMGQLPHTVSWFTHPSLMLGSGVPGHPAAIPHPAIVPPSGKQELQPFDRNLKTQAESKAEKEAKKPTIKKPLNAFMLYMKEMRAKVIAECTLKESAAINQILGRRWHALSREEQAKYYELARKERQLHMQLYPGWSARDNYGKKKRRSREKHQESTTGGKRNAFGTYPEKAAAPAPFLPMTVL

SEQ ID NO: 241 - protein, 383 aa, Homo sapiens
MPQLDSGGGGAGGGDDLGAPDELLAFQDEGEEQDDKSRDSAAGPERDLAELKSSLVNESEGAAGGAGIPGVPGAGAGARGEAEALGREHAAQRLFPDKLPEPLEDGLKAPECTSGMYKETVYSAFNLLMHYPPPSGAGQHPQPQPPLHKANQPPHGVPQLSLYEHFNSPHPTPAPADISQKQVHRPLQTPDLSGFYSLTSGSMGQLPHTVSWFTHPSLMLGSGVPGHPAAIPHPAIVPPSGKQELQPFDRNLKTQAESKAEKEAKKPTIKKPLNAFMLYMKEMRAKVIAECTLKESAAINQILGRRWHALSREEQAKYYELARKERQLHMQLYPGWSARDNYGKKKRRSREKHQESTTDPGSPKKCRARFGLNQQTDWCGPCR

SEQ ID NO: 242 - protein, 268 aa, Homo sapiens
MYKETVYSAFNLLMHYPPPSGAGQHPQPQPPLHKANQPPHGVPQLSLYEHFNSPHPTPAPADISQKQVHRPLQTPDLSGFYSLTSGSMGQLPHTVSWFTHPSLMLGSGVPGHPAAIPHPAIVPPSGKQELQPFDRNLKTQAESKAEKEAKKPTIKKPLNAFMLYMKEMRAKVIAECTLKESAAINQILGRRWHALSREEQAKYYELARKERQLHMQLYPGWSARDNYGKKKRRSREKHQESTTDPGSPKKCRARFGLNQQTDWCGPCR

SEQ ID NO: 243 - protein, 5 aa, Artificial Sequence
  Synthetic peptide
GGGGS

SEQ ID NO: 244 - protein, 677 aa, Homo sapiens
MMQESGTETKSNGSAIQNGSGGSNHLLECGGLREGRSNGETPAVDIGAADLAHAQQQQQQALQVARQLLLQQQQQQQVSGLKSPKRNDKQPALQVPVSVAMMTPQVITPQQMQQILQQQVLSPQQLQVLLQQQQALMLQQQQLQEFYKKQQEQLQLQLLQQQHAGKQPKEQQQVATQQLAFQQQLLQMQQLQQQHLLSLQRQGLLTIQPGQPALPLQPLAQGMIPTELQQLWKEVTSAHTAEETTGNNHSSLDLTTTCVSSSAPSKTSLIMNPHASTNGQLSVHTPKRESLSHEEHPHSHPLYGHGVCKWPGCEAVCEDFQSFLKHLNSEHALDDRSTAQCRVQMQVVQQLELQLAKDKERLQAMMTHLHVKSTEPKAAPQPLNLVSSVTLSKSASEASPQSLPHTPTTPTAPLTPVTQGPSVITTTSMHTVGPIRRRYSDKYNVPISSADIAQNQEFYKNAEVRPPFTYASLIRQAILESPEKQLTLNEIYNWFTRMFAYFRRNAATWKNAVRHNLSLHKCFVRVENVKGAVWTVDEVEFQKRRPQKISGNPSLIKNMQSSHAYCTPLNAALQASMAENSIPLYTTASMGNPTLGNLASAIREELNGAMEHTNSNESDSSPGRSPMQAVHPVHVKEEPLDPEEAEGPLSLVTTANHSPDFDHDRDYEDEPVNEDME

SEQ ID NO: 245 - protein, 603 aa, Homo sapiens
MFQCVFSSSVLQPHSTSCLFKHLFYHSATPASQKQPEPIYSKKTEIQRQTVRAPFAKLFIFSALQVARQLLLQQQQQQQVSGLKSPKRNDKQPALQQQQVATQQLAFQQQLLQMQQLQQQHLLSLQRQGLLTIQPGQPALPLQPLAQGMIPTELQQLWKEVTSAHTAEETTGNNHSSLDLTTTCVSSSAPSKTSLIMNPHASTNGQLSVHTPKRESLSHEEHPHSHPLYGHGVCKWPGCEAVCEDFQSFLKHLNSEHALDDRSTAQCRVQMQVVQQLELQLAKDKERLQAMMTHLHVKSTEPKAAPQPLNLVSSVTLSKSASEASPQSLPHTPTTPTAPLTPVTQGPSVITTTSMHTVGPIRRRYSDKYNVPISSADIAQNQEFYKNAEVRPPFTYASLIRQAILESPEKQLTLNEIYNWFTRMFAYFRRNAATWKNAVRHNLSLHKCFVRVENVKGAVWTVDEVEFQKRRPQKISGNPSLIKNMQSSHAYCTPLNAALQASMAENSIPLYTTASMGNPTLGNLASAIREELNGAMEHTNSNESDSSPGRSPMQAVHPVHVKEEPLDPEEAEGPLSLVTTANHSPDFDHDRDYEDEPVNEDME

SEQ ID NO: 246 - protein, 679 aa, Homo sapiens
MFQCVFSSSVLQPHSTSCLFKHLFYHSATPASQKQPEPIYSKKTEIQRQTVRAPFAKLFIFSALQVARQLLLQQQQQQQVSGLKSPKRNDKQPALQVPVSVAMMTPQVITPQQMQQILQQQVLSPQQLQVLLQQQQALMLQQQQLQEFYKKQQEQLQLQLLQQQHAGKQPKEQQQVATQQLAFQQQLLQMQQLQQQHLLSLQRQGLLTIQPGQPALPLQPLAQGMIPTELQQLWKEVTSAHTAEETTGNNHSSLDLTTTCVSSSAPSKTSLIMNPHASTNGQLSVHTPKRESLSHEEHPHSHPLYGHGVCKWPGCEAVCEDFQSFLKHLNSEHALDDRSTAQCRVQMQVVQQLELQLAKDKERLQAMMTHLHVKSTEPKAAPQPLNLVSSVTLSKSASEASPQSLPHTPTTPTAPLTPVTQGPSVITTTSMHTVGPIRRRYSDKYNVPISSADIAQNQEFYKNAEVRPPFTYASLIRQAILESPEKQLTLNEIYNWFTRMFAYFRRNAATWKNAVRHNLSLHKCFVRVENVKGAVWTVDEVEFQKRRPQKISGNPSLIKNMQSSHAYCTPLNAALQASMAENSIPLYTTASMGNPTLGNLASAIREELNGAMEHTNSNESDSSPGRSPMQAVHPVHVKEEPLDPEEAEGPLSLVTTANHSPDFDHDRDYEDEPVNEDME

SEQ ID NO: 247 - protein, 114 aa, Homo sapiens
MMQESGTETKSNGSAIQNGSGGSNHLLECGGLREGRSNGETPAVDIGAADLAHAQQQQQQWHLINHQPSRSPSSWLKRLISSPWELEVLQVPLWGAVAETKMSGPVCQPNPSPF

SEQ ID NO: 248 - protein, 601 aa, Homo sapiens
MMQESGTETKSNGSAIQNGSGGSNHLLECGGLREGRSNGETPAVDIGAADLAHAQQQQQQALQVARQLLLQQQQQQQVSGLKSPKRNDKQPALQQQQVATQQLAFQQQLLQMQQLQQQHLLSLQRQGLLTIQPGQPALPLQPLAQGMIPTELQQLWKEVTSAHTAEETTGNNHSSLDLTTTCVSSSAPSKTSLIMNPHASTNGQLSVHTPKRESLSHEEHPHSHPLYGHGVCKWPGCEAVCEDFQSFLKHLNSEHALDDRSTAQCRVQMQVVQQLELQLAKDKERLQAMMTHLHVKSTEPKAAPQPLNLVSSVTLSKSASEASPQSLPHTPTTPTAPLTPVTQGPSVITTTSMHTVGPIRRRYSDKYNVPISSADIAQNQEFYKNAEVRPPFTYASLIRQAILESPEKQLTLNEIYNWFTRMFAYFRRNAATWKNAVRHNLSLHKCFVRVENVKGAVWTVDEVEFQKRRPQKISGNPSLIKNMQSSHAYCTPLNAALQASMAENSIPLYTTASMGNPTLGNLASAIREELNGAMEHTNSNESDSSPGRSPMQAVHPVHVKEEPLDPEEAEGPLSLVTTANHSPDFDHDRDYEDEPVNEDME

SEQ ID NO: 249 - protein, 676 aa, Homo sapiens
MMQESGTETKSNGSAIQNGSGGSNHLLECGGLREGRSNGETPAVDIGAADLAHAQQQQQQALQVARQLLLQQQQQQQVSGLKSPKRNDKQPALQVPVSVAMMTPQVITPQQMQQILQQQVLSPQQLQVLLQQQQALMLQQQQLQEFYKKQQEQLQLQLLQQQHAGKQPKEQQQVATQQLAFQQQLLQMQQLQQQHLLSLQRQGLLTIQPGQPALPLQPLAQGMIPTELQQLWKEVTSAHTAEETTGNNHSSLDLTTTCVSSSAPSKTSLIMNPHASTNGQLSVHTPKRESLSHEEHPHSHPLYGHGVCKWPGCEAVCEDFQSFLKHLNSEHALDDRSTAQCRVQMQVVQQLELQLAKDKERLQAMMTHLHVKSTEPKAAPQPLNLVSSVTLSKSASEASPQSLPHTPTTPTAPLTPVTQGPSVITTTSMHTVGPIRRRYSDKYNVPISSDIAQNQEFYKNAEVRPPFTYASLIRQAILESPEKQLTLNEIYNWFTRMFAYFRRNAATWKNAVRHNLSLHKCFVRVENVKGAVWTVDEVEFQKRRPQKISGNPSLIKNMQSSHAYCTPLNAALQASMAENSIPLYTTASMGNPTLGNLASAIREELNGAMEHTNSNESDSSPGRSPMQAVHPVHVKEEPLDPEEAEGPLSLVTTANHSPDFDHDRDYEDEPVNEDME

SEQ ID NO: 250 - protein, 693 aa, Homo sapiens
MMQESGTETKSNGSAIQNGSGGSNHLLECGGLREGRSNGETPAVDIGAADLAHAQQQQQQALQVARQLLLQQQQQQQVSGLKSPKRNDKQPALQVPVSVAMMTPQVITPQQMQQILQQQVLSPQQLQVLLQQQQALMLQQQQLQEFYKKQQEQLQLQLLQQQHAGKQPKEQQQVATQQLAFQQQLLQMQQLQQQHLLSLQRQGLLTIQPGQPALPLQPLAQGMIPTELQQLWKEVTSAHTAEETTGNNHSSLDLTTTCVSSSAPSKTSLIMNPHASTNGQLSVHTPKRESLSHEEHPHSHPLYGHGVCKWPGCEAVCEDFQSFLKHLNSEHALDDRSTAQCRVQMQVVQQLELQLAKDKERLQAMMTHLHVKSTEPKAAPQPLNLVSSVTLSKSASEASPQSLPHTPTTPTAPLTPVTQGPSVITTTSMHTVGPIRRRYSDKYNVPISSADIAQNQEFYKNAEVRPPFTYASLIRQAILESPEKQLTLNEIYNWFTRMFAYFRRNAATWKGAIRTNLSLHKCFIRVEDEFGSFWTVDDEEFKRGRHIQRGRPRKYCPDENFDELVAHNPSLIKNMQSSHAYCTPLNAALQASMAENSIPLYTTASMGNPTLGNLASAIREELNGAMEHTNSNESDSSPGRSPMQAVHPVHVKEEPLDPEEAEGPLSLVTTANHSPDFDHDRDYEDEPVNEDME

SEQ ID NO: 251 - protein, 431 aa, Homo sapiens
MPNPRPGKPSAPSLALGPSPGASPSWRAAPKASDLLGARGPGGTFQGRDLRGGAHASSSSLNPMPPSQLQLPTLPLVMVAPSGARLGPLPHLQALLQDRPHFMHQLSTVDAHARTPVLQVHPLESPAMISLTPPTTATGVFSLKARPGLPPGINVASLEWVSREPALLCTFPNPSAPRKDSTLSAVPQSSYPLLANGVCKWPGCEKVFEEPEDFLKHCQADHLLDEKGRAQCLLQREMVQSLEQQLVLEKEKLSAMQAHLAGKMALTKASSVASSDKGSCCIVAAGSQGPVVPAWSGPREAPDSLFAVRRHLWGSHGNSTFPEFLHNMDYFKFHNMRPPFTYATLIRWAILEAPEKQRTLNEIYHWFTRMFAFFRNHPATWKNAIRHNLSLHKCFVRVESEKGAVWTVDELEFRKKRSQRPSRCSNPTPGP

SEQ ID NO: 252 - protein, 396 aa, Homo sapiens
MPNPRPGKPSAPSLALGPSPGASPSWRAAPKASDLLGARGPGGTFQGRDLRGGAHASSSSLNPMPPSQLQLSTVDAHARTPVLQVHPLESPAMISLTPPTTATGVFSLKARPGLPPGINVASLEWVSREPALLCTFPNPSAPRKDSTLSAVPQSSYPLLANGVCKWPGCEKVFEEPEDFLKHCQADHLLDEKGRAQCLLQREMVQSLEQQLVLEKEKLSAMQAHLAGKMALTKASSVASSDKGSCCIVAAGSQGPVVPAWSGPREAPDSLFAVRRHLWGSHGNSTFPEFLHNMDYFKFHNMRPPFTYATLIRWAILEAPEKQRTLNEIYHWFTRMFAFFRNHPATWKNAIRHNLSLHKCFVRVESEKGAVWTVDELEFRKKRSQRPSRCSNPTPGP

SEQ ID NO: 253 - protein, 456 aa, Homo sapiens
MPNPRPGKPSAPSLALGPSPGASPSWRAAPKASDLLGARGPGGTFQGRDLRGGAHASSSSLNPMPPSQLQLSTVDAHARTPVLQVHPLESPAMISLTPPTTATGVFSLKARPGLPPGINVASLEWVSREPALLCTFPNPSAPRKDSTLSAVPQSSYPLLANGVCKWPGCEKVFEEPEDFLKHCQADHLLDEKGRAQCLLQREMVQSLEQQLVLEKEKLSAMQAHLAGKMALTKASSVASSDKGSCCIVAAGSQGPVVPAWSGPREAPDSLFAVRRHLWGSHGNSTFPEFLHNMDYFKFHNMRPPFTYATLIRWAILEAPEKQRTLNEIYHWFTRMFAFFRNHPATWKVSSSEVAVTGMASSAIAAQSGQAWVWAHRHIGEERDVGCWWWLLASEVDAHLLPVPGLPQNAIRHNLSLHKCFVRVESEKGAVWTVDELEFRKKRSQRPSRCSNPTPGP

SEQ ID NO: 254 - protein, 404 aa, Homo sapiens
MPNPRPGKPSAPSLALGPSPGASPSWRAAPKASDLLGARGPGGTFQGRDLRGGAHASSSSLNPMPPSQLQLPTLPLVMVAPSGARLGPLPHLQALLQDRPHFMHQLSTVDAHARTPVLQVHPLESPAMISLTPPTTATGVFSLKARPGLPPGINVASLEWVSREPALLCTFPNPSAPRKDSTLSAVPQSSYPLLANGVCKWPGCEKVFEEPEDFLKHCQADHLLDEKGRAQCLLQREMVQSLEQQASSDKGSCCIVAAGSQGPVVPAWSGPREAPDSLFAVRRHLWGSHGNSTFPEFLHNMDYFKFHNMRPPFTYATLIRWAILEAPEKQRTLNEIYHWFTRMFAFFRNHPATWKNAIRHNLSLHKCFVRVESEKGAVWTVDELEFRKKRSQRPSRCSNPTPGP

SEQ ID NO: 255 - protein, 169 aa, Homo sapiens
MAAESLPFSFGTLSSWELEAWYEDLQEVLSSDENGGTYVSPPGNEEEESKIFTTLDPASLAWLTEEEPEPAEVTSTSQSPHSPDSSQSSLAQEEEEEDQGRTRKRKQSGHSPARAGKQRMKEKEQENERKVAQLAEENERLKQEIERLTREVEATRRALIDRMVNLHQA

SEQ ID NO: 256 - protein, 192 aa, Homo sapiens
MELVPATPHYPADVLFQTDPTAEMAAESLPFSFGTLSSWELEAWYEDLQEVLSSDENGGTYVSPPGNEEEESKIFTTLDPASLAWLTEEEPEPAEVTSTSQSPHSPDSSQSSLAQEEEEEDQGRTRKRKQSGHSPARAGKQRMKEKEQENERKVAQLAEENERLKQEIERLTREVEATRRALIDRMVNLHQA

SEQ ID NO: 257 - protein, 925 aa, Homo sapiens
MNAPERQPQPDGGDAPGHEPGGSPQDELDFSILFDYEYLNPNEEEPNAHKVASPPSGPAYPDDVLDYGLKPYSPLASLSGEPPGRFGEPDRVGPQKFLSAAKPAGASGLSPRIEITPSHELIQAVGPLRMRDAGLLVEQPPLAGVAASPRFTLPVPGFEGYREPLCLSPASSGSSASFISDTFSPYTSPCVSPNNGGPDDLCPQFQNIPAHYSPRTSPIMSPRTSLAEDSCLGRHSPVPRPASRSSSPGAKRRHSCAEALVALPPGASPQRSRSPSPQPSSHVAPQDHGSPAGYPPVAGSAVIMDALNSLATDSPCGIPPKMWKTSPDPSPVSAAPSKAGLPRHIYPAVEFLGPCEQGERRNSAPESILLVPPTWPKPLVPAIPICSIPVTASLPPLEWPLSSQSGSYELRIEVQPKPHHRAHYETEGSRGAVKAPTGGHPVVQLHGYMENKPLGLQIFIGTADERILKPHAFYQVHRITGKTVTTTSYEKIVGNTKVLEIPLEPKNNMRATIDCAGILKLRNADIELRKGETDIGRKNTRVRLVFRVHIPESSGRIVSLQTASNPIECSQRSAHELPMVERQDTDSCLVYGGQQMILTGQNFTSESKVVFTEKTTDGQQIWEMEATVDKDKSQPNMLFVEIPEYRNKHIRTPVKVNFYVINGKRKRSQPQHFTYHPVPAIKTEPTDEYDPTLICSPTHGGLGSQPYYPQHPMVAESPSCLVATMAPCQQFRTGLSSPDARYQQQNPAAVLYQRSKSLSPSLLGYQQPALMAAPLSLADAHRSVLVHAGSQGQSSALLHPSPTNQQASPVIHYSPTNQQLRCGSHQEFQHIMYCENFAPGTTRPGPPPVSQGQRLSPGSYPTVIQQQNATSQRAAKNGPPVSDQKEVLPAGVTIKQEQNLDQTYLDDVNEIIRKEFSGPPARNQT

SEQ ID NO: 258 - protein, 1531 aa, Homo sapiens
MPSDFISLLSADLDLESPKSLYSRESVYDLLPKELQLPPSRETSVASMSQTSGGEAGSPPPAVVAADASSAPSSSSMGGACSSFTTSSSPTIYSTSVTDSKAMQVESCSSAVGVSNRGVSEKQLTSNTVQQHPSTPKRHTVLYISPPPEDLLDNSRMSCQDEGCGLESEQSCSMWMEDSPSNFSNMSTSSYNDNTEVPRKSRKRNPKQRPGVKRRDCEESNMDIFDADSAKAPHYVLSQLTTDNKGNSKAGNGTLENQKGTGVKKSPMLCGQYPVKSEGKELKIVVQPETQHRARYLTEGSRGSVKDRTQQGFPTVKLEGHNEPVVLQVFVGNDSGRVKPHGFYQACRVTGRNTTPCKEVDIEGTTVIEVGLDPSNNMTLAVDCVGILKLRNADVEARIGIAGSKKKSTRARLVFRVNIMRKDGSTLTLQTPSSPILCTQPAGVPEILKKSLHSCSVKGEEEVFLIGKNFLKGTKVIFQENVSDENSWKSEAEIDMELFHQNHLIVKVPPYHDQHITLPVSVGIYVVTNAGRSHDVQPFTYTPDPAAAGALNVNVKKEISSPARPCSFEEAMKAMKTTGCNLDKVNIIPNALMTPLIPSSMIKSEDVTPMEVTAEKRSSTIFKTTKSVGSTQQTLENISNIAGNGSFSSPSSSHLPSENEKQQQIQPKAYNPETLTTIQTQDISQPGTFPAVSASSQLPNSDALLQQATQFQTRETQSREILQSDGTVVNLSQLTEASQQQQQSPLQEQAQTLQQQISSNIFPSPNSVSQLQNTIQQLQAGSFTGSTASGSSGSVDLVQQVLEAQQQLSSVLFSAPDGNENVQEQLSADIFQQVSQIQSGVSPGMFSSTEPTVHTRPDNLLPGRAESVHPQSENTLSNQQQQQQQQQQVMESSAAMVMEMQQSICQAAAQIQSELFPSTASANGNLQQSPVYQQTSHMMSALSTNEDMQMQCELFSSPPAVSGNETSTTTTQQVATPGTTMFQTSSSGDGEETGTQAKQIQNSVFQTMVQMQHSGDNQPQVNLFSSTKSMMSVQNSGTQQQGNGLFQQGNEMMSLQSGNFLQQSSHSQAQLFHPQNPIADAQNLSQETQGSLFHSPNPIVHSQTSTTSSEQMQPPMFHSQSTIAVLQGSSVPQDQQSTNIFLSQSPMNNLQTNTVAQEAFFAAPNSISPLQSTSNSEQQAAFQQQAPISHIQTPMLSQEQAQPPQQGLFQPQVALGSLPPNPMPQSQQGTMFQSQHSIVAMQSNSPSQEQQQQQQQQQQQQQQQQQSILFSNQNTMATMASPKQPPPNMIFNPNQNPMANQEQQNQSIFHQQSNMAPMNQEQQPMQFQSQSTVSSLQNPGPTQSESSQTPLFHSSPQIQLVQGSPSSQEQQVTLFLSPASMSALQTSINQQDMQQSPLYSPQNNMPGIQGATSSPQPQATLFHNTAGGTMNQLQNSPGSSQQTSGMFLFGIQNNCSQLLTSGPATLPDQLMAISQPGQPQNEGQPPVTTLLSQQMPENSPLASSINTNQNIEKIDLLVSLQNQGNNLTGSF

SEQ ID NO: 259 - protein, 943 aa, Homo sapiens
MPSTSFPVPSKFPLGPAAAVFGRGETLGPAPRAGGTMKSAEEEHYGYASSNVSPALPLPTAHSTLPAPCHNLQTSTPGIIPPADHPSGYGAALDGGPAGYFLSSGHTRPDGAPALESPRIEITSCLGLYHNNNQFFHDVEVEDVLPSSKRSPSTATLSLPSLEAYRDPSCLSPASSLSSRSCNSEASSYESNYSYPYASPQTSPWQSPCVSPKTTDPEEGFPRGLGACTLLGSPRHSPSTSPRASVTEESWLGARSSRPASPCNKRKYSLNGRQPPYSPHHSPTPSPHGSPRVSVTDDSWLGNTTQYTSSAIVAAINALTTDSSLDLGDGVPVKSRKTTLEQPPSVALKVEPVGEDLGSPPPPADFAPEDYSSFQHIRKGGFCDQYLAVPQHPYQWAKPKPLSPTSYMSPTLPALDWQLPSHSGPYELRIEVQPKSHHRAHYETEGSRGAVKASAGGHPIVQLHGYLENEPLMLQLFIGTADDRLLRPHAFYQVHRITGKTVSTTSHEAILSNTKVLEIPLLPENSMRAVIDCAGILKLRNSDIELRKGETDIGRKNTRVRLVFRVHVPQPSGRTLSLQVASNPIECSQRSAQELPLVEKQSTDSYPVVGGKKMVLSGHNFLQDSKVIFVEKAPDGHHVWEMEAKTDRDLCKPNSLVVEIPPFRNQRITSPVHVSFYVCNGKRKRSQYQRFTYLPANVPIIKTEPTDDYEPAPTCGPVSQGLSPLPRPYYSQQLAMPPDPSSCLVAGFPPCPQRSTLMPAAPGVSPKLHDLSPAAYTKGVASPGHCHLGLPQPAGEAPAVQDVPRPVATHPGSPGQPPPALLPQQVSAPPSSSCPPGLEHSLCPSSPSPPLPPATQEPTCLQPCSPACPPATGRPQHLPSTVRRDESPTAGPRLLPEVHEDGSPNLAPIPVTVKREPEELDQLYLDDVNEIIRNDLSSTSTHS

SEQ ID NO: 260 - protein, 902 aa, Homo sapiens
MGAASCEDEELEFKLVFGEEKEAPPLGAGGLGEELDSEDAPPCCRLALGEPPPYGAAPIGIPRPPPPRPGMHSPPPRPAPSPGTWESQPARSVRLGGPGGGAGGAGGGRVLECPSIRITSISPTPEPPAALEDNPDAWGDGSPRDYPPPEGFGGYREAGGQGGGAFFSPSPGSSSLSSWSFFSDASDEAALYAACDEVESELNEAASRFGLGSPLPSPRASPRPWTPEDPWSLYGPSPGGRGPEDSWLLLSAPGPTPASPRPASPCGKRRYSSSGTPSSASPALSRRGSLGEEGSEPPPPPPLPLARDPGSPGPFDYVGAPPAESIPQKTRRTSSEQAVALPRSEEPASCNGKLPLGAEESVAPPGGSRKEVAGMDYLAVPSPLAWSKARIGGHSPIFRTSALPPLDWPLPSQYEQLELRIEVQPRAHHRAHYETEGSRGAVKAAPGGHPVVKLLGYSEKPLTLQMFIGTADERNLRPHAFYQVHRITGKMVATASYEAVVSGTKVLEMTLLPENNMAANIDCAGILKLRNSDIELRKGETDIGRKNTRVRLVFRVHVPQGGGKVVSVQAASVPIECSQRSAQELPQVEAYSPSACSVRGGEELVLTGSNFLPDSKVVFIERGPDGKLQWEEEATVNRLQSNEVTLTLTVPEYSNKRVSRPVQVYFYVSNGRRKRSPTQSFRFLPVICKEEPLPDSSLRGFPSASATPFGTDMDFSPPRPPYPSYPHEDPACETPYLSEGFGYGMPPLYPQTGPPPSYRPGLRMFPETRGTTGCAQPPAVSFLPRPFPSDPYGGRGSSFSLGLPFSPPAPFRPPPLPASPPLEGPFPSQSDVHPLPAEGYNKVGPGYGPGEGAPEQEKSRGGYSSGFRDSVPIQGITLEEVSEIIGRDLSGFPAPPGEEPPA

SEQ ID NO: 261 - protein, 1075 aa, Homo sapiens
MTTANCGAHDELDFKLVFGEDGAPAPPPPGSRPADLEPDDCASIYIFNVDPPPSTLTTPLCLPHHGLPSHSSVLSPSFQLQSHKNYEGTCEIPESKYSPLGGPKPFECPSIQITSISPNCHQELDAHEDDLQINDPEREFLERPSRDHLYLPLEPSYRESSLSPSPASSISSRSWFSDASSCESLSHIYDDVDSELNEAAARFTLGSPLTSPGGSPGGCPGEETWHQQYGLGHSLSPRQSPCHSPRSSVTDENWLSPRPASGPSSRPTSPCGKRRHSSAEVCYAGSLSPHHSPVPSPGHSPRGSVTEDTWLNASVHGGSGLGPAVFPFQYCVETDIPLKTRKTSEDQAAILPGKLELCSDDQGSLSPARETSIDDGLGSQYPLKKDSCGDQFLSVPSPFTWSKPKPGHTPIFRTSSLPPLDWPLPAHFGQCELKIEVQPKTHHRAHYETEGSRGAVKASTGGHPVVKLLGYNEKPINLQMFIGTADDRYLRPHAFYQVHRITGKTVATASQEIIIASTKVLEIPLLPENNMSASIDCAGILKLRNSDIELRKGETDIGRKNTRVRLVFRVHIPQPSGKVLSLQIASIPVECSQRSAQELPHIEKYSINSCSVNGGHEMVVTGSNFLPESKIIFLEKGQDGRPQWEVEGKIIREKCQGAHIVLEVPPYHNPAVTAAVQVHFYLCNGKRKKSQSQRFTYTPVLMKQEHREEIDLSSVPSLPVPHPAQTQRPSSDSGCSHDSVLSGQRSLICSIPQTYASMVTSSHLPQLQCRDESVSKEQHMIPSPIVHQPFQVTPTPPVGSSYQPMQTNVVYNGPTCLPINAASSQEFDSVLFQQDATLSGLVNLGCQPLSSIPFHSSNSGSTGHLLAHTPHSVHTLPHLQSMGYHCSNTGQRSLSSPVADQITGQPSSQLQPITYGPSHSGSATTASPAASHPLASSPLSGPPSPQLQPMPYQSPSSGTASSPSPATRMHSGQHSTQAQSTGQGGLSAPSSLICHSLCDPASFPPDGATVSIKPEPEDREPNFATIGLQDITLDDVNEIIGRDMSQISVSQGAGVSRQAPLPSPESLDLGRSDGL

SEQ ID NO: 262 - protein, 213 aa, Homo sapiens
MPRRAENWDEAEVGAEEAGVEEYGPEEDGGEESGAEESGPEESGPEELGAEEEMEAGRPRPVLRSVNSREPSQVIFCNRSPRVVLPVWLNFDGEPQPYPTLPPGTGRRIHSYRGHLWLFRDAGTHDGLLVNQTELFVPSLNVDGQPIFANITLPVYTLKERCLQVVRSLVKPENYRRLDIVRSLYEDLEDHPNVQKDLERLTQERIAHQRMGD

SEQ ID NO: 263 - protein, 258 aa, Homo sapiens
MVLCVQGPRPLLAVERTGQRPLWAPSLELPKPVMQPLPAGAFLEEVAEGTPAQTESEPKVLDPEEDLLCIAKTFSYLRESGWYWGSITASEARQHLQKMPEGTFLVRDSTHPSYLFTLSVKTTRGPTNVRIEYADSSFRLDSNCLSRPRILAFPDVVSLVQHYVASCTADTRSDSPDPAPTPALPMPKEDAPSDPALPAPPPATAVHLKLVQPFVRRSSARSLQHLCRLVINRLVADVDCLPLPRRMADYLRQYPFQL

SEQ ID NO: 264 - protein, 211 aa, Homo sapiens
MVAHNQVAADNAVSTAAEPRRRPEPSSSSSSSPAAPARPRPCPAVPAPAPGDTHFRTFRSHADYRRITRASALLDACGFYWGPLSVHGAHERLRAEPVGTFLVRDSRQRNCFFALSVKMASGPTSIRVHFQAGRFHLDGSRESFDCLFELLEHYVAAPRRMLGAPLRQRRVRPLQELCRQRIVATVGRENLARIPLNPVLRDYLSSFPFQI

SEQ ID NO: 265 - protein, 198 aa, Homo sapiens
MTLRCLEPSGNGGEGTRSQWGTAGSAEEPSPQAARLAKALRELGQTGWYWGSMTVNEAKEKLKEAPEGTFLIRDSSHSDYLLTISVKTSAGPTNLRIEYQDGKFRLDSIICVKSKLKQFDSVVHLIDYYVQMCKDKRTGPEAPRNGTVHLYLTKPLYTSAPSLQHLCRLTINKCTGAIWGLPLPTRLKDYLEEYKFQV

SEQ ID NO: 266 - protein, 225 aa, Homo sapiens
MVTHSKFPAAGMSRPLDTSLRLKTFSSKSEYQLVVNAVRKLQESGFYWSAVTGGEANLLLSAEPAGTFLIRDSSDQRHFFTLSVKTQSGTKNLRIQCEGGSFSLQSDPRSTQPVPRFDCVLKLVHHYMPPPGAPSFPSPPTEPSSEVPEQPSAQPLPGSPPRRAYYIYSGGEKIPLVLSRPLSSNVATLQHLCRKTVNGHLDSYEKVTQLPGPIREFLDQYDAPL

SEQ ID NO: 267 - protein, 440 aa, Homo sapiens
MAENNENISKNVDVRPKTSRSRSADRKDGYVWSGKKLSWSKKSESYSDAETVNGIEKTEVSLRNQERKHSCSSIELDLDHSCGHRFLGRSLKQKLQDAVGQCFPIKNCSSRHSSGLPSKRKIHISELMLDKCPFPPRSDLAFRWHFIKRHTAPINSKSDEWVSTDLSQTELRDGQLKRRNMEENINCFSHTNVQPCVITTDNALCREGPMTGSVMNLVSNNSIEDSDMDSDDEILTLCTSSRKRNKPKWDLDDEILQLETPPKYHTQIDYVHCLVPDLLQINNNPCYWGVMDKYAAEALLEGKPEGTFLLRDSAQEDYLFSVSFRRYSRSLHARIEQWNHNFSFDAHDPCVFHSPDITGLLEHYKDPSACMFFEPLLSTPLIRTFPFSLQHICRTVICNCTTYDGIDALPIPSSMKLYLKEYHYKSKVRVLRIDAPEQQC

SEQ ID NO: 268 - protein, 536 aa, Homo sapiens
MDKVGKMWNNFKYRCQNLFGHEGGSRSENVDMNSNRCLSVKEKNISIGDSTPQQQSSPLRENIALQLGLSPSKNSSRRNQNCATEIPQIVEISIEKDNDSCVTPGTRLARRDSYSRHAPWGGKKKHSCSTKTQSSLDADKKFGRTRSGLQRRERRYGVSSVHDMDSVSSRTVGSRSLRQRLQDTVGLCFPMRTYSKQSKPLFSNKRKIHLSELMLEKCPFPAGSDLAQKWHLIKQHTAPVSPHSTFFDTFDPSLVSTEDEEDRLRERRRLSIEEGVDPPPNAQIHTFEATAQVNPLYKLGPKLAPGMTEISGDSSAIPQANCDSEEDTTTLCLQSRRQKQRQISGDSHTHVSRQGAWKVHTQIDYIHCLVPDLLQITGNPCYWGVMDRYEAEALLEGKPEGTFLLRDSAQEDYLFSVSFRRYNRSLHARIEQWNHNFSFDAHDPCVFHSSTVTGLLEHYKDPSSCMFFEPLLTISLNRTFPFSLQYICRAVICRCTTYDGIDGLPLPSMLQDFLKEYHYKQKVRVRWLEREPVKAK

SEQ ID NO: 269 - protein, 535 aa, Homo sapiens
MKKISLKTLRKSFNLNKSKEETDFMVVQQPSLASDFGKDDSLFGSCYGKDMASCDINGEDEKGGKNRSKSESLMGTLKRRLSAKQKSKGKAGTPSGSSADEDTFSSSSAPIVFKDVRAQRPIRSTSLRSHHYSPAPWPLRPTNSEETCIKMEVRVKALVHSSSPSPALNGVRKDFHDLQSETTCQEQANSLKSSASHNGDLHLHLDEHVPVVIGLMPQDYIQYTVPLDEGMYPLEGSRSYCLDSSSPMEVSAVPPQVGGRAFPEDESQVDQDLVVAPEIFVDQSVNGLLIGTTGVMLQSPRAGHDDVPPLSPLLPPMQNNQIQRNFSGLTGTEAHVAESMRCHLNFDPNSAPGVARVYDSVQSSGPMVVTSLTEELKKLAKQGWYWGPITRWEAEGKLANVPDGSFLVRDSSDDRYLLSLSFRSHGKTLHTRIEHSNGRFSFYEQPDVEGHTSIVDLIEHSIRDSENGAFCYSRSRLPGSATYPVRLTNPVSRFMQVRSLQYLCRFVIRQYTRIDLIQKLPLPNKMKDYLQEKHY

SEQ ID NO: 270 - protein, 581 aa, Homo sapiens
MVFRNVGRPPEEEDVEAAPEPGPSELLCPRHRCALDPKALPPGLALERTWGPAAGLEAQLAALGLGQPAGPGVKTVGGGCCPCPCPPQPPPPQPQPPAAAPQAGEDPTETSDALLVLEGLESEAESLETNSCSEEELSSPGRGGGGGGRLLLQPPGPELPPVPFPLQDLVPLGRLSRGEQQQQQQQQPPPPPPPPGPLRPLAGPSRKGSFKIRLSRLFRTKSCNGGSGGGDGTGKRPSGELAASAASLTDMGGSAGRELDAGRKPKLTRTQSAFSPVSFSPLFTGETVSLVDVDISQRGLTSPHPPTPPPPPRRSLSLLDDISGTLPTSVLVAPMGSSLQSFPLPPPPPPHAPDAFPRIAPIRAAESLHSQPPQHLQCPLYRPDSSSFAASLRELEKCGWYWGPMNWEDAEMKLKGKPDGSFLVRDSSDPRYILSLSFRSQGITHHTRMEHYRGTFSLWCHPKFEDRCQSVVEFIKRAIMHSKNGKFLYFLRSRVPGLPPTPVQLLYPVSRFSNVKSLQHLCRFRIRQLVRIDHIPDLPLPKPLISYIRKFYYYDPQEEVYLSLKEAQLISKQKQEVEPST

SEQ ID NO: 271 - protein, 415 aa, Homo sapiens
MPTTIEREFEELDTQRRWQPLYLEIRNESHDYPHRVAKFPENRNRNRYRDVSPYDHSRVKLQNAENDYINASLVDIEEAQRSYILTQGPLPNTCCHFWLMVWQQKTKAVVMLNRIVEKESVKCAQYWPTDDQEMLFKETGFSVKLLSEDVKSYYTVHLLQLENINSGETRTISHFHYTTWPDFGVPESPASFLNFLFKVRESGSLNPDHGPAVIHCSAGIGRSGTFSLVDTCLVLMEKGDDINIKQVLLNMRKYRMGLIQTPDQLRFSYMAIIEGAKCIKGDSSIQKRWKELSKEDLSPAFDHSPNKIMTEKYNGNRIGLEEEKLTGDRCTGLSSKMQDTMEENSESALRKRIREDRKATTAQKVQQMKQRLNENERKRKRWLYWQPILTKMGFMSVILVGAFVGWTLFFQQNAL

SEQ ID NO: 272 - protein, 595 aa, Homo sapiens
MVRWFHRDLSGLDAETLLKGRGVHGSFLARPSRKNQGDFSLSVRVGDQVTHIRIQNSGDFYDLYGGEKFATLTELVEYYTQQQGVLQDRDGTIIHLKYPLNCSDPTSERWYHGHMSGGQAETLLQAKGEPWTFLVRESLSQPGDFVLSVLSDQPKAGPGSPLRVTHIKVMCEGGRYTVGGLETFDSLTDLVEHFKKTGIEEASGAFVYLRQPYYATRVNAADIENRVLELNKKQESEDTAKAGFWEEFESLQKQEVKNLHQRLEGQRPENKGKNRYKNILPFDHSRVILQGRDSNIPGSDYINANYIKNQLLGPDENAKTYIASQGCLEATVNDFWQMAWQENSRVIVMTTREVEKGRNKCVPYWPEVGMQRAYGPYSVTNCGEHDTTEYKLRTLQVSPLDNGDLIREIWHYQYLSWPDHGVPSEPGGVLSFLDQINQRQESLPHAGPIIVHCSAGIGRTGTIIVIDMLMENISTKGLDCDIDIQKTIQMVRAQRSGMVQTEAQYKFIYVAIAQFIETTKKKLEVLQSQKGQESEYGNITYPPAMKNAHAKASRTSSKHKEDVYENLHTKNKREEKVKKQRSADKEKSKGSLKRK

SEQ ID NO: 273 - protein, 593 aa, Homo sapiens [sequence omitted]

SEQ ID NO: 274 - protein, 330 aa, Homo sapiens
MEAVAKFDFTASGEDELSFHTGDVLKILSNQEEWFKAELGSQEGYVPKNFIDIQFPKWFHEGLSRHQAENLLMGKEVGFFIIRASQSSPGDFSISVRHEDDVQHFKVMRDNKGNYFLWTEKFPSLNKLVDYYRTNSISRQKQIFLRDRTREDQGHRGNSLDRRSQGGPHLSGAVGEEIRPSMNRKLSDHPPTLPLQQHQHQPQPPQYAPAPQQLQQPPQQRYLQHHHFHQERRGGSLDINDGHCGTGLGSEMNAALMHRRHTDPVQLQAAGRVRWARALYDFEALEDDELGFHSGEVVEVLDSSNPSWWTGRLHNKLGLFPANYVAPMTR

SEQ ID NO: 275 - protein, 217 aa, Homo sapiens [sequence omitted]

SEQ ID NO: 276 - protein, 1240 aa, Homo sapiens
MAGAASPCANGCGPGAPSDAEVLHLCRSLEVGTVMTLFYSKKSQRPERKTFQVKLETRQITWSRGADKIEGAIDIREIKEIRPGKTSRDFDRYQEDPAFRPDQSHCFVILYGMEFRLKTLSLQATSEDEVNMWIKGLTWLMEDTLQAPTPLQIERWLRKQFYSVDRNREDRISAKDLKNMLSQVNYRVPNMRFLRERLTDLEQRSGDITYGQFAQLYRSLMYSAQKTMDLPFLEASTLRAGERPELCRVSLPEFQQFLLDYQGELWAVDRLQVQEFMLSFLRDPLREIEEPYFFLDEFVTFLFSKENSVWNSQLDAVCPDTMNNPLSHYWISSSHNTYLTGDQFSSESSLEAYARCLRMGCRCIELDCWDGPDGMPVIYHGHTLTTKIKFSDVLHTIKEHAFVASEYPVILSIEDHCSIAQQRNMAQYFKKVLGDTLLTKPVEISADGLPSPNQLKRKILIKHKKLAEGSAYEEVPTSMMYSENDISNSIKNGILYLEDPVNHEWYPHYFVLTSSKIYYSEETSSDQGNEDEEEPKEVSSSTELHSNEKWFHGKLGAGRDGRHIAERLLTEYCIETGAPDGSFLVRESETFVGDYTLSFWMRLSEPVPQTNAHESKEWYHASLTRAQAEHMLMRVPRDGAFLVRKRNEPNSYAISFRAEGKIKHCRVQQEGQTVMLGNSEFDSLVDLISYYEKHPLYRKMKLRYPINEEALEKIGTAEPDYGALYEGRNPGFYVEANPMPTFKCAVKALFDYKAQREDELTFIKSAIIQNVEKQEGGWWRGDYGGKKQLWFPSNYVEEMVNPVALEPEREHLDENSPLGDLLRGVLDVPACQIAIRPEGKNNRLFVFSISMASVAHWSLDVAADSQEELQDWVKKIREVAQTADARLTEGKIMERRKKIALELSELVVYCRPVPFDEEKIGTERACYRDMSSFPETKAEKYVNKAKGKKFLQYNRLQLSRIYPKGQRLDSSNYDPLPMWICGSQLVALNFQTPDKPMQMNQALFMTGRHCGYVLQPSTMRDEAFDPFDKSSLRGLEPCAISIEVLGARHLPKNGRGIVCPFVEIEVAGAEYDSTKQKTEFVVDNGLNPVWPAKPFHFQISNPEFAFLRFVVYEEDMFSDQNFLAQATFPVKGLKTGYRAVPLKNNYSEDLELASLLIKIDIFPAKENGDLSPFSGTSLRERGSDASGQLFHGRAREGSFESRYQQPFEDFRISQEHLADHFDSRERRAPRRTRVNGDNRL

SEQ ID NO: 277 - protein, 262 aa, Homo sapiens
MEEAILVPCVLGLLLLPILAMLMALCVHCHRLPGSYDSTSSDSLYPRGIQFKRPHTVAPWPPAYPPVTSYPPLSQPDLLPIPRSPQPLGGSHRTPSSRRDSDGANSVASYENEGASGIRGAQAGWGVWGPSWTRLTPVSLPPEPACEDADEDEDDYHNPGYLVVLPDSTPATSTAAPSAPALSTPGIRDSAFSMESIDDYVNVPESGESAEASLDGSREYVNVSQELHPGAAKTEPAALSSQEAEEVEEEGAPDYENLQELN

SEQ ID NO: 278 - protein, 533 aa, Homo sapiens
MALRNVPFRSEVLGWDPDSLADYFKKLNYKDCEKAVKKYHIDGARFLNLTENDIQKFPKLRVPILSKLSQEINKNEERRSIFTRKPQVPRFPEETESHEEDNGGWSSFEEDDYESPNDDQDGEDDGDYESPNEEEEAPVEDDADYEPPPSNDEEALQNSILPAKPFPNSNSMYIDRPPSGKTPQQPPVPPQRPMAALPPPPAGRNHSPLPPPQTNHEEPSRSRNHKTAKLPAPSIDRSTKPPLDRSLAPFDREPFTLGKKPPFSDKPSIPAGRSLGEHLPKIQKPPLPPTTERHERSSPLPGKKPPVPKHGWGPDRRENDEDDVHQRPLPQPALLPMSSNTFPSRSTKPSPMNPLPSSHMPGAFSESNSSFPQSASLPPYFSQGPSNRPPIRAEGRNFPLPLPNKPRPPSPAEEENSLNEEWYVSYITRPEAEAALRKINQDGTFLVRDSSKKTTTNPYVLMVLYKDKVYNIQIRYQKESQVYLLGTGLRGKEDFLSVSDIIDYFRKMPLLLIDGKNRGSRYQCTLTHAAGYP

SEQ ID NO: 279 - protein, 509 aa, Homo sapiens
MGCGCSSHPEDDWMENIDVCENCHYPIVPLDGKGTLLIRNGSEVRDPLVTYEGSNPPASPLQDNLVIALHSYEPSHDGDLGFEKGEQLRILEQSGEWWKAQSLTTGQEGFIPFNFVAKANSLEPEPWFFKNLSRKDAERQLLAPGNTHGSFLIRESESTAGSFSLSVRDFDQNQGEVVKHYKIRNLDNGGFYISPRITFPGLHELVRHYTNASDGLCTRLSRPCQTQKPQKPWWEDEWEVPRETLKLVERLGAGQFGEVWMGYYNGHTKVAVKSLKQGSMSPDAFLAEANLMKQLQHQRLVRLYAVVTQEPIYIITEYMENGSLVDFLKTPSGIKLTINKLLDMAAQIAEGMAFIEERNYIHRDLRAANILVSDTLSCKIADFGLARLIEDNEYTAREGAKFPIKWTAPEAINYGTFTIKSDVWSFGILLTEIVTHGRIPYPGMTNPEVIQNLERGYRMVRPDNCPEELYQLMRLCWKERPEDRPTFDYLRSVLEDFFTATEGQYQPQP

SEQ ID NO: 280 - protein, 620 aa, Homo sapiens
MNNFILLEEQLIKKSQQKRRTSPSNFKVRFFVLTKASLAYFEDRHGKKRTLKGSIELSRIKCVEIVKSDISIPCHYKYPFQVVHDNYLLYVFAPDRESRQRWVLALKEETRNNNSLVPKYHPNFWMDGKWRCCSQLEKLATGCAQYDPTKNASKKPLPPTPEDNRRPLWEPEETVVIALYDYQTNDPQELALRRNEEYCLLDSSEIHWWRVQDRNGHEGYVPSSYLVEKSPNNLETYEWYNKSISRDKAEKLLLDTGKEGAFMVRDSRTAGTYTVSVFTKAVVSENNPCIKHYHIKETNDNPKRYYVAEKYVFDSIPLLINYHQHNGGGLVTRLRYPVCFGRQKAPVTAGLRYGKWVIDPSELTFVQEIGSGQFGLVHLGYWLNKDKVAIKTIREGAMSEEDFIEEAEVMMKLSHPKLVQLYGVCLEQAPICLVFEFMEHGCLSDYLRTQRGLFAAETLLGMCLDVCEGMAYLEEACVIHRDLAARNCLVGENQVIKVSDFGMTRFVLDDQYTSSTGTKFPVKWASPEVFSFSRYSSKSDVWSFGVLMWEVFSEGKIPYENRSNSEVVEDISTGFRLYKPRLASTHVYQIMNHCWKERPEDRPAFSRLLRQLAEIAESGL

SEQ ID NO: 281 - protein, 659 aa, Homo sapiens
MAAVILESIFLKRSQQKKKTSPLNFKKRLFLLTVHKLSYYEYDFERGRRGSKKGSIDVEKITCVETVVPEKNPPPERQIPRRGEESSEMEQISIIERFPYPFQVVYDEGPLYVFSPTEELRKRWIHQLKNVIRYNSDLVQKYHPCFWIDGQYLCCSQTAKNAMGCQILENRNGSLKPGSSHRKTKKPLPPTPEEDQILKKPLPPEPAAAPVSTSELKKVVALYDYMPMNANDLQLRKGDEYFILEESNLPWWRARDKNGQEGYIPSNYVTEAEDSIEMYEWYSKHMTRSQAEQLLKQEGKEGGFIVRDSSKAGKYTVSVFAKSTGDPQGVIRHYVVCSTPQSQYYLAEKHLFSTIPELINYHQHNSAGLISRLKYPVSQQNKNAPSTAGLGYGSWEIDPKDLTFLKELGTGQFGVVKYGKWRGQYDVAIKMIKEGSMSEDEFIEEAKVMMNLSHEKLVQLYGVCTKQRPIFIITEYMANGCLLNYLREMRHRFQTQQLLEMCKDVCEAMEYLESKQFLHRDLAARNCLVNDQGVVKVSDFGLSRYVLDDEYTSSVGSKFPVRWSPPEVLMYSKFSSKSDIWAFGVLMWEIYSLGKMPYERFTNSETAEHIAQGLRLYRPHLASEKVYTIMYSCWHEKADERPTFKILLSNILDVMDEES

SEQ ID NO: 282 - protein, 2136 aa, Homo sapiens
MSRSRHARPSRLVRKEDVNKKKKNSQLRKTTKGANKNVASVKTLSPGKLKQLIQERDVKKKTEPKPPVPVRSLLTRAGAARMNLDRTEVLFQNPESLTCNGFTMALRSTSLSRRLSQPPLVVAKSKKVPLSKGLEKQHDCDYKILPALGVKHSENDSVPMQDTQVLPDIETLIGVQNPSLLKGKSQETTQFWSQRVEDSKINIPTHSGPAAEILPGPLEGTRCGEGLFSEETLNDTSGSPKMFAQDTVCAPFPQRATPKVTSQGNPSIQLEELGSRVESLKLSDSYLDPIKSEHDCYPTSSLNKVIPDLNLRNCLALGGSTSPTSVIKFLLAGSKQATLGAKPDHQEAFEATANQQEVSDTTSFLGQAFGAIPHQWELPGADPVHGEALGETPDLPEIPGAIPVQGEVFGTILDQQETLGMSGSVVPDLPVFLPVPPNPIATFNAPSKWPEPQSTVSYGLAVQGAIQILPLGSGHTPQSSSNSEKNSLPPVMAISNVENEKQVHISFLPANTQGFPLAPERGLFHASLGIAQLSQAGPSKSDRGSSQVSVTSTVHVVNTTVVTMPVPMVSTSSSSYTTLLPTLEKKKRKRCGVCEPCQQKTNCGECTYCKNRKNSHQICKKRKCEELKKKPSVVVPLEVIKENKRPQREKKPKVLKADFDNKPVNGPKSESMDYSRCGHGEEQKLELNPHTVENVTKNEDSMTGIEVEKWTQNKKSQLTDHVKGDFSANVPEAEKSKNSEVDKKRTKSPKLFVQTVRNGIKHVHCLPAETNVSFKKFNIEEFGKTLENNSYKFLKDTANHKNAMSSVATDMSCDHLKGRSNVLVFQQPGFNCSSIPHSSHSIINHHASIHNEGDQPKTPENIPSKEPKDGSPVQPSLLSLMKDRRLTLEQVVAIEALTQLSEAPSENSSPSKSEKDEESEQRTASLLNSCKAILYTVRKDLQDPNLQGEPPKLNHCPSLEKQSSCNTVVFNGQTTTLSNSHINSATNQASTKSHEYSKVTNSLSLFIPKSNSSKIDTNKSIAQGIITLDNCSNDLHQLPPRNNEVEYCNQLLDSSKKLDSDDLSCQDATHTQIEEDVATQLTQLASIIKINYIKPEDKKVESTPTSLVTCNVQQKYNQEKGTIQQKPPSSVHNNHGSSLTKQKNPTQKKTKSTPSRDRRKKKPTVVSYQENDRQKWEKLSYMYGTICDIWIASKFQNFGQFCPHDFPTVFGKISSSTKIWKPLAQTRSIMQPKTVFPPLTQIKLQRYPESAEEKVKVEPLDSLSLFHLKTESNGKAFTDKAYNSQVQLTVNANQKAHPLTQPSSPPNQCANVMAGDDQIRFQQVVKEQLMHQRLPTLPGISHETPLPESALTLRNVNVVCSGGITVVSTKSEEEVCSSSFGTSEFSTVDSAQKNFNDYAMNFFTNPTKNLVSITKDSELPTCSCLDRVIQKDKGPYYTHLGAGPSVAAVREIMENRYGQKGNAIRIEIVVYTGKEGKSSHGCPIAKWVLRRSSDEEKVLCLVRQRTGHHCPTAVMVVLIMVWDGIPLPMADRLYTELTENLKSYNGHPTDRRCTLNENRTCTCQGIDPETCGASFSFGCSWSMYFNGCKFGRSPSPRRFRIDPSSPLHEKNLEDNLQSLATRLAPIYKQYAPVAYQNQVEYENVARECRLGSKEGRPFSGVTACLDFCAHPHRDIHNMNNGSTVVCTLTREDNRSLGVIPQDEQLHVLPLYKLSDTDEFGSKEGMEAKIKSGAIEVLAPRRKKRTCFTQPVPRSGKKRAAMMTEVLAHKIRAVEKKPIPRIKRKNNSTTTNNSKPSSLPTLGSNTETVQPEVKSETEPHFILKSSDNTKTYSLMPSAPHPVKEASPGFSWSPKTASATPAPLKNDATASCGFSERSSTPHCTMPSGRLSGANAAAADGPGISQLGEVAPLPTLSAPVMEPLINSEPSTGVTEPLTPHQPNHQPSFLTSPQDLASSPMEEDEQHSEADEPPSDEPLSDDPLSPAEEKLPHIDEYWSDSEHIFLDANIGGVAIAPAHGSVLIECARRELHATTPVEHPNRNHPTRLSLVFYQHKNLNKPQHGFELNKIKFEAKEAKNKKMKASEQKDQAANEGPEQSSEVNELNQIPSHKALTLTHDNVVTVSPYALTHVAGPYNHWV

SEQ ID NO: 283 - protein, 2001 aa, Homo sapiens
MEQDRTNHVEGNRLSPFLIPSPPICQTEPLATKLQNGSPLPERAHPEVNGDTKWHSFKSYYGIPCMKGSQNSRVSPDFTQESRGYSKCLQNGGIKRTVSEPSLSGLLQIKKLKQDQKANGERRNFGVSQERNPGESSQPNVSDLSDKKESVSSVAQENAVKDFTSFSTHNCSGPENPELQILNEQEGKSANYHDKNIVLLKNKAVLMPNGATVSASSVEHTHGELLEKTLSQYYPDCVSIAVQKTTSHINAINSQATNELSCEITHPSHTSGQINSAQTSNSELPPKPAAVVSEACDADDADNASKLAAMLNTCSFQKPEQLQQQKSVFEICPSPAENNIQGTTKLASGEEFCSGSSSNLQAPGGSSERYLKQNEMNGAYFKQSSVFTKDSFSATTTPPPPSQLLLSPPPPLPQVPQLPSEGKSTLNGGVLEEHHHYPNQSNTTLLREVKIEGKPEAPPSQSPNPSTHVCSPSPMLSERPQNNCVNRNDIQTAGTMTVPLCSEKTRPMSEHLKHNPPIFGSSGELQDNCQQLMRNKEQELKGRDKEQTRDLVPPTQHYLKPGWIELKAPRFHQAESHLKRNEASLPSILQYQPNLSNQMTSKQYTGNSNMPGGLPRQAYTQKTTQLEHKSQMYQVEMNQGQSQGTVDQHLQFQKPSHQVHFSKTDHLPKAHVQSLCGTRFHFQQRADSQTEKLMSPVLKQHLNQQASETEPFSNSHLLQHKPHKQAAQTQPSQSSHLPQNQQQQQKLQIKNKEEILQTFPHPQSNNDQQREGSFFGQTKVEECFHGENQYSKSSEFETHNVQMGLEEVQNINRRNSPYSQTMKSSACKIQVSCSNNTHLVSENKEQTTHPELFAGNKTQNLHHMQYFPNNVIPKQDLLHRCFQEQEQKSQQASVLQGYKNRNQDMSGQQAAQLAQQRYLIHNHANVFPVPDQGGSHTQTPPQKDTQKHAALRWHLLQKQEQQQTQQPQTESCHSQMHRPIKVEPGCKPHACMHTAPPENKTWKKVTKQENPPASCDNVQQKSIIETMEQHLKQFHAKSLFDHKALTLKSQKQVKVEMSGPVTVLTRQTTAAELDSHTPALEQQTTSSEKTPTKRTAASVLNNFIESPSKLLDTPIKNLLDTPVKTQYDFPSCRCVEQIIEKDEGPFYTHLGAGPNVAAIREIMEERFGQKGKAIRIERVIYTGKEGKSSQGCPIAKWVVRRSSSEEKLLCLVRERAGHTCEAAVIVILILVWEGIPLSLADKLYSELTETLRKYGTLTNRRCALNEERTCACQGLDPETCGASFSFGCSWSMYYNGCKFARSKIPRKFKLLGDDPKEEEKLESHLQNLSTLMAPTYKKLAPDAYNNQIEYEHRAPECRLGLKEGRPFSGVTACLDFCAHAHRDLHNMQNGSTLVCTLTREDNREFGGKPEDEQLHVLPLYKVSDVDEFGSVEAQEEKKRSGAIQVLSSFRRKVRMLAEPVKTCRQRKLEAKKAAAEKLSSLENSSNKNEKEKSAPSRTKQTENASQAKQLAELLRLSGPVMQQSQQPQPLQKQPPQPQQQQRPQQQQPHHPQTESVNSYSASGSTNPYMRRPNPVSPYPNSSHTSDIYGSTSPMNFYSTSSQAAGSYLNSSNPMNPYPGLLNQNTQYPSYQCNGNLSVDNCSPYLGSYSPQSQPMDLYRYPSQDPLSKLSLPPIHTLYQPRFGNSQSFTSKYLGYGNQNMQGDGFSSCTIRPNVHHVGKLPPYPTHEMDGHFMGATSRLPPNLSNPNMDYKNGEHHSPSHIIHNYSAAPGMFNSSLHALHLQNKENDMLSHTANGLSKMLPALNHDRTACVQGGLHKLSDANGQEKQPLALVQGVASGAEDNDEVWSDSEQSFLDPDIGGVAVAPTHGSILIECAKRELHATTPLKNPNRNHPTRISLVFYQHKSMNEPKHGLALWEAKMAEKAREKEEECEKYGPDYVPQKSHGKKVKREPAEPHETSEPTYLRFIKSLAERTMSVTTDSTVTTSPYAFTRVTGPYNRYI

SEQ ID NO: 284 - protein, 912 aa, Homo sapiens
MPAMPSSGPGDTSSSAAEREEDRKDGEEQEEPRGKEERQEPSTTARKVGRPGRKRKHPPVESGDTPKDPAVISKSPSMAQDSGASELLPNGDLEKRSEPQPEEGSPAGGQKGGAPAEGEGAAETLPEASRAVENGCCTPKEGRGAPAEAGKEQKETNIESMKMEGSRGRLRGGLGWESSLRQRPMPRLTFQAGDPYYISKRKRDEWLARWKREAEKKAKVIAGMNAVEENQGPGESQKVEEASPPAVQQPTDPASPTVATTPEPVGSDAGDKNATKAGDDEPEYEDGRGFGIGELVWGKLRGFSWWPGRIVSWWMTGRSRAAEGTRWVMWFGDGKFSVVCVEKLMPLSSFCSAFHQATYNKQPMYRKAIYEVLQVASSRAGKLFPVCHDSDESDTAKAVEVQNKPMIEWALGGFQPSGPKGLEPPEEEKNPYKEVYTDMWVEPEAAAYAPPPPAKKPRKSTAEKPKVKEIIDERTRERLVYEVRQKCRNIEDICISCGSLNVTLEHPLFVGGMCQNCKNCFLECAYQYDDDGYQSYCTICCGGREVLMCGNNNCCRCFCVECVDLLVGPGAAQAAIKEDPWNCYMCGHKGTYGLLRRREDWPSRLQMFFANNHDQEFDPPKVYPPVPAEKRKPIRVLSLFDGIATGLLVLKDLGIQVDRYIASEVCEDSITVGMVRHQGKIMYVGDVRSVTQKHIQEWGPFDLVIGGSPCNDLSIVNPARKGLYEGTGRLFFEFYRLLHDARPKEGDDRPFFWLFENVVAMGVSDKRDISRFLESNPVMIDAKEVSAAHRARYFWGNLPGMNRPLASTVNDKLELQECLEHGRIAKFSKVRTITTRSNSIKQGKDQHFPVFMNEKEDILWCTEMERVFGFPVHYTDVSNMSRLARQRLLGRSWSVPVIRHLFAPLKEYFACV

SEQ ID NO: 285 - protein, 853 aa, Homo sapiens
MKGDTRHLNGEEDAGGREDSILVNGACSDQSSDSPPILEAIRTPEIRGRRSSSRLSKREVSSLLSYTQDLTGDGDGEDGDGSDTPVMPKLFRETRTRSESPAVRTRNNNSVSSRERHRPSPRSTRGRQGRNHVDESPVEFPATRSLRRRATASAGTPWPSPPSSYLTIDLTDDTEDTHGTPQSSSTPYARLAQDSQQGGMESPQVEADSGDGDSSEYQDGKEFGIGDLVWGKIKGFSWWPAMVVSWKATSKRQAMSGMRWVQWFGDGKFSEVSADKLVALGLFSQHFNLATFNKLVSYRKAMYHALEKARVRAGKTFPSSPGDSLEDQLKPMLEWAHGGFKPTGIEGLKPNNTQPVVNKSKVRRAGSRKLESRKYENKTRRRTADDSATSDYCPAPKRLKTNCYNNGKDRGDEDQSREQMASDVANNKSSLEDGCLSCGRKNPVSFHPLFEGGLCQTCRDRFLELFYMYDDDGYQSYCTVCCEGRELLLCSNTSCCRCFCVECLEVLVGTGTAAEAKLQEPWSCYMCLPQRCHGVLRRRKDWNVRLQAFFTSDTGLEYEAPKLYPAIPAARRRPIRVLSLFDGIATGYLVLKELGIKVGKYVASEVCEESIAVGTVKHEGNIKYVNDVRNITKKNIEEWGPFDLVIGGSPCNDLSNVNPARKGLYEGTGRLFFEFYHLLNYSRPKEGDDRPFFWMFENVVAMKVGDKRDISRFLECNPVMIDAIKVSAAHRARYFWGNLPGMNRPVIASKNDKLELQDCLEYNRIAKLKKVQTITTKSNSIKQGKNQLFPVVMNGKEDVLWCTELERIFGFPVHYTDVSNMGRGARQKLLGRSWSVPVIRHLFAPLKDYFACE

SEQ ID NO: 286 - protein, 2554 aa, Homo sapiens
MPPLLAPLLCLALLPALAARGPRCSQPGETCLNGGKCEAANGTEACVCGGAFVGPRCQDPNPCLSTPCKNAGTCHVVDRRGVADYACSCALGFSGPLCLTPLDNACLTNPCRNGGTCDLLTLTEYKCRCPPGWSGKSCQQADPCASNPCANGGQCLPFEASYICHCPPSFHGPTCRQDVNECGQKPGLCRHGGTCHNEVGSYRCVCRATHTGPNCERPYVPCSPSPCQNGGTCRPTGDVTHECACLPGFTGQNCEENIDDCPGNNCKNGGACVDGVNTYNCRCPPEWTGQYCTEDVDECQLMPNACQNGGTCHNTHGGYNCVCVNGWTGEDCSENIDDCASAACFHGATCHDRVASFYCECPHGRTGLLCHLNDACISNPCNEGSNCDTNPVNGKAICTCPSGYTGPACSQDVDECSLGANPCEHAGKCINTLGSFECQCLQGYTGPRCEIDVNECVSNPCQNDATCLDQIGEFQCICMPGYEGVHCEVNTDECASSPCLHNGRCLDKINEFQCECPTGFTGHLCQYDVDECASTPCKNGAKCLDGPNTYTCVCTEGYTGTHCEVDIDECDPDPCHYGSCKDGVATFTCLCRPGYTGHHCETNINECSSQPCRHGGTCQDRDNAYLCFCLKGTTGPNCEINLDDCASSPCDSGTCLDKIDGYECACEPGYTGSMCNINIDECAGNPCHNGGTCEDGINGFTCRCPEGYHDPTCLSEVNECNSNPCVHGACRDSLNGYKCDCDPGWSGTNCDINNNECESNPCVNGGTCKDMTSGYVCTCREGFSGPNCQTNINECASNPCLNQGTCIDDVAGYKCNCLLPYTGATCEVVLAPCAPSPCRNGGECRQSEDYESFSCVCPTGWQGQTCEVDINECVLSPCRHGASCQNTHGGYRCHCQAGYSGRNCETDIDDCRPNPCHNGGSCTDGINTAFCDCLPGFRGTFCEEDINECASDPCRNGANCTDCVDSYTCTCPAGFSGIHCENNTPDCTESSCFNGGTCVDGINSFTCLCPPGFTGSYCQHDVNECDSQPCLHGGTCQDGCGSYRCTCPQGYTGPNCQNLVHWCDSSPCKNGGKCWQTHTQYRCECPSGWTGLYCDVPSVSCEVAAQRQGVDVARLCQHGGLCVDAGNTHHCRCQAGYTGSYCEDLVDECSPSPCQNGATCTDYLGGYSCKCVAGYHGVNCSEEIDECLSHPCQNGGTCLDLPNTYKCSCPRGTQGVHCEINVDDCNPPVDPVSRSPKCFNNGTCVDQVGGYSCTCPPGFVGERCEGDVNECLSNPCDARGTQNCVQRVNDFHCECRAGHTGRRCESVINGCKGKPCKNGGTCAVASNTARGFICKCPAGFEGATCENDARTCGSLRCLNGGTCISGPRSPTCLCLGPFTGPECQFPASSPCLGGNPCYNQGTCEPTSESPFYRCLCPAKFNGLLCHILDYSFGGGAGRDIPPPLIEEACELPECQEDAGNKVCSLQCNNHACGWDGGDCSLNFNDPWKNCTQSLQCWKYFSDGHCDSQCNSAGCLFDGFDCQRAEGQCNPLYDQYCKDHFSDGHCDQGCNSAECEWDGLDCAEHVPERLAAGTLVVVVLMPPEQLRNSSFHFLRELSRVLHTNVVFKRDAHGQQMIFPYYGREEELRKHPIKRAAEGWAAPDALLGQVKASLLPGGSEGGRRRRELDPMDVRGSIVYLEIDNRQCVQASSQCFQSATDVAAFLGALASLGSLNIPYKIEAVQSETVEPPPPAQLHFMYVAAAAFVLLFFVGCGVLLSRKRRRQHGQLWFPEGFKVSEASKKKRREPLGEDSVGLKPLKNASDGALMDDNQNEWGDEDLETKKFRFEEPVVLPDLDDQTDHRQWTQQHLDAADLRMSAMAPTPPQGEVDADCMDVNVRGPDGFTPLMIASCSGGGLETGNSEEEEDAPAVISDFIYQGASLHNQTDRTGETALHLAARYSRSDAAKRLLEASADANIQDNMGRTPLHAAVSADAQGVFQILIRNRATDLDARMHDGTTPLILAARLAVEGMLEDLINSHADVNAVDDLGKSALHWAAAVNNVDAAVVLLKNGANKDMQNNREETPLFLAAREGSYETAKVLLDHFANRDITDHMDRLPRDIAQERMHHDIVRLLDEYNLVRSPQLHGAPLGGTPTLSPPLCSPNGYLGSLKPGVQGKKVRKPSSKGLACGSKEAKDLKARRKKSQDGKGCLLDSSGMLSPVDSLESPHGYLSDVASPPLLPSPFQQSPSVPLNHLPGMPDTHLGIGHLNVAAKPEMAALGGGGRLAFETGPPRLSHLPVASGTSTVLGSSSGGALNFTVGGSTSLNGQCEWLSRLQSGMVPNQYNPLRGSVAPGPLSTQAPSLQHGMVGPLHSSLAASALSQMMSYQGLPSTRLATQPHLVQTQQVQPQNLQMQQQNLQPANIQQQQSLQPPPPPQPHLGVSSAASGHLGRSFLSGEPSQADVQPLGPSSLAVHTILPQESPALPTSLPSSLVPPVTAAQFLTPPSQHSYSSPVDNTPSHQLQVPEHPFLTPSPESPDQWSSSSPHSNVSDWSEGVSSPPTSMQSQIARIPEAFK

SEQ ID NO: 287 - protein, 402 aa, Homo sapiens
MAAVILPSTAAPSSLFPASQQKGHTQGGELVNELLTSWLRGLVTFEDVAVEFTQEEWALLDPAQRTLYRDVMLENCRNLASLGCRVNKPSLISQLEQDKKVVTEERGILPSTCPDLETLLKAKWLTPKKNVFRKEQSKGVKTERSHRGVKLNECNQCFKVFSTKSNLTQHKRIHTGEKPYDCSQCGKSFSSRSYLTIHKRIHNGEKPYECNHCGKAFSDPSSLRLHLRIHTGEKPYECNQCFHVFRTSCNLKSHKRIHTGENHHECNQCGKAFSTRSSLTGHNSIHTGEKPYECHDCGKTFRKSSYLTQHVRTHTGEKPYECNECGKSFSSSFSLTVHKRIHTGEKPYECSDCGKAFNNLSAVKKHLRTHTGEKPYECNHCGKSFTSNSYLSVHKRIHNRWI

SEQ ID NO: 288 - protein, 331 aa, Homo sapiens
MLENCRNLASLGCRVNKPSLISQLEQDKKVVTEERGILPSTCPDLETLLKAKWLTPKKNVFRKEQSKGVKTERSHRGVKLNECNQCFKVFSTKSNLTQHKRIHTGEKPYDCSQCGKSFSSRSYLTIHKRIHNGEKPYECNHCGKAFSDPSSLRLHLRIHTGEKPYECNQCFHVFRTSCNLKSHKRIHTGENHHECNQCGKAFSTRSSLTGHNSIHTGEKPYECHDCGKTFRKSSYLTQHVRTHTGEKPYECNECGKSFSSSFSLTVHKRIHTGEKPYECSDCGKAFNNLSAVKKHLRTHTGEKPYECNHCGKSFTSNSYLSVHKRIHNRWI

SEQ ID NO: 289 - protein, 808 aa, Homo sapiens
MLEGHESYDTENFYFREIRKNLQEVDFQWKDGEINYKEGPMTHKNNLTGQRVRHSQGDVENKHMENQLILRFQSGLGELQKFQTAEKIYGCNQIERTVNNCFLASPLQRIFPGVQTNISRKYGNDFLQLSLPTQDEKTHIREKPYIGNECGKAFRVSSSLINHQMIHTTEKPYRCNESGKAFHRGSLLTVHQIVHTRGKPYQCDVCGRIFRQNSDLVNHRRSHTGDKPYICNECGKSFSKSSHLAVHQRIHTGEKPYKCNRCGKCFSQSSSLATHQTVHTGDKPYKCNECGKTFKRNSSLTAHHIIHAGKKPYTCDVCGKVFYQNSQLVRHQIIHTGETPYKCNECGKVFFQRSRLAGHRRIHTGEKPYKCNECGKVFSQHSHLAVHQRVHTGEKPYKCNECGKAFNWGSLLTVHQRIHTGEKPYKCNVCGKVFNYGGYLSVHMRCHTGEKPLHCNKCGMVFTYYSCLARHQRMHTGEKPYKCNVCGKVFIDSGNLSIHRRSHTGEKPFQCNECGKVFSYYSCLARHRKIHTGEKPYKCNDCGKAYTQRSSLTKHLVIHTGENPYHCNEFGEAFIQSSKLARYHRNPTGEKPHKCSECGRTFSHKTSLVYHQRRHTGEMPYKCIECGKVFNSTTTLARHRRIHTGEKPYKCNECGKVFRYRSGLARHWSIHTGEKPYKCNECGKAFRVRSILLNHQMMHTGEKPYKCNECGKAFIERSNLVYHQRNHTGEKPYKCMECGKAFGRRSCLTKHQRIHSSEKPYKCNECGKSYISRSGLTKHQIKHAGENLTTKLNVERPLDVVLTSGIPK

SEQ ID NO: 290 - protein, 500 aa, Homo sapiens
MLEGHESYDTENFYFREIRKNLQEVDFQWKDGEINYKEGPMTHKNNLTGQRVRHSQGDVENKHMENQLILRFQSGLGELQKFQTAEKIYGCNQIERTVNNCFLASPLQRIFPGVQTNISRKYGNDFLQLSLPTQDEKTHIREKPYIGNECGKAFRVSSSLINHQMIHTTEKPYRCNESGKAFHRGSLLTVHQIVHTRGKPYQCDVCGRIFRQNSDLVNHRRSHTGDKPYICNECGKSFSKSSHLAVHQRIHTGEKPYKCNRCGKCFSQSSSLATHQTVHTGDKPYKCNECGKTFKRNSSLTAHHIIHAGKKPYTCDVCGKVFYQNSQLVRHQIIHTGETPYKCNECGKVFRYRSGLARHWSIHTGEKPYKCNECGKAFRVRSILLNHQMMHTGEKPYKCNECGKAFIERSNLVYHQRNHTGEKPYKCMECGKAFGRRSCLTKHQRIHSSEKPYKCNECGKSYISRSGLTKHQIKHAGENLTTKLNVERPLDVVLTSGIPK

SEQ ID NO: 291 - protein, 924 aa, Homo sapiens
MALPQGSLTFRDVAVEFSQEEWKCLDPVQKALYRDVMLENYRNLGFLGLCLPDLNIISMLEQGKEPWTVVSQVKIARNPNCGECMKGVITGISPKCVIKELPPIQNSNTGEKFQAVMLEGHESYDTENFYFREIRKNLQEVDFQWKDGEINYKEGPMTHKNNLTGQRVRHSQGDVENKHMENQLILRFQSGLGELQKFQTAEKIYGCNQIERTVNNCFLASPLQRIFPGVQTNISRKYGNDFLQLSLPTQDEKTHIREKPYIGNECGKAFRVSSSLINHQMIHTTEKPYRCNESGKAFHRGSLLTVHQIVHTRGKPYQCDVCGRIFRQNSDLVNHRRSHTGDKPYICNECGKSFSKSSHLAVHQRIHTGEKPYKCNRCGKCFSQSSSLATHQTVHTGDKPYKCNECGKTFKRNSSLTAHHIIHAGKKPYTCDVCGKVFYQNSQLVRHQIIHTGETPYKCNECGKVFFQRSRLAGHRRIHTGEKPYKCNECGKVFSQHSHLAVHQRVHTGEKPYKCNECGKAFNWGSLLTVHQRIHTGEKPYKCNVCGKVFNYGGYLSVHMRCHTGEKPLHCNKCGMVFTYYSCLARHQRMHTGEKPYKCNVCGKVFIDSGNLSIHRRSHTGEKPFQCNECGKVFSYYSCLARHRKIHTGEKPYKCNDCGKAYTQRSSLTKHLVIHTGENPYHCNEFGEAFIQSSKLARYHRNPTGEKPHKCSECGRTFSHKTSLVYHQRRHTGEMPYKCIECGKVFNSTTTLARHRRIHTGEKPYKCNECGKVFRYRSGLARHWSIHTGEKPYKCNECGKAFRVRSILLNHQMMHTGEKPYKCNECGKAFIERSNLVYHQRNHTGEKPYKCMECGKAFGRRSCLTKHQRIHSSEKPYKCNECGKSYISRSGLTKHQIKHAGENLTTKLNVERPLDVVLTSGIPK

SEQ ID NO: 292 - protein, 63 aa, Homo sapiens
MEEMSYGENSGTHVGSFSCSPQPSQQMKVLFVGNSFLLTPVLHRQPHLQPCNFGPEVVAPQRL

SEQ ID NO: 293 - protein, 746 aa, Homo sapiens
MAFSQGLLTFRDVAIEFSQEEWKCLDPAQRTLYRDVMLENYRNLVSLDISSKCTMKEFLSTAQGNREVFHAGTLQIHESHHNGDFCYQDVDKDIHDYEFQWQEDERNGHEAPMTKIKKLTGITERYDQSHARNKPIKDQLGSSFHSHLPEMHIFQTEEKIDNQVVKSVHDASLVSTAQRISCRPKTHISNNHGNNFWNSSLLTQKQEVHMREKSFQCNESGKAFNYSSLLRKHQIIHLADKYKCDVCGKLFNQKRNLACHRRCHTGENPYKCNECGKTFSQTSSLTCHRRLHTGEKPYKCEECDKAFHFKSILERHRIIHTEEKPYKCNECGKTFRQKSILTRHHRLHTGEKPYKCNECGKTFSHKSSLTCHHRLHTGEKPYKCNECGKTFSHKSSLTCHRRLHTGEKPYKCEECDKAYSFRSNFEIHRKIHTEDNAYKCNECGKTFSRTSSLTCHRRRHTGEQPYKCEECDKAFRFKSNLERHRRIHTGEKPYKCNECGKTFSRKSYLTCHHRLHTGEKAYKCNECGKTFSWKSSLTCHRRLHSGEKPYKCKECGKTFNQQLTLKRHRRLHSGENPYKCEDSDKAYSFKSNLEIHQKIHTEENPYKCNECGKTFSRTSSLTCHRRLHTGEKPYKCEECDKAFRVKSNLEGHRRIHTGEKPYKCNECGKTFSRKSYFICHHRLHTGEKPYKCNECGKNFSQKSSLICHHRLHTGEKPYKCNECGKTFSQKSNLTCHRRLHTGEKQV

SEQ ID NO: 294 - protein, 300 aa, Homo sapiens
MHSLKKLTFEDVAIDFTQEEWAMMDTSKRKLYRDVMLENISHLVSLGYQISKSYIILQLEQGKELWREGRVFLQDQNPNRESALKKTHMISMHPITRKDASTSMTMENSLILEDPFECNDSGEDCTRSSTITQCLLTHSGKKPYVSKQCGKSLRNLLSTEPHKQIHTKGKSYQCNLCEKAYTNCFHLRRHKMTHTGERPYACHLCRKAFTQCSHLRRHEKTHTGQRPYKCHQYGKVFIQSFNLQRHERTHLGKKCYECDKSGKAFSQSSGFRGNKIIHTGEKPHACLLCGKAFSLSSNLR

SEQ ID NO: 295 - protein, 600 aa, Homo sapiens
MAASAQVSVTFEDVAVTFTQEEWGQLDAAQRTLYQEVMLETCGLLMSLGCPLFKPELIYQLDHRQELWMATKDLSQSSYPGDNTKPKTTEPTFSHLALPEEVLLQEQLTQGASKNSQLGQSKDQDGPSEMQEVHLKIGIGPQRGKLLEKMSSERDGLGSDDGVCTKITQKQVSTEGDLYECDSHGPVTDALIREEKNSYKCEECGKVFKKNALLVQHERIHTQVKPYECTECGKTFSKSTHLLQHLIIHTGEKPYKCMECGKAFNRRSHLTRHQRIHSGEKPYKCSECGKAFTHRSTFVLHHRSHTGEKPFVCKECGKAFRDRPGFIRHYIIHTGEKPYECIECGKAFNRRSYLTWHQQIHTGVKPFECNECGKAFCESADLIQHYIIHTGEKPYKCMECGKAFNRRSHLKQHQRIHTGEKPYECSECGKAFTHCSTFVLHKRTHTGEKPYECKECGKAFSDRADLIRHFSIHTGEKPYECVECGKAFNRSSHLTRHQQIHTGEKPYECIQCGKAFCRSANLIRHSIIHTGEKPYECSECGKAFNRGSSLTHHQRIHTGRNPTIVTDVGRPFMTAQTSVNIQELLLGKEFLNITTEENLW

SEQ ID NO: 296 - protein, 532 aa, Homo sapiens
MIQAQESITLEDVAVDFTWEEWQLLGAAQKDLYRDVMLENYSNLVAVGYQASKPDALFKLEQGEQLWTIEDGIHSGACSDIWKVDHVLERLQSESLVNRRKPCHEHDAFENIVHCSKSQFLLGQNHDIFDLRGKSLKSNLTLVNQSKGYEIKNSVEFTGNGDSFLHANHERLHTAIKFPASQKLISTKSQFISPKHQKTRKLEKHHVCSECGKAFIKKSWLTDHQVMHTGEKPHRCSLCEKAFSRKFMLTEHQRTHTGEKPYECPECGKAFLKKSRLNIHQKTHTGEKPYICSECGKGFIQKGNLIVHQRIHTGEKPYICNECGKGFIQKTCLIAHQRFHTGKTPFVCSECGKSCSQKSGLIKHQRIHTGEKPFECSECGKAFSTKQKLIVHQRTHTGERPYGCNECGKAFAYMSCLVKHKRIHTREKQEAAKVENPPAERHSSLHTSDVMQEKNSANGATTQVPSVAPQTSLNISGLLANRNVVLVGQPVVRCAASGDNRGFAQDRNLVNAVNVVVPSVINYVLFYVTENP

SEQ ID NO: 297 - protein, 353 aa, Homo sapiens
MVGDTLKLLSPLMTRYFFLLFYSTDSSDLNENQHPLDFDEMAFGKVKSGISFLIQTGVGILGNSFLLCFYNLILFTGHKLRPTDLILSQLALANSMVLFFKGIPQTMAAFGLKYLLNDTGCKFVFYYHRVGTRVSLSTICLLNGFQAIKLNPSICRWMEIKIRSPRFIDFCCLLCWAPHVLMNASVLLLVNGPLNSKNSSAKNNYGYCSYKASKRFSSLHAVLYFSPDFMSLGFMVWASGSMVFFLYRHKQQVQHNHSNRLSCRPSQEARATHTIMVLVSSFFVFYSVHSFLTIWTTVVANPGQWIVTNSVLVASCFPARSPFVLIMSDTHISQFCFACRTRKTLFPNLVVMP

SEQ ID NO: 298 - protein, 1102 aa, Homo sapiens
MRTSLQAVALWGQKAPPHSITAIMITDDQRTIVTGSQEGQLCLWNLSHELKISAKELLFGHSASVTCLARARDFSKQPYIVSAAENGEMCVWNVTNGQCMEKATLPYRHTAICYYHCSFRMTGEGWLLCCGEYQDVLIIDAKTLAVVHSFRSSQFPDWINCMCIVHSMRIQEDSLLVVSVAGELKVWDLSSSINSIQEKQDVYEKESKFLESLNCQTIRFCTYTERLLLVVFSKCWKVYDYCDFSLLLTEVSRNGQFFAGGEVIAAHRILIWTEDGHSYIYQLLNSGLSKSIYPADGRVLKETIYPHLLCSTSVQENKEQSRPFVMGYMNERKEPFYKVLFSGEVSGRITLWHIPDVPVSKFDGSPREIPVTATWTLQDNFDKHDTMSQSIIDYFSGLKDGAGTAVVTSSEYIPSLDKLICGCEDGTIIITQALNAAKARLLEGGSLVKDSPPHKVLKGHHQSVTSLLYPHGLSSKLDQSWMLSGDLDSCVILWDIFTEEILHKFFLEAGPVTSLLMSPEKFKLRGEQIICCVCGDHSVALLHLEGKSCLLHARKHLFPVRMIKWHPVENFLIVGCADDSVYIWEIETGTLERHETGERARIILNCCDDSQLVKSVLPIASETLKHKSIEQRSSSPYQLGPLPCPGLQVESSCKVTDAKFCPRPFNVLPVKTKWSNVGFHILLFDLENLVELLLPTPLSDVDSSSSFYGGEVLRRAKSTVEKKTLTLRKSKTACGPLSAEALAKPITESLAQGDNTIKFSEENDGIKRQKKMKISKKMQPKPSRKVDASLTIDTAKLFLSCLLPWGVDKDLDYLCIKHLNILKLQGPISLGISLNEDNFSLMLPGWDLCNSGMIKDYSGVNLFSRKVLDLSDKYTATLPNQVGIPRGLENNCDSLRESDTIVYLLSRLFLVNKLVNMPLELACRVGSSFRMESIHNKMRGAGNDILNMSSFYSCLRNGKNESHVPEADLSLLKLISCWRDQSVQVTEAIQAVLLAEVQQHMKSLGKIPVNSQPVSMAENGNCEMKQMLPKLEWTEELELQCVRNTLPLQTPVSPVKHDSNSNSANFQDVEDMPDRCALEESESPGEPRHHSWIAKVCPCKVS

SEQ ID NO: 299 - protein, 274 aa, Homo sapiens
MIISHFPKCVAVFALLALSVGALDTFIAAVYEHAVILPNRTETPVSKEEALLLMNKNIDVLEKAVKLAAKQGAHIIVTPEDGIYGWIFTRESIYPYLEDIPDPGVNWIPCRDPWRFGNTPVQQRLSCLAKDNSIYVVANIGDKKPCNASDSQCPPDGRYQYNTDVVFDSQGKLLARYHKYNLFAPEIQFDFPKDSELVTFDTPFGKFGIFTCFDIFSHDPAVVVVDEFQLTAFSTPQHGTTRCPSSRLFPSIQHGPRPWESIYLLQIPTTPACT

SEQ ID NO: 300 - protein, 117 aa, Homo sapiens
MIISHFPKCVAVFALLALSVGALDTFIAAVYEHAVILPNRTETPVSKEEALLLMNKNIDVLEKAVKLAAKQGAHIIVTPEDGIYGWIFTRESIYPYLEDIPDPGVNWIPCRDPWRNH

SEQ ID NO: 301 - protein, 147 aa, Homo sapiens
MIISHFPKCVAVFALLALSVGALDTFIAAVYEHAVILPNRTETPVSKEEALLLMNKNIDVLEKAVKLAAKQGAHIIVTPEDGIYGWIFTRESIYPYLEDIPDPGVNWIPCRDPWRKSKKMNEPVSKELCYHCHSECNQYGQWKLYRT

SEQ ID NO: 302 - protein, 207 aa, Homo sapiens
MIISHFPKCVAVFALLALSVGALDTFIAAVYEHAVILPNRTETPVSKEEALLLMNKNIDVLEKAVKLAAKQGAHIIVTPEDGIYGWIFTRESIYPYLEDIPDPGVNWIPCRDPWRFGNTPVQQRLSCLAKDNSIYVVANIGDKKPCNASDSQCPPDGRYQYNTDVVFDSQGKLLARYHKGVESTPQKQSRCTTMTWKQRVVSCCYQN

SEQ ID NO: 303 - protein, 133 aa, Homo sapiens
MIISHFPKCVAVFALLALSVGALDTFIAAVYEHAVILPNRTETPVSKEEALLLMNKNIDVLEKAVKLAAKQGAHIIVTPEDGIYGWIFTRESIYPYLEDIPDPGVNWIPCRDPWSTIFLHLKFSLISPRIQNL

SEQ ID NO: 304 - protein, 129 aa, Homo sapiens
MIISHFPKCVAVFALLALSVGALDTFIAAVYEHAVILPNRTETPVSKEEALLLMNKNIDVLEKAVKLAAKQGAHIIVTPEDGIYGWIFTRESIYPYLEDIPDPGVNWIPCRDPWREWNLRPRSSQGVPL

SEQ ID NO: 305 - protein, 161 aa, Homo sapiens
MIISHFPKCVAVFALLALSVGALDTFIAAVYEHAVILPNRTETPVSKEEALLLMNKNIDVLEKAVKLAAKQVLPFYTCKGDLQFGQRVFGIHDKLFCPTCFEQGAHIIVTPEDGIYGWIFTRESIYPYLEDIPDPGVNWIPCRDPWREWNLRPRSSQGVPL

SEQ ID NO: 306 - protein, 448 aa, Homo sapiens [sequence omitted]

SEQ ID NO: 307 - protein, 208 aa, Homo sapiens
MMLENYSLLLSVGYCITKPEVVCKLEHGQVLWILEEESPSQSHLDCCIDDDLMEKRQENQDQHLQKVDFVNNKTLTMDRNGVLGKTFSLDTNPILSRKIRGNCDSSGMNLNNISELIISNRSSFVRNPAECNVRGKFLLCMKRENPYARGKPLEYDGNGKAVSQNEDLFRHQYIQTLKQCFEYNQCGKAFHEEAACSTHKRVCSWETL

SEQ ID NO: 308 - protein, 521 aa, Homo sapiens
METDLAEMPEKGALSSQDSPHFQEKSTEEGEVAALRLTARSQETVTFKDVAMDFTPEEWGKLDPAQRDVMLENYRNLVSLWLPVSKPESYNLENGKEPLKLERKAPKSSYSDMETRPQSKDSTSVQDFSKAESCKVAIIDRLTRNSVYDSNLEAALECENWLENQQGNQERHLREMFTHMNSLSEETDHKHDVYWKSFNQKSVLITEDRVPKGSYAFHTLEKSLKQKSNLMKKQRTYKEKKPHKCNDCGELFTYHSVLIRHQRVHTGEKPYTCNECGKSFSHRANLTKHQRTHTRILFECSECKKTFTESSSLATHQRIHVGERPYECNECGKGFNRSTHLVQHQLIHTGVKPYECNECDKAFIHSSALIKHQRTHTGEKPYKCQECGKAFSHCSSLTKHQRVHTGEKPYECSECGKTFSQSTHLVQHQRIHTGEKPYECNECGKTFSRSSNFAKHQRIHIGKKPYKCSECGKAFIHSSALIQHQRTHTGEKPFRCNECGKSFKCSSSLIRHQRVHTEEQP

SEQ ID NO: 309 - protein, 511 aa, Homo sapiens
MGALSSQDSPHFQEKSTEEGEVAALRLTARSQETVTFKDVAMDFTPEEWGKLDPAQRDVMLENYRNLVSLWLPVSKPESYNLENGKEPLKLERKAPKSSYSDMETRPQSKDSTSVQDFSKAESCKVAIIDRLTRNSVYDSNLEAALECENWLENQQGNQERHLREMFTHMNSLSEETDHKHDVYWKSFNQKSVLITEDRVPKGSYAFHTLEKSLKQKSNLMKKQRTYKEKKPHKCNDCGELFTYHSVLIRHQRVHTGEKPYTCNECGKSFSHRANLTKHQRTHTRILFECSECKKTFTESSSLATHQRIHVGERPYECNECGKGFNRSTHLVQHQLIHTGVKPYECNECDKAFIHSSALIKHQRTHTGEKPYKCQECGKAFSHCSSLTKHQRVHTGEKPYECSECGKTFSQSTHLVQHQRIHTGEKPYECNECGKTFSRSSNFAKHQRIHIGKKPYKCSECGKAFIHSSALIQHQRTHTGEKPFRCNECGKSFKCSSSLIRHQRVHTEEQP

SEQ ID NO: 310 - protein, 674 aa, Homo sapiens
MALTQGQLSFSDVAIEFSQEEWKCLDPGQKALYRDVMLENYRNLVSLGEDNVRPEACICSGICLPDLSVTSMLEQKRDPWTLQSEVKIINNPDGRECIKGVNTEKSSKLGSSAGNKSLKNQHGLTLQLHLTEWQPFQAVRNIYGCKHVEKSISDNSSVSPVQISFFSVKTHIFNNYRNDFLFSTLLPQEQKVHIREKPYGCNEHGKVFRVSSSLTNRQVIHIADKTYKCSDCGEIFSSNSNFAQHQRIHTGEKPYKYNECGKVFNQNSHLAQHQKIHTGQKPYNNKECGKVFSHHAYLAQHRKIHTGEKPYKCSECGKAFSVCSSLTAHLVIHTGEKPYDCKECGKVFRHKSSLTTHQTVHTGERPYKCNECGKGFSRIAFLARHRKVHTGEKPYKCNECGKVFIGNSRLARHRKIHTGGRRYKCNECGKAFRTCSDLTAHLLIHTGEKPYECIDCGKVFRHKSSLTYHCRIHTGEKPYKCNECGKVFSQNSNLQRHRKIHTGEKLYKCNECGKVFRQNSHLAQHRDIHTGEKPYSCNECGKVFRRNSHLVRHRNVHTGEKPYSCNECGKVFSRNSHLARHRNIHTGEKPHSCNECGKVFSRNSHLARHRKIHTGEKLYKCNECSKVFSRNSRLAQHRNIHTGVKPYSCNECGKVFSKNSILVQHCSIHTREKP

SEQ ID NO: 311 - protein, 661 aa, Homo sapiens
MALTQGQLSFSDVAIEFSQEEWKCLDPGQKALYRDVMLENYRNLVSLGICLPDLSVTSMLEQKRDPWTLQSEVKIINNPDGRECIKGVNTEKSSKLGSSAGNKSLKNQHGLTLQLHLTEWQPFQAVRNIYGCKHVEKSISDNSSVSPVQISFFSVKTHIFNNYRNDFLFSTLLPQEQKVHIREKPYGCNEHGKVFRVSSSLTNRQVIHIADKTYKCSDCGEIFSSNSNFAQHQRIHTGEKPYKYNECGKVFNQNSHLAQHQKIHTGQKPYNNKECGKVFSHHAYLAQHRKIHTGEKPYKCSECGKAFSVCSSLTAHLVIHTGEKPYDCKECGKVFRHKSSLTTHQTVHTGERPYKCNECGKGFSRIAFLARHRKVHTGEKPYKCNECGKVFIGNSRLARHRKIHTGGRRYKCNECGKAFRTCSDLTAHLLIHTGEKPYECIDCGKVFRHKSSLTYHCRIHTGEKPYKCNECGKVFSQNSNLQRHRKIHTGEKLYKCNECGKVFRQNSHLAQHRDIHTGEKPYSCNECGKVFRRNSHLVRHRNVHTGEKPYSCNECGKVFSRNSHLARHRNIHTGEKPHSCNECGKVFSRNSHLARHRKIHTGEKLYKCNECSKVFSRNSRLAQHRNIHTGVKPYSCNECGKVFSKNSILVQHCSIHTREKP

SEQ ID NO: 312 - protein, 227 aa, Homo sapiens
MTDFKLGIVRLGRVAGKTKYTLIDEQDIPLVESYSFEARMEVDADGNGAKIFAYAFDKNRGRGSGRLLHELLWERHRGGVAPGFQVVHLNAVTVDNRLDNLQLVPWGWRPKAEETSSKQREQSLYWLAIQQLPTDPIEEQFPVLNVTRYYNANGDVVEEEENSCTYYECHYPPCTVIEKQLREFNICGRCQVARYCGSQCQQKDWPAHKKHCRERKRPFQHELEPER

SEQ ID NO: 313 - protein, 617 aa, Homo sapiens
MDFSKLPKILDEDKESTFGYVHGVSGPVVTACDMAGAAMYELVRVGHSELVGEIIRLEGDMATIQVYEETSGVSVGDPVLRTGKPLSVELGPGIMGAIFDGIQRPLSDISSQTQSIYIPRGVNVSALSRDIKWDFTPCKNLRVGSHITGGDIYGIVSENSLIKHKIMLPPRNRGTVTYIAPPGNYDTSDVVLELEFEGVKEKFTMVQVWPVRQVRPVTEKLPANHPLLTGQRVLDALFPCVQGGTTAIPGAFGCGKTVISQSLSKYSNSDVIIYVGCGERGNEMSEVLRDFPELTMEVDGKVESIMKRTALVANTSNMPVAAREASIYTGITLSEYFRDMGYHVSMMADSTSRWAEALREISGRLAEMPADSGYPAYLGARLASFYERAGRVKCLGNPEREGSVSIVGAVSPPGGDFSDPVTSATLGIVQVFWGLDKKLAQRKHFPSVNWLISYSKYMRALDEYYDKHFTEFVPLRTKAKEILQEEEDLAEIVQLVGKASLAETDKITLEVAKLIKDDFLQQNGYTPYDRFCPFYKTVGMLSNMIAFYDMARRAVETTAQSDNKITWSIIREHMGDILYKLSSMKFKDPLKDGEAKIKSDYAQLLEDMQNAFRSLED

SEQ ID NO: 314 - protein, 584 aa, Homo sapiens
MAGAAMYELVRVGHSELVGEIIRLEGDMATIQVYEETSGVSVGDPVLRTGKPLSVELGPGIMGAIFDGIQRPLSDISSQTQSIYIPRGVNVSALSRDIKWDFTPCKNLRVGSHITGGDIYGIVSENSLIKHKIMLPPRNRGTVTYIAPPGNYDTSDVVLELEFEGVKEKFTMVQVWPVRQVRPVTEKLPANHPLLTGQRVLDALFPCVQGGTTAIPGAFGCGKTVISQSLSKYSNSDVIIYVGCGERGNEMSEVLRDFPELTMEVDGKVESIMKRTALVANTSNMPVAAREASIYTGITLSEYFRDMGYHVSMMADSTSRWAEALREISGRLAEMPADSGYPAYLGARLASFYERAGRVKCLGNPEREGSVSIVGAVSPPGGDFSDPVTSATLGIVQVFWGLDKKLAQRKHFPSVNWLISYSKYMRALDEYYDKHFTEFVPLRTKAKEILQEEEDLAEIVQLVGKASLAETDKITLEVAKLIKDDFLQQNGYTPYDRFCPFYKTVGMLSNMIAFYDMARRAVETTAQSDNKITWSIIREHMGDILYKLSSMKFKDPLKDGEAKIKSDYAQLLEDMQNAFRSLED

SEQ ID NO: 315 - protein, 1224 aa, Homo sapiens
MLPYTVNFKVSARTLTGALNAHNKAAVDWGWQGLIAYGCHSLVVVIDSITAQTLQVLEKHKADVVKVKWARENYHHNIGSPYCLRLASADVNGKIIVWDVAAGVAQCEIQEHAKPIQDVQWLWNQDASRDLLLAIHPPNYIVLWNADTGTKLWKKSYADNILSFSFDPFDPSHLTLLTSEGIVFISDFSPSKPPSGPGKKVYISSPHSSPAHNKLATATGAKKALNKVKILITQEKPSAEFITLNDCLQLAYLPSKRNHMLLLYPREILILDLEVNQTVGVIAIERTGVPFLQVIPCFQRDGLFCLHENGCITLRVRRSYNNIFTTSNEEPDPDPVQELTYDLRSQCDAIRVTKTVRPFSMVCCPVNENAAALVVSDGRVMIWELKSAVCNRNSRNSSSGVSPLYSPVSFCGIPVGVLQNKLPDLSLDNMIGQSAIAGEEHPRGSILREVHLKFLLTGLLSGLPAPQFAIRMCPPLTTKNIKMYQPLLAVGTSNGSVLVYHLTSGLLHKELSIHSCEVKGIEWTSLTSFLSFATSTPNNMGLVRNELQLVDLPTGRSIAFRGERGNDESAIEMIKVSHLKQYLAVVFRDKPLELWDVRTCTLLREMSKNFPTITALEWSPSHNLKSLRKKQLATREAMARQTVVSDTELSIVESSVISLLQEAESKSELSQNISAREHFVFTDIDGQVYHLTVEGNSVKDSARIPPDGSMGSITCIAWKGDTLVLGDMDGNLNFWDLKGRVSRGIPTHRSWVRKIRFAPGKGNQKLIAMYNDGAEVWDTKEVQMVSSLRSGRNVTFRILDVDWCTSDKVILASDDGCIRVLEMSMKSACFRMDEQELTEPVWCPYLLVPRASLALKAFLLHQPWNGQYSLDISHVDYPENEEIKNLLQEQLNSLSNDIKKLLLDPEFTLLQRCLLVSRLYGDESELHFWTVAAHYLHSLSQEKSASTTAPKEAAPRDKLSNPLDICYDVLCENAYFQKFQLERVNLQEVKRSTYDHTRKCTDQLLLLGQTDRAVQLLLETSADNQHYYCDSLKACLVTTVTSSGPSQSTIKLVATNMIANGKLAEGVQLLCLIDKAADACRYLQTYGEWNRAAWLAKVRLNPEECADVLRRWVDHLCSPQVNQKSKALLVLLSLGCFFSVAETLHSMRYFDRAALFVEACLKYGAFEVTEDTEKLITAIYADYARSLKNLGFKQGAVLFASKAGAAGKDLLNELESPKEEPIEE

SEQ ID NO: 316 - protein, 159 aa, Homo sapiens
MHQTHAIQRLEVLPSFSNESPTSRETSESWTNQDDIFYAYASMSPGAEHRGTTQLLRFQLAPIKKLEGSLQTHFLLSSLHPRMTFPGRAGGGEAGSRPPRRPWAGILILQLPSTRGGRRSGHGAVRSWGPWKVVAEQPVGGTDPPAHGGRGRPSPNENT

SEQ ID NO: 317 - protein, 634 aa, Homo sapiens
MDKIRHTEADIFKNGSKRMIATVPLRHSIRDRKPSLHFLHSLASSSSLIYRNALLHKSYKLHLQKNKSQKEKHRHSKMKIAYKDTPRNRLSRNAKKCLEDNKLVPISEVSLDPIISSNPLLRWWATSASNDSLLEELNNRFEQITNAWVQVSGDEAENCIHKKREHIENDHFKVASPLETCLLELEVSPVKMLFQKKYDLNELCTWFMQTTETQSLSLVRKANARNPLEVINTRGIKLGTKYSDFNASPFRKHFKKFALSSPSKSAEKLHILHKVANSPLLNVKSNLAIARLKRTEFKRLHHERWKREGKLHNHGTVDWNSKRRNLRFFCQNQFLNKTEGETNADIPLQGKSIVDNQCVLPPEIRGDLQQRVVMPDFKIHASFENKFKSEAKENGTNCSQKDFQKGPRLENVCPNSWRSKTLKDCRIFLRKLNCLEHRNTFKLNTIIYSPESTDSGNTHQTHMEESKRFTLRSHSARQNSFKKQSKEIENANTNNPSADEFADHLGNSKLSKCVNFDKNPDSFEVLSNLNKRKRPPWKITEMSTKRHKRQSCNSGQMANYFSKSLVSKIFGQPNFLAPSMKLVKLGAAKCTSALPHLLICPGFHTNKNIYSRDIEIIFKIYYFNNVDVISFCIW

SEQ ID NO: 318 - protein, 671 aa, Homo sapiens
MAATFQLPGHQEMPLTFQDVAVYFSQAEGRQLGPQQRALYRDVMLENYGNVASLGFPVPKPELISQLEQGKELWVLNLLGAEEPDILKSCQKDSEVGTKKELSILNQKFSEEVKTPEFVSRRLLRDNAQAAEFREAWGREGKLKERVGNSAGQSLNKPNIHKRVLTEATVGRERSLGERTQECSAFDRNLNLDQNVVRLQRNKTGERVFKCDICSKTFKYNSDLSRHQRSHTGEKPYECGRCGRAFTHSSNLVLHHHIHTGNKPFKCDECGKTFGLNSHLRLHRRIHTGEKPFGCGECGKAFSRSSTLIQHRIIHTGEKPYKCNECGRGFSQSPQLTQHQRIHTGEKPHECSHCGKAFSRSSSLIQHERIHTGEKPHKCNQCGKAFSQSSSLFLHHRVHTGEKPYVCNECGRAFGFNSHLTEHVRIHTGEKPYVCNECGKAFRRSSTLVQHRRVHTGEKPYQCVECGKAFSQSSQLTLHQRVHTGEKPYDCGDCGKAFSRRSTLIQHQKVHSGETRKCRKHGPAFVHGSSLTADGQIPTGEKHGRAFNHGANLILRWTVHTGEKSFGCNEYGKAFSPTSRPTEDQIMHAGEKPYKCQECGNAFSGKSTLIQHQVTHTGQKPCHCSVYGKAFSQSSQLTPPQQTRVGEKPALNDGSKRYFIHIKKIFQERHF

SEQ ID NO: 319 - protein, 1539 aa, Homo sapiens
MDSYFKAAVSDLDKLLDDFEQNPDEQDYLQDVQNAYDSNHCSVSSELASSQRTSLLPKDQECVNSCASSETSYGTNESSLNEKTLKGLTSIQNEKNVTGLDLLSSVDGGTSDEIQPLYMGRCSKPICDLISDMGNLVHATNSEEDIKKLLPDDFKSNADSLIGLDLSSVSDTPCVSSTDHDSDTVREQQNDISSELQNREIGGIKELGIKVDTTLSDSYNYSGTENLKDKKIFNQLESIVDFNMSSALTRQSSKMFHAKDKLQHKSQPCGLLKDVGLVKEEVDVAVITAAECLKEEGKTSALTCSLPKNEDLCLNDSNSRDENFKLPDFSFQEDKTVIKQSAQEDSKSLDLKDNDVIQDSSSALHVSSKDVPSSLSCLPASGSMCGSLIESKARGDFLPQHEHKDNIQDAVTIHEEIQNSVVLGGEPFKENDLLKQEKCKSILLQSLIEGMEDRKIDPDQTVIRAESLDGGDTSSTVVESQEGLSGTHVPESSDCCEGFINTFSSNDMDGQDLDYFNIDEGAKSGPLISDAELDAFLTEQYLQTTNIKSFEENVNDSKSQMNQIDMKGLDDGNINNIYFNAEAGAIGESHGINIICEIVDKQNTIENGLSLGEKSTIPVQQGLPTSKSEITNQLSVSDINSQSVGGARPKQLFSLPSRTRSSKDLNKPDVPDTIESEPSTADTVVPITCAIDSTADPQVSFNSNYIDIESNSEGGSSFVTANEDSVPENTCKEGLVLGQKQPTWVPDSEAPNCMNCQVKFTFTKRRHHCRACGKVFCGVCCNRKCKLQYLEKEARVCVVCYETISKAQAFERMMSPTGSNLKSNHSDECTTVQPPQENQTSSIPSPATLPVSALKQPGVEGLCSKEQKRVWFADGILPNGEVADTTKLSSGSKRCSEDFSPLSPDVPMTVNTVDHSHSTTVEKPNNETGDITRNEIIQSPISQVPSVEKLSMNTGNEGLPTSGSFTLDDDVFAETEEPSSPTGVLVNSNLPIASISDYRLLCDINKYVCNKISLLPNDEDSLPPLLVASGEKGSVPVVEEHPSHEQIILLLEGESFHPVTFVLNANLLVNVKFIFYSSDKYWYFSTNGLHGLGQAEIIILLLCLPNEDTIPKDIFRLFITIYKDALKGKYIENLDNITFTESFLSSKDHGGFLFITPTFQKLDDLSLPSNPFLCGILIQKLEIPWAKVFPMRLMLRLGAEYKAYPAPLTSIRGRKPLFGEIGHTIMNLLVDLRNYQYTLHNIDQLLIHMEMGKSCIKIPRKKYSDVMKVLNSSNEHVISIGASFSTEADSHLVCIQNDGIYETQANSATGHPRKVTGASFVVFNGALKTSSGFLAKSSIVEDGLMVQITPETMNGLRLALREQKDFKITCGKVDAVDLREYVDICWVDAEEKGNKGVISSVDGISLQGFPSEKIKLEADFETDEKIVKCTEVFYFLKDQDLSILSTSYQFAKEIAMACSAALCPHLKTLKSNGMNKIGLRVSIDTDMVEFQAGSEGQLLPQHYLNDLDSALIPVIHGGTSNSSLPLEIELVFFIIEHLF

SEQ ID NO: 320 - protein, 809 aa, Homo sapiens
MDSYFKAAVSDLDKLLDDFEQNPDEQDYLQDVQNAYDSNHCSVSSELASSQRTSLLPKDQECVNSCASSETSYGTNESSLNEKTLKGLTSIQNEKNVTGLDLLSSVDGGTSDEIQPLYMGRCSKPICDLISDMGNLVHATNSEEDIKKLLPDDFKSNADSLIGLDLSSVSDTPCVSSTDHDSDTVREQQNDISSELQNREIGGIKELGIKVDTTLSDSYNYSGTENLKDKKIFNQLESIVDFNMSSALTRQSSKMFHAKDKLQHKSQPCGLLKDVGLVKEEVDVAVITAAECLKEEGKTSALTCSLPKNEDLCLNDSNSRDENFKLPDFSFQEDKTVIKQSAQEDSKSLDLKDNDVIQDSSSALHVSSKDVPSSLSCLPASGSMCGSLIESKARGDFLPQHEHKDNIQDAVTIHEEIQNSVVLGGEPFKENDLLKQEKCKSILLQSLIEGMEDRKIDPDQTVIRAESLDGGDTSSTVVESQEGLSGTHVPESSDCCEGFINTFSSNDMDGQDLDYFNIDEGAKSGPLISDAELDAFLTEQYLQTTNIKSFEENVNDSKSQMNQIDMKGLDDGNINNIYFNAEAGAIGESHGINIICEIVDKQNTIENGLSLGEKSTIPVQQGLPTSKSEITNQLSVSDINSQSVGGARPKQLFSLPSRTRSSKDLNKPDVPDTIESEPSTADTVVPITCAIDSTADPQVSFNSNYIDIESNSEGGSSFVTANEDSVPENTCKEGLVLGQKQPTWVPDSEAPNCMNCQVKFTFTKRRHHCRACGKVFCGVCCNRKCKLQYLEKEARVCVVCYETISKGEC

SEQ ID NO: 321 - protein, 208 aa, Homo sapiens
MGAQGAQESIKAMWRVPGTTRRPVTGESPGMHRPEAMLLLLTLALLGGPTWAGKMYGPGGGKYFSTTEDYDHEITGLRVSVGLLLVKSVQVKLGDSWDVKLGALGGNTQEVTLQPGEYITKVFVAFQAFLRGMVMYTSKDRYFYFGKLDGQISSAYPSQEGQVLVGIYGQYQLLGIKSIGFEWNYPLEEPTTEPPVNLTYSANSPVGR

SEQ ID NO: 322 - protein, 55 aa, Homo sapiens
MESPKCLYSRITVNTAFGTKFSHISFIILFKVFLFPRITISKKTKLVTLSNYLNK

SEQ ID NO: 323 - protein, 409 aa, Homo sapiens
MTQKGSMKPVKKKKTEEPELEPLCCCEYIDRNGEKNHVATCLCDCQDLDEGCDRWITCKSLQPETCERIMDTISDRLRIPWLRGAKKVNISIIPPLVLLPVFLHVASWHFLLGVVVLTSLPVLALWYYYLTHRRKEQTLFFLSLGLFSLGYMYYVFLQEVVPKGRVGPVQLAVLTCGLFLILLALHRAKKNPGYLSNPASGDRSLSSSQLECLSRKGQEKTKGFPGADMSGSLNNRTTKDDPKGSSKMPAGSPTKAKEDWCAKCQLVRPARAWHCRICGICVRRMDHHCVWINSCVGESNHQAFILALLIFLLTSVYGITLTLDTICRDRSVFTALFYCPGVYANYSSALSFTCVWYSVIITAGMAYIFLIQLINISYNVTEREVQQALRQKTGRRLLCGLIVDTGLLG

SEQ ID NO: 324 - protein, 2539 aa, Homo sapiens [sequence omitted]

SEQ ID NO: 325 - protein, 2518 aa, Homo sapiens
MNHPFGKEEAASQKQLFGFFCECLRRGEWELAQACVPQLQEGQGDIPKRVEDILQALVVCPNLLRCGQDINPQRVAWVWLLVLEKWLAREKKLLPVVFRRKLEFLLLSEDLQGDIPENILEELYETLTQGAVGHVPDGNPRRESWTPRLSSEAVSVLWDLLRQSPQPAQALLELLLEEDDGTGLCHWPLQNALVDLIRKALRTLRCPAEPLGVELHLLCEELLEACRTEGSPLREERLLSCLLHKASRGLLSLYGHTYAEKVTEKPPRATASGKVSPDHLDPERAMLALFSNPNPAEAWKVAYFYCLSNNKHFLEQILVTALTLLKEEDFPNLGCLLDREFRPLSCLLVLLGWTHCQSLESAKRLLQTLHRTQGPGCDELLRDACDGLWAHLEVLEWCIQQSSNPIPKRDLLYHLHGGDSHSVLYTLHHLTNLPALREEDVLKLLQKVPAKDPQQEPDAVDAPVPEHLSQCQNLTLYQGFCAMKYAIYALCVNSHQHSQCQDCKDSLSEDLASATEPANDSLSSPGAANLFSTYLARCQQYLCSIPDSLCLELLENIFSLLLITSADLHPEPHLPEDYAEDDDIEGKSPSGLRSPSESPQHIAHPERKSERGSLGVPKTLAYTMPSHVKAEPKDSYPGPHRHSFLDLKHFTSGISGFLADEFAIGAFLRLLQEQLDEISSRSPPEKPKQESQSCSGSRDGLQSRLHRLSKVVSEAQWRHKVVTSNHRSEEQPSRRYQPATRHPSLRRGRRTRRSQADGRDRGSNPSLESTSSELSTSTSEGSLSAMSGRNELHSRLHPHPQSSLIPMMFSPPESLLASCILRGNFAEAHQVLFTFNLKSSPSSGELMFMERYQEVIQELAQVEHKIENQNSDAGSSTIRRTGSGRSTLQAIGSAAAAGMVFYSISDVTDKLLNTSGDPIPMLQEDFWISTALVEPTAPLREVLEDLSPPAMAAFDLACSQCQLWKTCKQLLETAERRLNSSLERRGRRIDHVLLNADGIRGFPVVLQQISKSLNYLLMSASQTKSESVEEKGGGPPRCSITELLQMCWPSLSEDCVASHTTLSQQLDQVLQSLREALELPEPRTPPLSSLVEQAAQKAPEAEAHPVQIQTQLLQKNLGKQTPSGSRQMDYLGTFFSYCSTLAAVLLQSLSSEPDHVEVKVGNPFVLLQQSSSQLVSHLLFERQVPPERLAALLAQENLSLSVPQVIVSCCCEPLALCSSRQSQQTSSLLTRLGTLAQLHASHCLDDLPLSTPSSPRTTENPTLERKPYSSPRDSSLPALTSSALAFLKSRSKLLATVACLGASPRLKVSKPSLSWKELRGRREVPLAAEQVARECERLLEQFPLFEAFLLAAWEPLRGSLQQGQSLAVNLCGWASLSTVLLGLHSPIALDVLSEAFEESLVARDWSRALQLTEVYGRDVDDLSSIKDAVLSCAVACDKEGWQYLFPVKDASLRSRLALQFVDRWPLESCLEILAYCISDTAVQEGLKCELQRKLAELQVYQKILGLQSPPVWCDWQTLRSCCVEDPSTVMNMILEAQEYELCEEWGCLYPIPREHLISLHQKHLLHLLERRDHDKALQLLRRIPDPTMCLEVTEQSLDQHTSLATSHFLANYLTTHFYGQLTAVRHREIQALYVGSKILLTLPEQHRASYSHLSSNPLFMLEQLLMNMKVDWATVAVQTLQQLLVGQEIGFTMDEVDSLLSRYAEKALDFPYPQREKRSDSVIHLQEIVHQAADPETLPRSPSAEFSPAAPPGISSIHSPSLRERSFPPTQPSQEFVPPATPPARHQWVPDETESICMVCCREHFTMFNRRHHCRRCGRLVCSSCSTKKMVVEGCRENPARVCDQCYSYCNKDVPEEPSEKPEALDSSKSESPPYSFVVRVPKADEVEWILDLKEEENELVRSEFYYEQAPSASLCIAILNLHRDSIACGHQLIEHCCRLSKGLTNPEVDAGLLTDIMKQLLFSAKMMFVKAGQSQDLALCDSYISKVDVLNILVAAAYRHVPSLDQILQPAAVTRLRNQLLEAEYYQLGVEVSTKTGLDTTGAWHAWGMACLKAGNLTAAREKFSRCLKPPFDLNQLNHGSRLVQDVVEYLESTVRPFVSLQDDDYFATLRELEATLRTQSLSLAVIPEGKIMNNTYYQECLFYLHNYSTNLAIISFYVRHSCLREALLHLLNKESPPEVFIEGIFQPSYKSGKLHTLENLLESIDPTLESWGKYLIAACQHLQKKNYYHILYELQQFMKDQVRAAMTCIRFFSHKAKSYTELGEKLSWLLKAKDHLKIYLQETSRSSGRKKTTFFRKKMTAADVSRHMNTLQLQMEVTRFLHRCESAGTSQITTLPLPTLFGNNHMKMDVACKVMLGGKNVEDGFGIAFRVLQDFQLDAAMTYCRAARQLVEKEKYSEIQQLLKCVSESGMAAKSDGDTILLNCLEAFKRIPPQELEGLIQAIHNDDNKVRAYLICCKLRSAYLIAVKQEHSRATALVQQVQQAAKSSGDAVVQDICAQWLLTSHPRGAHGPGSRK

SEQ ID NO: 326 - protein, 791 aa, Homo sapiens
MNHPFGKEEAASQKQLFGFFCECLRRGEWELAQACVPQLQEGQGDIPKRVEDILQALVVCPNLLRCGQDINPQRVAWVWLLVLEKWLAREKKLLPVVFRRKLEFLLLSEDLQGDIPENILEELYETLTQGAVGHVPDGNPRRESWTPRLSSEAVSVLWDLLRQSPQPAQALLELLLEEDDGTGLCHWPLQNALVDLIRKALRALQGPDSVPPGVVDAIYGALRTLRCPAEPLGVELHLLCEELLEACRTEGSPLREERLLSCLLHKASRGLLSLYGHTYAEKVTEKPPRATASGKVSPDHLDPERAMLALFSNPNPAEAWKVAYFYCLSNNKHFLEQILVTALTLLKEEDFPNLGCLLDREFRPLSCLLVLLGWTHCQSLESAKRLLQTLHRTQGPGCDELLRDACDGLWAHLEVLEWCIQQSSNPIPKRDLLYHLHGGDSHSVLYTLHHLTNLPALREEDVLKLLQKVPAKDPQQEPDAVDAPVPEHLSQCQNLTLYQGFCAMKYAIYALCVNSHQHSQCQDCKDSLSEDLASATEPANDSLSSPGAANLFSTYLARCQQYLCSIPDSLCLELLENIFSLLLITSADLHPEPHLPEDYAEDDDIEGKSPSGLRSPSESPQHIAHPERKSERGSLGVPKTLAYTMPSHVKAEPKDSYPGPHRHSFLDLKHFTSGISGFLADEFAIGAFLRLLQEQLDEISSRSPPEKPKQESQSCSGSRDGLQSRLHRLSKVVSEAQWRHKVVTSNHRSEEQPSRRYQPATRHPSLRRGRRTRRSQAGNLKSSFPCTRQVV

SEQ ID NO: 327 - protein, 688 aa, Homo sapiens [sequence omitted]

SEQ ID NO: 328 - protein, 2481 aa, Homo sapiens [sequence omitted]

SEQ ID NO: 329 - protein, 747 aa, Homo sapiens
MGRLNEQRLFQPDLCDVDLVLVPQRSVFPAHKGVLAAYSQFFHSLFTQNKQLQRVELSLEALAPGGLQQILNFIYTSKLLVNAANVHEVLSAASLLQMADIAASCQELLDARSLGPPGPGTVALAQPAASCTPAAPPYYCDIKQEADTPGLPKIYAREGPDPYSVRVEDGAGTAGGTVPATIGPAQPFFKEEKEGGVEEAGGPPASLCKLEGGEELEEELGGSGTYSRREQSQIIVEVNLNNQTLHVSTGPEGKPGAGPSPATVVLGREDGLQRHSDEEEEDDEEEEEEEEEEEGGGSGREEEEEEEGGSQGEEEEEEEDGHSEQEEEEEEEEEEGPSEQDQESSEEEEGEEGEAGGKQGPRGSRSSRADPPPHSHMATRSRENARRRGTPEPEEAGRRGGKRPKPPPGVASASARGPPATDGLGAKVKLEEKQHHPCQKCPRVFNNRWYLEKHMNVTHSRMQICDQCGKRFLLESELLLHRQTDCERNIQCVTCGKAFKKLWSLHEHNKIVHGYAEKKFSCEICEKKFYTMAHVRKHMVAHTKDMPFTCETCGKSFKRSMSLKVHSLQHSGEKPFRCENCNERFQYKYQLRSHMSIHIGHKQFMCQWCGKDFNMKQYFDEHMKTHTGEKPYICEICGKSFTSRPNMKRHRRTHTGEKPYPCDVCGQRFRFSNMLKAHKEKCFRVSHTLAGDGVPAAPGLPPTQPQAHALPLLPGLPQTLPPPPHLPPPPPLFPTTASPGGRMNANN

SEQ ID NO: 330 - protein, 646 aa, Homo sapiens
MGRLNEQRLFQPDLCDVDLVLVPQRSVFPAHKGVLAAYSQFFHSLFTQNKQLQRVELSLEALAPGGLQQILNFIYTSKLLVNAANVHEVLSAASLLQMADIAASCQELLDARSLGPPGPGTVALAQPAASCTPAAPPYYCDIKQEADTPGLPKIYAREGPDPYSVRVEDGAGTAGGTVPATIGPAQPFFKEEKEGGVEEAGGPPASLCKLEGGEELEEELGGSGTYSRREQSQIIVEVNLNNQTLHVSTGPEGKPGAGPSPATVVLGREDGLQRHSDEEEEDDEEEEEEEEEEEGGGSGREEEEEEEGGSQGEEEEEEEDGHSEQEEEEEEKQHHPCQKCPRVFNNRWYLEKHMNVTHSRMQICDQCGKRFLLESELLLHRQTDCERNIQCVTCGKAFKKLWSLHEHNKIVHGYAEKKFSCEICEKKFYTMAHVRKHMVAHTKDMPFTCETCGKSFKRSMSLKVHSLQHSGEKPFRCENCNERFQYKYQLRSHMSIHIGHKQFMCQWCGKDFNMKQYFDEHMKTHTGEKPYICEICGKSFTSRPNMKRHRRTHTGEKPYPCDVCGQRFRFSNMLKAHKEKCFRVSHTLAGDGVPAAPGLPPTQPQAHALPLLPGLPQTLPPPPHLPPPPPLFPTTASPGGRMNANN

SEQ ID NO: 331 - protein, 677 aa, Homo sapiens
MDFPGHFEQIFQQLNYQRLHGQLCDCVIVVGNRHFKAHRSVLAACSTHFRALFSVAEGDQTMNMIQLDSEVVTAEAFAALIDMMYTSTLMLGESNVMDVLLAASHLHLNSVVKACKHYLTTRTLPMSPPSERVQEQSARMQRSFMLQQLGLSIVSSALNSSQNGEEQPAPMSSSMRSNLDQRTPFPMRRLHKRKQSAEERARQRLRPSIDESAISDVTPENGPSGVHSREEFFSPDSLKIVDNPKADGMTDNQEDSAIMFDQSFGTQEDAQVPSQSDNSAGNMAQLSMASRATQVETSFDQEAAPEKSSFQCENPEVGLGEKEHMRVVVKSEPLSSPEPQDEVSDVTSQAEGSESVEVEGVVVSAEKIDLSPESSDRSFSDPQSSTDRVGDIHILEVTNNLEHKSTFSISNFLNKSRGNNFTANQNNDDNIPNTTSDCRLESEAPYLLSPEAGPAGGPSSAPGSHVENPFSEPADSHFVRPMQEVMGLPCVQTSGYQGGEQFGMDFSRSGLGLHSSFSRVMIGSPRGGASNFPYYRRIAPKMPVVTSVRSSQIPENSTSSQLMMNGATSSFENGHPSQPGPPQLTRASADVLSKCKKALSEHNVLVVEGARKYACKICCKTFLTLTDCKKHIRVHTGEKPYACLKCGKRFSQSSHLYKHSKTTCLRWQSSNLPSTLL

SEQ ID NO: 332 - protein, 715 aa, Homo sapiens
MPAESGKRFKPSKYVPVSAAAIFLVGATTLFFAFTCPGLSLYVSPAVPIYNAIMFLFVLANFSMATFMDPGIFPRAEEDEDKEDDFRAPLYKTVEIKGIQVRMKWCATCRFYRPPRCSHCSVCDNCVEEFDHHCPWVNNCIGRRNYRYFFLFLLSLTAHIMGVFGFGLLYVLYHIEELSGVRTAVTMAVMCVAGLFFIPVAGLTGFHVVLVARGRTTNEQVTGKFRGGVNPFTNGCCNNVSRVLCSSPAPRYLGRPKKEKTIVIRPPFLRPEVSDGQITVKIMDNGIQGELRRTKSKGSLEITESQSADAEPPPPPKPDLSRYTGLRTHLGLATNEDSSLLAKDSPPTPTMYKYRPGYSSSSTSAAMPHSSSAKLSRGDSLKEPTSIAESSRHPSYRSEPSLEPESFRSPTFGKSFHFDPLSSGSRSSSLKSAQGTGFELGQLQSIRSEGTTSTSYKSLANQTRNGSLSYDSLLTPSDSPDFESVQAGPEPDPPLGYTSPFLSARLAQQREAERHPRLVPTGPTHREPSPVRYDNLSRHIVASLQEREKLLRQSPPLPGREEEPGLGDSGIQSTPGSGHAPRTSSSSDDSKRSPLGKTPLGRPAVPRFGKPDGLRGRGVGSPEPGPTAPYLGRSMSYSSQKAQPGVSETEEVALQPLLTPKDEVQLKTTYSKSNGQPKSLGSASPGPGQPPLSSPTRGGVKKVSGVGGTTYEISV

SEQ ID NO: 333 - protein, 662 aa, Homo sapiens
MFLFVLANFSMATFMDPGIFPRAEEDEDKEDDFRAPLYKTVEIKGIQVRMKWCATCRFYRPPRCSHCSVCDNCVEEFDHHCPWVNNCIGRRNYRYFFLFLLSLTAHIMGVFGFGLLYVLYHIEELSGVRTAVTMAVMCVAGLFFIPVAGLTGFHVVLVARGRTTNEQVTGKFRGGVNPFTNGCCNNVSRVLCSSPAPRYLGRPKKEKTIVIRPPFLRPEVSDGQITVKIMDNGIQGELRRTKSKGSLEITESQSADAEPPPPPKPDLSRYTGLRTHLGLATNEDSSLLAKDSPPTPTMYKYRPGYSSSSTSAAMPHSSSAKLSRGDSLKEPTSIAESSRHPSYRSEPSLEPESFRSPTFGKSFHFDPLSSGSRSSSLKSAQGTGFELGQLQSIRSEGTTSTSYKSLANQTRNGSLSYDSLLTPSDSPDFESVQAGPEPDPPLGYTSPFLSARLAQQREAERHPRLVPTGPTHREPSPVRYDNLSRHIVASLQEREKLLRQSPPLPGREEEPGLGDSGIQSTPGSGHAPRTSSSSDDSKRSPLGKTPLGRPAVPRFGKPDGLRGRGVGSPEPGPTAPYLGRSMSYSSQKAQPGVSETEEVALQPLLTPKDEVQLKTTYSKSNGQPKSLGSASPGPGQPPLSSPTRGGVKKVSGVGGTTYEISV

SEQ ID NO: 334 - protein, 177 aa, Homo sapiens
MSHSRRAAPTQDQCHTPGFPTSRETSGSIWQARICGSLQALDTWRTHIPRKSPAPTQASQICLLLPESPWRNPTPRGFLKPLINWDAILYFKEKRNIQVTTQAHPQNQASCSSQEVATPGLVPQAAAPKVYERSHDNLNAEAQGLAGAQVSKPQNPITRLCSLKEQSILKIFTKQSI

SEQ ID NO: 335 - protein, 642 aa, Homo sapiens
MEEERKTAELQKNRIQDSVVFEDVAVDFTQEEWALLDLAQRNLYRDVMLENFQNLASLGYPLHTPHLISQWEQEEDLQTVKRELIQGIFMGEHREGFETQLKTNESVASQDICGEKISNEQKIVRFKRNDSWFSSLHENQESCGIDYQNKSHERHLRNHMVENIYECYEENQDGQTFSQVPNLDSLKRNTEVKSCECHECGKAFVDHSSLKSHIRSHTGSKPYQCKECGKAFHFLACFKKHMKTPTEEKPYECKECTKAFSCSSFFRAHMKIHIGKTNYECKECGKGFSCSSSLTEHKRIHSGDKPYECKECGKAFSCSSSLSKHKRIHSGDKPYECKECGKAFSSSSHLIIHIRIHTGEKPYECKECGKAFSESSKLTVHGRTHTGEKPYKCKECGKAYNCPSSLSIHMRKHTGEKPYECLECGKAFYLPTSLNTHVKNQSREKPYECKECGKAFSCPSSFRAHVRDHTGKIQYECKECGKTFSRSSSLTEHLRTHSGEKPYECKECGKAFISSSHLTVHIRTHTGEKPYECKKCGKAFIYPSALRIHMRTHTGEKPYECKECGKAFRHSSYLTVHARMHTGEKPFECLECGKAFSCPSSFRRHVRSHTGEKPYECKECGKAFVCPAYFRRHVKTHTRENI

SEQ ID NO: 336 - protein, 522 aa, Homo sapiens
MALPQGLLTFRDVAIEFSQEEWKCLDPAQRTLYRDVMLENYRNLVSLDISSKCMLKTLSSTGQGNTEVIHTGTLHRQASHHIGEFCFHEIEKDIHGFEFQWKEDETNGHAAPMTEIKELAGSTGQHDQRHAGNKRIKDQLGSSFHLHLPEPHIFQSEGKIGNQVEKSINNASSVSTSQRICCRPKTHISNKYGNNSLHSSLLTQKWEVHMREKSFECIQSFKSFNCSSLLKKHQIIHLEEKQCKCDVCGKVFNQKRYLACHRRCHTGEKPYKCNECGKTFGHNSSLFIHKALHTGEKPYECEECDKVFSRKSHLERHKRIHTGEKPYKCKVCDEAFAYNSYLAKHTILHTGEKPYTCNECGKVFNRLSTLARHHRLHTGEKPYKCEECDKVFSRKSHLERHRRIHSGEKPYKCEECCKVFSRKSNLERHRRIHTGEKPYKCKVCDKAFQRDSHLAQHQRVHTGEKPYKCNECGKTFGQTSSLIIHRRLHTGEKPYKCNECGKTFSQMSSLVYHHRLHSGEKP

SEQ ID NO: 337 - protein, 469 aa, Homo sapiens
MLKTLSSTGQGNTEVIHTGTLHRQASHHIGEFCFHEIEKDIHGFEFQWKEDETNGHAAPMTEIKELAGSTGQHDQRHAGNKRIKDQLGSSFHLHLPEPHIFQSEGKIGNQVEKSINNASSVSTSQRICCRPKTHISNKYGNNSLHSSLLTQKWEVHMREKSFECIQSFKSFNCSSLLKKHQIIHLEEKQCKCDVCGKVFNQKRYLACHRRCHTGEKPYKCNECGKTFGHNSSLFIHKALHTGEKPYECEECDKVFSRKSHLERHKRIHTGEKPYKCKVCDEAFAYNSYLAKHTILHTGEKPYTCNECGKVFNRLSTLARHHRLHTGEKPYKCEECDKVFSRKSHLERHRRIHSGEKPYKCEECCKVFSRKSNLERHRRIHTGEKPYKCKVCDKAFQRDSHLAQHQRVHTGEKPYKCNECGKTFGQTSSLIIHRRLHTGEKPYKCNECGKTFSQMSSLVYHHRLHSGEKP

SEQ ID NO: 338 - protein, 645 aa, Homo sapiens
MNASSEGESFAGSVQIPGGTTVLVELTPDIHICGICKQQFNNLDAFVAHKQSGCQLTGTSAAAPSTVQFVSEETVPATQTQTTTRTITSETQTITVSAPEFVFEHGYQTYLPTESNENQTATVISLPAKSRTKKPTTPPAQKRLNCCYPGCQFKTAYGMKDMERHLKIHTGDKPHKCEVCGKCFSRKDKLKTHMRCHTGVKPYKCKTCDYAAADSSSLNKHLRIHSDERPFKCQICPYASRNSSQLTVHLRSHTASELDDDVPKANCLSTESTDTPKAPVITLPSEAREQMATLGERTFNCCYPGCHFKTVHGMKDLDRHLRIHTGDKPHKCEFCDKCFSRKDNLTMHMRCHTSVKPHKCHLCDYAAVDSSSLKKHLRIHSDERPYKCQLCPYASRNSSQLTVHLRSHTGDTPFQCWLCSAKFKISSDLKRHMIVHSGEKPFKCEFCDVRCTMKANLKSHIRIKHTFKCLHCAFQGRDRADLLEHSRLHQADHPEKCPECSYSCSSAAALRVHSRVHCKDRPFKCDFCSFDTKRPSSLAKHVDKVHRDEAKTENRAPLGKEGLREGSSQHVAKIVTQRAFRCETCGASFVRDDSLRCHKKQHSDQSENKNSDLVTFPPESGASGQLSTLVSVGQLEAPLEPSQDL

SEQ ID NO: 339 - protein, 426 aa, Homo sapiens
MSRRKQAKPQHLNSEEPRPARRECAEVAPQVAGEPASELDDDVPKANCLSTESTDTPKAPVITLPSEAREQMATLGERTFNCCYPGCHFKTVHGMKDLDRHLRIHTGDKPHKCEFCDKCFSRKDNLTMHMRCHTSVKPHKCHLCDYAAVDSSSLKKHLRIHSDERPYKCQLCPYASRNSSQLTVHLRSHTGDTPFQCWLCSAKFKISSDLKRHMIVHSGEKPFKCEFCDVRCTMKANLKSHIRIKHTFKCLHCAFQGRDRADLLEHSRLHQADHPEKCPECSYSCSSAAALRVHSRVHCKDRPFKCDFCSFDTKRPSSLAKHVDKVHRDEAKTENRAPLGKEGLREGSSQHVAKIVTQRAFRCETCGASFVRDDSLRCHKKQHSDQSENKNSDLVTFPPESGASGQLSTLVSVGQLEAPLEPSQDL

SEQ ID NO: 340 - protein, 415 aa, Homo sapiens
MNASSEGESFAGSVQIPGGTTVLVELTPDIHICGICKQQFNNLDAFVAHKQSGCQLTGTSAAAPSTVQFVSEETVPATQTQTTTRTITSETQTITVSAPEFVFEHGYQTYLPTESNENQTATVISLPAKSRTKKPTTPPAQKRLNCCYPGCQFKTAYGMKDMERHLKIHTGDKPHKCEVCGKCFSRKDKLKTHMRCHTGVKPYKCKTCDYAAADSSSLNKHLRIHSDERPFKCQICPYASRNSSQLTVHLRSHTASELDDDVPKANCLSTESTDTPKAPVITLPSEAREQMATLGERTFNCCYPGCHFKTVHGMKDLDRHLRIHTGDKPHKCEFCDKCFSRKDNLTMHMRCHTSVKPHKCHLCDYAAVDSSSLKKHLRIHSDERPYKCQLCPYASRNSSQLTVHLRSHTGCCYVA

SEQ ID NO: 341 - protein, 679 aa, Homo sapiens
MNASSEGESFAGSVQSGTTVLVELTPDIHICGICKQQFNNLDAFVAHKQSGCQLTGTSAAAPSTVQFVSEETVPATQTQTTTRTITSETQTITVSAPEFVFEHGYQTYLPTESNENQTATVISLPAKSRTKKPTTPPAQKRLNCCYPGCQFKTAYGMKDMERHLKIHTGDKPHKCEVCGKCFSRKDKLKTHMRCHTGVKPYKCKTCDYAAADSSSLNKHLRIHSDERPFKCQICPYASRNSSQLTVHLRSHTGDAPFQCWLCSAKFKISSDLKRHMRVHSGEKPFKCEFCNVRCTMKGNLKSHIRIKHSGNNFKCPHCDFLGDSKATLRKHSRVHQSEHPEKCSECSYSCSSKAALRIHERIHCTDRPFKCNYCSFDTKQPSNLSKHMKKFHGDMVKTEALERKDTGRQSSRQVAKLDAKKSFHCDICDASFMREDSLRSHKRQHSEYSESKNSDVTVLQFQIDPSKQPATPLTVGHLQVPLQPSQVPQFSEGRVKIIVGHQVPQANTIVQAAAAAVNIVPPALVAQNPEELPGNSRLQILRQVSLIAPPQSSRCPSEAGAMTQPAVLLTTHEQTDGATLHQTLIPTASGGPQEGSGNQTFITSSGITCTDFEGLNALIQEGTAEVTVVSDGGQNIAVATTAPPVFSSSSQQELPKQTYSIIQGAAHPALLCPADSIPD

SEQ ID NO: 342 - protein, 681 aa, Homo sapiens
MNASSEGESFAGSVQIPGGTTVLVELTPDIHICGICKQQFNNLDAFVAHKQSGCQLTGTSAAAPSTVQFVSEETVPATQTQTTTRTITSETQTITVSAPEFVFEHGYQTYLPTESNENQTATVISLPAKSRTKKPTTPPAQKRLNCCYPGCQFKTAYGMKDMERHLKIHTGDKPHKCEVCGKCFSRKDKLKTHMRCHTGVKPYKCKTCDYAAADSSSLNKHLRIHSDERPFKCQICPYASRNSSQLTVHLRSHTGDAPFQCWLCSAKFKISSDLKRHMRVHSGEKPFKCEFCNVRCTMKGNLKSHIRIKHSGNNFKCPHCDFLGDSKATLRKHSRVHQSEHPEKCSECSYSCSSKAALRIHERIHCTDRPFKCNYCSFDTKQPSNLSKHMKKFHGDMVKTEALERKDTGRQSSRQVAKLDAKKSFHCDICDASFMREDSLRSHKRQHSEYSESKNSDVTVLQFQIDPSKQPATPLTVGHLQVPLQPSQVPQFSEGRVKIIVGHQVPQANTIVQAAAAAVNIVPPALVAQNPEELPGNSRLQILRQVSLIAPPQSSRCPSEAGAMTQPAVLLTTHEQTDGATLHQTLIPTASGGPQEGSGNQTFITSSGITCTDFEGLNALIQEGTAEVTVVSDGGQNIAVATTAPPVFSSSSQQELPKQTYSIIQGAAHPALLCPADSIPD

SEQ ID NO: 343 - protein, 627 aa, Homo sapiens
MNASSEGESFAGSVQIPGGTTVLVELTPDIHICGICKQQFNNLDAFVAHKQSGCQLTGTSAAAPSTVQFVSEETVPATQTQTTTRTITSETQTITGCQFKTAYGMKDMERHLKIHTGDKPHKCEVCGKCFSRKDKLKTHMRCHTGVKPYKCKTCDYAAADSSSLNKHLRIHSDERPFKCQICPYASRNSSQLTVHLRSHTGDAPFQCWLCSAKFKISSDLKRHMRVHSGEKPFKCEFCNVRCTMKGNLKSHIRIKHSGNNFKCPHCDFLGDSKATLRKHSRVHQSEHPEKCSECSYSCSSKAALRIHERIHCTDRPFKCNYCSFDTKQPSNLSKHMKKFHGDMVKTEALERKDTGRQSSRQVAKLDAKKSFHCDICDASFMREDSLRSHKRQHSEYSESKNSDVTVLQFQIDPSKQPATPLTVGHLQVPLQPSQVPQFSEGRVKIIVGHQVPQANTIVQAAAAAVNIVPPALVAQNPEELPGNSRLQILRQVSLIAPPQSSRCPSEAGAMTQPAVLLTTHEQTDGATLHQTLIPTASGGPQEGSGNQTFITSSGITCTDFEGLNALIQEGTAEVTVVSDGGQNIAVATTAPPVFSSSSQQELPKQTYSIIQGAAHPALLCPADSIPD

SEQ ID NO: 344 - protein, 644 aa, Homo sapiens
MTSQSSVISNSCVTMERLSHMMERKAWCSQESALSEEEEDTTRPLETVTFKDVAVDLTQEEWEQMKPAQRNLYRDVMLENYSNLVTVGCQVTKPDVIFKLEQEEEPWVMEEEMFGRHCPEVWEVDEQIKKQQETLVRKVTSISKKILIKEKVIECKKVAKIFPLSSDIVTSRQSFYDCDSLDKGLEHNLDLLRYEKGCVREKQSNEFGKPFYHCASYVVTPFKCNQCGQDFSHKFDLIRHERIHAGEKPYECKECGKAFSRKENLITHQKIHTGEKPYKCNECGKAFIQMSNLIRHHRIHTGEKPYACKDCWKAFSQKSNLIEHERIHTGEKPYECKECGKSFSQKQNLIEHEKIHTGEKPYACNECGRAFSRMSSVTLHMRSHTGEKPYKCNKCGKAFSQCSVFIIHMRSHTGEKPYVCSECGKAFSQSSSLTVHMRNHTAEKPYECKECGKAFSRKENLITHQKIHTGEKPYECSECGKAFIQMSNLIRHQRIHTGEKPYACTVCGKAFSQKSNLTEHEKIHTGEKPYHCNQCGKAFSQRQNLLEHEKIHTGEKPFKCNECGKAFSRISSLTLHVRSHTGEKPYECNKCGKAFSQCSLLIIHMRSHTGEKPFECNECGKAFSQRASLSIHKRGHTGERHQVY

SEQ ID NO: 345 - protein, 580 aa, Homo sapiens
MKPAQRNLYRDVMLENYSNLVTVGCQVTKPDVIFKLEQEEEPWVMEEEMFGRHCPEVWEVDEQIKKQQETLVRKVTSISKKILIKEKVIECKKVAKIFPLSSDIVTSRQSFYDCDSLDKGLEHNLDLLRYEKGCVREKQSNEFGKPFYHCASYVVTPFKCNQCGQDFSHKFDLIRHERIHAGEKPYECKECGKAFSRKENLITHQKIHTGEKPYKCNECGKAFIQMSNLIRHHRIHTGEKPYACKDCWKAFSQKSNLIEHERIHTGEKPYECKECGKSFSQKQNLIEHEKIHTGEKPYACNECGRAFSRMSSVTLHMRSHTGEKPYKCNKCGKAFSQCSVFIIHMRSHTGEKPYVCSECGKAFSQSSSLTVHMRNHTAEKPYECKECGKAFSRKENLITHQKIHTGEKPYECSECGKAFIQMSNLIRHQRIHTGEKPYACTVCGKAFSQKSNLTEHEKIHTGEKPYHCNQCGKAFSQRQNLLEHEKIHTGEKPFKCNECGKAFSRISSLTLHVRSHTGEKPYECNKCGKAFSQCSLLIIHMRSHTGEKPFECNECGKAFSQRASLSIHKRGHTGERHQVY

SEQ ID NO: 346 - protein, 571 aa, Homo sapiens
MKPAQRNLYRDVMLENYSNLVTVGCQVTKPDVIFKLEQEEEPWVMEEEMFGRHCPEPRRGENCCASEVMAEGLKFKDVVIYFSQKEWECLHSAQKDLYRDVMLENYGNLVLLGLSDTKPNVISLLEQKKEPWMVKRKETKEWCPDWEFGRETKNLSPKENIYEIRSPQQEKARVIREIRCQVERQQGHQEGHFRPAVIPFTSMQCTAHREYQWLHTGEKSCECRKCKNAFRYQSCPIQHEIIHNKEKEPECGECRKIFNSGSDLIKHQTLHESKKHSENNKCAFNHDSGITQPQSINTGEKPHKCKECGKAFRSSSQISQHQRMHLGEKPYKCRECGKAFPSTAQLNLHQRIHTDEKYYESKACGKAFTRPSHLFRHQRIHTGEKPHKCKECGKAFRYDTQLSLHQIIHTGERRYECRECGKVYSCASQLSLHQRIHTGEKPHECKECGKAFISDSHLIRHQSVHTGEKPCKCKECGKSFRRGSELTRHQRAHTGEKPYECKECEKAFTCSTELVRHQKVHTGERPHKCKECGKAFIRRSELTHHERSHTGEKPYECKECGKPFGGGSELS

SEQ ID NO: 347 - protein, 393 aa, Homo sapiens
MSDEREVAEAATGEDASSPPPKTEAASDPQHPAASEGAAAAAASPPLLRCLVLTGFGGYDKVKLQSRPAAPPAPGPGQLTLRLRACGLNFADLMARQGLYDRLPPLPVTPGMEGAGVVIAVGEGVSDRKAGDRVMVLNRSGMWQEEVTVPSVQTFLIPEAMTFEEAAALLVNYITAYMVLFDFGNLQPGHSVLVHMAAGGVGMAAVQLCRTVENVTVFGTASASKHEALKENGVTHPIDYHTTDYVDEIKKISPKGVDIVMDPLGGSDTAKGYNLLKPMGKVVTYGMANLLTGPKRNLMALARTWWNQFSVTALQLLQANRAVCGFHLGYLDGEVELVSGVVARLLALYNQGHIKPHIDSVWPFEKVADAMKQMQEKKNVGKVLLVPGPEKEN

SEQ ID NO: 348 - protein, 259 aa, Homo sapiens
MVLNRSGMWQEEVTVPSVQTFLIPEAMTFEEAAALLVNYITAYMVLFDFGNLQPGHSVLVHMAAGGVGMAAVQLCRTVENVTVFGTASASKHEALKENGVTHPIDYHTTDYVDEIKKISPKGVDIVMDPLGGSDTAKGYNLLKPMGKVVTYGMANLLTGPKRNLMALARTWWNQFSVTALQLLQANRAVCGFHLGYLDGEVELVSGVVARLLALYNQGHIKPHIDSVWPFEKVADAMKQMQEKKNVGKVLLVPGPEKEN

SEQ ID NO: 349 - protein, 325 aa, Homo sapiens
MSDEREVAEAATGEDASSPPPKTEAASDPQHPAASEGAAAAAASPPLLRCLVLTGFGGYDKAGDRVMVLNRSGMWQEEVTVPSVQTFLIPEAMTFEEAAALLVNYITAYMVLFDFGNLQPGHSVLVHMAAGGVGMAAVQLCRTVENVTVFGTASASKHEALKENGVTHPIDYHTTDYVDEIKKISPKGVDIVMDPLGGSDTAKGYNLLKPMGKVVTYGMANLLTGPKRNLMALARTWWNQFSVTALQLLQANRAVCGFHLGYLDGEVELVSGVVARLLALYNQGHIKPHIDSVWPFEKVADAMKQMQEKKNVGKVLLVPGPEKEN

SEQ ID NO: 350 - protein, 582 aa, Homo sapiens
MDFEDDYTHSACRNTYQGFNGMDRDYGPGSYGGMDRDYGHGSYGGQRSMDSYLNQSYGMDNHSGGGGGSRFGPYESYDSRSSLGGRDLYRSGYGFNEPEQSRFGGSYGGRFESSYRNSLDSFGGRNQGGSSWEAPYSRSKLRPGFMEDRGRENYSSYSSFSSPHMKPAPVGSRGRGTPAYPESTFGSRNYDAFGGPSTGRGRGRGHMGDFGSIHRPGIVVDYQNKSTNVTVAAARGIKRKMMQPFNKPSGTFIKKPKLAKPMEKISLSKSPTKTDPKNEEEEKRRIEARREKQRRRREKNSEKYGDGYRMAFTCSFCKFRTFEEKDIELHLESSSHQETLDHIQKQTKFDKVVMEFLHECMVNKFKKTSIRKQQTNNQTEVVKIIEKDVMEGVTVDDHMMKVETVHCSACSVYIPALHSSVQQHLKSPDHIKGKQAYKEQIKRESVLTATSILNNPIVKARYERFVKGENPFEIQDHSQDQQIEGDEEDEEKIDEPIEEEEDEDEEEEAEEVGEVEEVEEVEEVREGGIEGEGNIQGVGEGGEVGVVGEVEGVGEVEEVEELEEETAKEEPADFPVEQPEEN

SEQ ID NO: 351 - protein, 70 aa, Homo sapiens
MDFEDDYTHSACRNTYQGFNGMDRDYGPGSYGGMDRDYGHGSYGGQRSMDSYLNQSYGMDNHSGGGGGSR

SEQ ID NO: 352 - protein, 376 aa, Homo sapiens
MGDFGSIHRPGIVVDYQNKSTNVTVAAARGIKRKMMQPFNKPSGTFIKKPKLAKPMEKISLSKSPTKTDPKNEEEEKRRIEARREKQRRRREKNSEKYGDGYRMAFTCSFCKFRTFEEKDIELHLESSSHQETLDHIQKQTKFDKVVMEFLHECMVNKFKKTSIRKQQTNNQTEVVKIIEKDVMEGVTVDDHMMKVETVHCSACSVYIPALHSSVQQHLKSPDHIKGKQAYKEQIKRESVLTATSILNNPIVKARYERFVKGENPFEIQDHSQDQQIEGDEEDEEKIDEPIEEEEDEDEEEEAEEVGEVEEVEEVEEVREGGIEGEGNIQGVGEGGEVGVVGEVEGVGEVEEVEELEEETAKEEPADFPVEQPEEN

SEQ ID NO: 353 - protein, 742 aa, Homo sapiens
MPCCSHRSCREDPGTSESREMDPVAFEDVAVNFTQEEWTLLDISQKNLFREVMLETFRNLTSIGKKWSDQNIEYEYQNPRRSFRSLIEEKVNEIKEDSHCGETFTQVPDDRLNFQEKKASPEVKSCDSFVCAEVGIGNSSFNMSIRGDTGHKAYEYQEYGPKPYKCQQPKNKKAFRYRPSIRTQERDHTGEKPYACKVCGKTFIFHSSIRRHMVMHSGDGTYKCKFCGKAFHSFSLYLIHERTHTGEKPYECKQCGKSFTYSATLQIHERTHTGEKPYECSKCDKAFHSSSSYHRHERSHMGEKPYQCKECGKAFAYTSSLRRHERTHSGKKPYECKQYGEGLSYLISFQTHIRMNSGERPYKCKICGKGFYSAKSFQTHEKTHTGEKRYKCKQCGKAFNLSSSFRYHERIHTGEKPYECKQCGKAFRSASQLRVHGGTHTGEKPYECKECGKAFRSTSHLRVHGRTHTGEKPYECKECGKAFRYVKHLQIHERTEKHIRMPSGERPYKCSICEKGFYSAKSFQTHEKTHTGEKPYECNQCGKAFRCCNSLRYHERTHTGEKPYECKQCGKAFRSASHLRMHERTHTGEKPYECKQCGKAFSCASNLRKHGRTHTGEKPYECKQCGKAFRSASNLQMHERTHTGEKPYECKECEKAFCKFSSFQIHERKHRGEKPYECKHCGNGFTSAKILQIHARTHIGEKHYECKECGKAFNYFSSLHIHARTHMGEKPYECKDCGKAFS

SEQ ID NO: 354 - protein, 682 aa, Homo sapiens
MTKSKEAVTFKDVAVVFSEEELQLLDLAQRKLYRDVMLENFRNVVSVGHQSTPDGLPQLEREEKLWMMKMATQRDNSSGAKNLKEMETLQEVGLRYLPHEELFCSQIWQQITRELIKYQDSVVNIQRTGCQLEKRDDLHYKDEGFSNQSSHLQVHRVHTGEKPYKGEHCVKSFSWSSHLQINQRAHAGEKPYKCEKCDNAFRRFSSLQAHQRVHSRAKSYTNDASYRSFSQRSHLPHHQRVPTGENPYKYEECGRNVGKSSHCQAPLIVHTGEKPYKCEECGVGFSQRSYLQVHLKVHTGKKPYKCEECGKSFSWRSRLQAHERIHTGEKPYKCNACGKSFSYSSHLNIHCRIHTGEKPYKCEECGKGFSVGSHLQAHQISHTGEKPYKCEECGKGFCRASNLLDHQRGHTGEKPYQCDACGKGFSRSSDFNIHFRVHTGEKPYKCEECGKGFSQASNLLAHQRGHTGEKPYKCGTCGKGFSRSSDLNVHCRIHTGEKPYKCERCGKAFSQFSSLQVHQRVHTGEKPYQCAECGKGFSVGSQLQAHQRCHTGEKPYQCEECGKGFCRASNFLAHRGVHTGEKPYRCDVCGKRFRQRSYLQAHQRVHTGERPYKCEECGKVFSWSSYLQAHQRVHTGEKPYKCEECGKGFSWSSSLIIHQRVHADDEGDKDFPSSEDSHRKTR

SEQ ID NO: 355 - protein, 533 aa, Homo sapiens
MATSFRTASCWGLLSFKDISMEFTWDEWQLLDSTQKYLYRDVILENYHNLISVGYHGTKPDLIFKLEQGEDPWIINAKISRQSCPDGWEEWYQNNQDELESIERSYACSVLGRLNLSKTHDSSRQRLYNTRGKSLTQNSAPSRSYLRKNPDKFHGYEEPYFLKHQRAHSIEKNCVCSECGKAFRCKSQLIVHLRIHTGERPYECSKCERAFSAKSNLNAHQRVHTGEKPYSCSECEKVFSFRSQLIVHQEIHTGGKPYGCSECGKAYSWKSQLLLHQRSHTGVKPYECSECGKAFSLKSPFVVHQRTHTGVKPHKCSECGKAFRSKSYLLVHIRMHTGEKPYQCSDCGKAFNMKTQLIVHQGVHTGNNPYQCGECGKAFGRKEQLTAHLRAHAGEKPYGCSECGKAFSSKSYLVIHRRTHTGERPYECSLCERAFCGKSQLIIHQRTHSTEKPYECNECEKAYPRKASLQIHQKTHSGEKPFKCSECGKAFTQKSSLSEHQRVHTGEKPWKCSECGKSFCWNSGLRIHRKTHK

SEQ ID NO: 356 - protein, 809 aa, Homo sapiens
MGPLTFMDVAIEFCLEEWQCLDIAQQNLYRNVMLENYRNLVFLGIAVSKPDLITCLEQEKEPWEPMRRHEMVAKPPVMCSHFTQDFWPEQHIKDPFQKATLRRYKNCEHKNVHLKKDHKSVDECKVHRGGYNGFNQCLPATQSKIFLFDKCVKAFHKFSNSNRHKISHTEKKLFKCKECGKSFCMLPHLAQHKIIHTRVNFCKCEKCGKAFNCPSIITKHKRINTGEKPYTCEECGKVFNWSSRLTTHKKNYTRYKLYKCEECGKAFNKSSILTTHKIIRTGEKFYKCKECAKAFNQSSNLTEHKKIHPGEKPYKCEECGKAFNWPSTLTKHKRIHTGEKPYTCEECGKAFNQFSNLTTHKRIHTAEKFYKCTECGEAFSRSSNLTKHKKIHTEKKPYKCEECGKAFKWSSKLTEHKLTHTGEKPYKCEECGKAFNWPSTLTKHNRIHTGEKPYKCEVCGKAFNQFSNLTTHKRIHTAEKPYKCEECGKAFSRSSNLTKHKKIHIEKKPYKCEECGKAFKWSSKLTEHKITHTGEKPYKCEECGKAFNHFSILTKHKRIHTGEKPYKCEECGKAFTQSSNLTTHKKIHTGEKFYKCEECGKAFTQSSNLTTHKKIHTGGKPYKCEECGKAFNQFSTLTKHKIIHTEEKPYKCEECGKAFKWSSTLTKHKIIHTGEKPYKCEECGKAFKLSSTLSTHKIIHTGEKPYKCEKCGKAFNRSSNLIEHKKIHTGEQPYKCEECGKAFNYSSHLNTHKRIHTKEQPYKCKECGKAFNQYSNLTTHNKIHTGEKLYKPEDVTVILTTPQTFSNIK

SEQ ID NO: 357 - protein, 803 aa, Homo sapiens
MDVAIEFCLEEWQCLDIAQQNLYRNVMLENYRNLVFLGIAVSKPDLITCLEQEKEPWEPMRRHEMVAKPPVMCSHFTQDFWPEQHIKDPFQKATLRRYKNCEHKNVHLKKDHKSVDECKVHRGGYNGFNQCLPATQSKIFLFDKCVKAFHKFSNSNRHKISHTEKKLFKCKECGKSFCMLPHLAQHKIIHTRVNFCKCEKCGKAFNCPSIITKHKRINTGEKPYTCEECGKVFNWSSRLTTHKKNYTRYKLYKCEECGKAFNKSSILTTHKIIRTGEKFYKCKECAKAFNQSSNLTEHKKIHPGEKPYKCEECGKAFNWPSTLTKHKRIHTGEKPYTCEECGKAFNQFSNLTTHKRIHTAEKFYKCTECGEAFSRSSNLTKHKKIHTEKKPYKCEECGKAFKWSSKLTEHKLTHTGEKPYKCEECGKAFNWPSTLTKHNRIHTGEKPYKCEVCGKAFNQFSNLTTHKRIHTAEKPYKCEECGKAFSRSSNLTKHKKIHIEKKPYKCEECGKAFKWSSKLTEHKITHTGEKPYKCEECGKAFNHFSILTKHKRIHTGEKPYKCEECGKAFTQSSNLTTHKKIHTGEKFYKCEECGKAFTQSSNLTTHKKIHTGGKPYKCEECGKAFNQFSTLTKHKIIHTEEKPYKCEECGKAFKWSSTLTKHKIIHTGEKPYKCEECGKAFKLSSTLSTHKIIHTGEKPYKCEKCGKAFNRSSNLIEHKKIHTGEQPYKCEECGKAFNYSSHLNTHKRIHTKEQPYKCKECGKAFNQYSNLTTHNKIHTGEKLYKPEDVTVILTTPQTFSNIK

SEQ ID NO: 358 - protein, 618 aa, Homo sapiens
MERAVEPWGPDLHRPEEREPQRGARTGLGSENVISQPNEFEHTPQEDDLGFKEEDLAPDHEVGNASLKPEGIQNWDDLWVQREGLGKPQPRDRGPRLLGEPRWGQASSDRAAVCGECGKSFRQMSDLVKHQRTHTGEKPYKCGVCGKGFGDSSARIKHQRTHSGEKPYRARPPAQGPPKIPRSRIPAGERPTICGECGKSFRQSSDLVKHQRTHTGEKPYKCGICGKGFGDSSARIKHQRTHRGEQPPRPVVPRRQPSRAATAATQGPKAQDKPYICTDCGKRFVLSCSLLSHQRSHLGPKPFGCDVCGKEFARGSDLVKHLRVHTGEKPYLCPECGKGFADSSARVKHLRTHSGERPHACPECDRTFSLSSTLLRHRLTHMEPQDFSFPGYPLPALIPSPPPPPLGTSPPLTPRSPSHSGEPFGLPGLEPEPGGPQAGEPPPPLAGDKPHKCPECGKGFRRSSDLVKHHRVHTGEKPYLCPECGKGFADSSARVKHLRTHRGERARPPPPSTLLRPHNPPGPVPMAPRPRVRAQPSGPSQPHVCGFCGKEFPRSSDLVKHRRTHTGEKPYKCAECGKGFGDSSARIKHQRGHLVLTPFGIGDGRARPLKQEAATGLE

SEQ ID NO: 359 - protein, 1311 aa, Homo sapiens
MSRRKQAKPRSLKDPNCKLEDKTEDGEALDCKKRPEDGEELEDEAVHSCDSCLQVFESLSDITEHKINQCQLTDGVDVEDDPTCSWPASSPSSKDQTSPSHGEGCDFGEEEGGPGLPYPCQFCDKSFSRLSYLKHHEQSHSDKLPFKCTYCSRLFKHKRSRDRHIKLHTGDKKYHCSECDAAFSRSDHLKIHLKTHTSNKPYKCAICRRGFLSSSSLHGHMQVHERNKDGSQSGSRMEDWKMKDTQKCSQCEEGFDFPEDLQKHIAECHPECSPNEDRAALQCVYCHELFVEETSLMNHMEQVHSGEKKNSCSICSESFHTVEELYSHMDSHQQPESCNHSNSPSLVTVGYTSVSSTTPDSNLSVDSSTMVEAAPPIPKSRGRKRAAQQTPDMTGPSSKQAKVTYSCIYCNKQLFSSLAVLQIHLKTMHLDKPEQAHICQYCLEVLPSLYNLNEHLKQVHEAQDPGLIVSAMPAIVYQCNFCSEVVNDLNTLQEHIRCSHGFANPAAKDSNAFFCPHCYMGFLTDSSLEEHIRQVHCDLSGSRFGSPVLGTPKEPVVEVYSCSYCTNSPIFNSVLKLNKHIKENHKNIPLALNYIHNGKKSRALSPLSPVAIEQTSLKMMQAVGGAPARPTGEYICNQCGAKYTSLDSFQTHLKTHLDTVLPKLTCPQCNKEFPNQESLLKHVTIHFMITSTYYICESCDKQFTSVDDLQKHLLDMHTFVFFRCTLCQEVFDSKVSIQLHLAVKHSNEKKVYRCTSCNWDFRNETDLQLHVKHNHLENQGKVHKCIFCGESFGTEVELQCHITTHSKKYNCKFCSKAFHAIILLEKHLREKHCVFETKTPNCGTNGASEQVQKEEVELQTLLTNSQESHNSHDGSEEDVDTSEPMYGCDICGAAYTMETLLQNHQLRDHNIRPGESAIVKKKAELIKGNYKCNVCSRTFFSENGLREHMQTHLGPVKHYMCPICGERFPSLLTLTEHKVTHSKSLDTGNCRICKMPLQSEEEFLEHCQMHPDLRNSLTGFRCVVCMQTVTSTLELKIHGTFHMQKTGNGSAVQTTGRGQHVQKLYKCASCLKEFRSKQDLVKLDINGLPYGLCAGCVNLSKSASPGINVPPGTNRPGLGQNENLSAIEGKGKVGGLKTRCSSCNVKFESESELQNHIQTIHRELVPDSNSTQLKTPQVSPMPRISPSQSDEKKTYQCIKCQMVFYNEWDIQVHVANHMIDEGLNHECKLCSQTFDSPAKLQCHLIEHSFEGMGGTFKCPVCFTVFVQANKLQQHIFSAHGQEDKIYDCTQCPQKFFFQTELQNHTMTQHSS

SEQ ID NO: 360 - protein, 300 aa, Homo sapiens
MHSLEKVTFEDVAIDFTQEEWDMMDTSKRKLYRDVMLENISHLVSLGYQISKSYIILQLEQGKELWREGRVFLQDQNPDRESALKKKHMISMHPIIRKDASTSMTMSKTLILEDPFEYNDSGEDCTHSSTITQCLLTHSRKKPYVSKQCGKSLRNLLSPKPRKQIHTKGKSYQCNLCEKAYTNCFYLRRHKMTHTGERPYACHLCGKAFTQCSHLRRHEKTHTGERPYKCHQCGKAFIQSFNLRRHERTHLGQKCYECDKSGKAFSQSSGFRGNKIIHIGEKPHACLLCGKAFSLSSDLR

SEQ ID NO: 361 - protein, 718 aa, Homo sapiens
MALPQGLLTFRDVAIEFSQEEWKCLDPAQRTLYRDVMLENYRNLVSLDISSKCMMKTFFSTGQGNTEAFHTGTLQRQASHHIGDFCFQKIEKDIHGFQFQWKEDETNDHAAPMTEIKELTGSTGQHDQRHAGNKHIKDQLGLSFHSHLPELHIFQPEGKIGNQVEKSINNASSVSTSQRICCRPKTHISNKYGNNSLHSSLLTQKRNVHMREKSFQCIESGKSFNCSSLLKKHQITHLEEKQCKCDVYGKVFNQKRYLACHRRSHIDEKPYKCNECGKIFGHNTSLFLHKALHTADKPYECEECDKVFSRKSHLETHKIIYTGGKPYKCKVCDKAFTCNSYLAKHTIIHTGEKPYKCNECGKVFNRLSTLARHRRLHTGEKPYECEECEKVFSRKSHLERHKRIHTGEKPYKCKVCDKAFAYNSYLAKHSIIHTGEKPYKCNECGKVFNQQSTLARHHRLHTAEKPYKCEECDKVFRCKSHLERHRRIHTGEKPYKCKVCDKAFRSDSCLTEHQRVHTGEKPYMCNECGKVFSTKANLACHHKLHTAEKPYKCEECEKVFSRKSHMERHRRIHTGEKPYKCKVCDKAFRRDSHLAQHQRVHTGEKPYKCNECGKTFRQTSSLIIHRRLHTGEKPYKCNECGKTFSQMSSLVYHHRLHSGEKPYKCNECGKVFNQQAHLAQHQRVHTGEKPYKCNECGKTFSQMSNLVYHHRLHSGEKP

SEQ ID NO: 362 - protein, 665 aa, Homo sapiens
MMKTFFSTGQGNTEAFHTGTLQRQASHHIGDFCFQKIEKDIHGFQFQWKEDETNDHAAPMTEIKELTGSTGQHDQRHAGNKHIKDQLGLSFHSHLPELHIFQPEGKIGNQVEKSINNASSVSTSQRICCRPKTHISNKYGNNSLHSSLLTQKRNVHMREKSFQCIESGKSFNCSSLLKKHQITHLEEKQCKCDVYGKVFNQKRYLACHRRSHIDEKPYKCNECGKIFGHNTSLFLHKALHTADKPYECEECDKVFSRKSHLETHKIIYTGGKPYKCKVCDKAFTCNSYLAKHTIIHTGEKPYKCNECGKVFNRLSTLARHRRLHTGEKPYECEECEKVFSRKSHLERHKRIHTGEKPYKCKVCDKAFAYNSYLAKHSIIHTGEKPYKCNECGKVFNQQSTLARHHRLHTAEKPYKCEECDKVFRCKSHLERHRRIHTGEKPYKCKVCDKAFRSDSCLTEHQRVHTGEKPYMCNECGKVFSTKANLACHHKLHTAEKPYKCEECEKVFSRKSHMERHRRIHTGEKPYKCKVCDKAFRRDSHLAQHQRVHTGEKPYKCNECGKTFRQTSSLIIHRRLHTGEKPYKCNECGKTFSQMSSLVYHHRLHSGEKPYKCNECGKVFNQQAHLAQHQRVHTGEKPYKCNECGKTFSQMSNLVYHHRLHSGEKP

SEQ ID NO: 363 - protein, 134 aa, Homo sapiens
MGRSRRTGAHRAHSLARQMKAKRRRPDLDEIHRELRPQGSARPQPDPNAEFDPDLPGGGLHRCLACARYFIDSTNLKTHFRSKDHKKRLKQLSVEPYSQEEAERAAGMGSYVPPRRLAVPTEVSTEVPEMDTST

SEQ ID NO: 364 - protein, 390 aa, Homo sapiens
MAEIHNGGELCDFMENGEIFSEHSCLNAHMGTENTGDTYDCDEYGENFPMLHNSAPAGETLSVLNQCRKAFSLPPNVHQRTWIGDKSFEYSDCEEAFVDQSHLQANRITHNGETLYEQKQCGRAFTYSTSHAVSVKMHTVEKPYECKECGKFFRYSSYLNSHMRTHTGEKPYECKECGKCFTVSSHLVEHVRIHTGEKPYQCKECGRAFAGRSGLTKHVRIHTGEKPYECNECGKAYNRFYLLTEHFKTHTEEKPFECKVCGKSFRSSSCLKNHFRIHTGIKPYKCKECGKAFTVSSSLHNHVKIHTGEKPYECKDCGKAFATSSQLIEHIRTHTGEKPYICKECGKTFRASSHLQKHVRIHTGEKPYICNECGKAYNRFYLLTKHLKTH

SEQ ID NO: 365 - protein, 790 aa, Homo sapiens
MAYCLTNCYQYSVTFEDTAVDFTQEEWILLDPVQRNLYRDVMLENYENVAKVGFQLFKPSVISWLEEEELRTLQQGVLQDWAIKHQTSVSALQQEFWKIQTSNGIQMDLVTFDSVAVEFTQEEWTLLDPAQRNLYSDVMLENYKNLSSVGYQLFKPSLISWLEEEEELSTLPRVLQEWKMCLKTKGPALWQDNFCLKTLNGIQLARNQNGEELYDCKQCEDVFCKHPCLKTNMSTQNRGNTSECIQYAKDLLSLYNKTSTIRKVSVFSKHGKSFRLILNVQVQRKCTQDKSFEGTDYGKAFIYQSYLEAHRKTQSGEKLNEWKQCGEAFTHSTSHAVNVETHIIKNPYECKECGKDFRYPTHLNNHMQTHIGIKPYKCKHCGKTFTVPSGFLEHVRTHTGEKPYGCKECGKAFGTSAGLIEHIRCHAREKTFKCDHCGKAFISYPSLFGHLRVHNGEKPYEHKEYGKAFGTSSGVIEDRRSNTGQKRFDCDQCGKVFVSFSSLFAHLRTHTGEKPFKCYKCGKPFTSSACLRIHMRTHTEERLYQCKKCGKAFTKCSYLTKHLRTHAGEKPYECMKCGKAFTERSYLTKHLRRHSGEKPYECKKCGKAFTERSDLTKHLRRHTGDKPYEYKDCGKAFVVSSSLVDHLRTHTGYKPYKCNACEKAYSRSCVLTQHLKTHAAEKTSECNACGNSFRNSMCFHDRLKTLTKIKPYKCKDCGKAFTCHSDLTNHVRIHTGEKPYKCKECGKAFRTSSGRIQHLRTHMGEKPFECDQCGKAFASFSARIAHLKTH

SEQ ID NO: 366 - protein, 632 aa, Homo sapiens
MAAAALRDPAQGCVTFEDVTIYFSQEEWVLLDEAQRLLYCDVMLENFALIASLGLISFRSHIVSQLEMGKEPWVPDSVDMTSAMARGAYGRPGSDFCHGTEGKDLPSEHNVSVEGVAQDRSPEATLCPQKTCPCDICGLRLKDILHLAEHQTTHPRQKPFVCEAYVKGSEFSANLPRKQVQQNVHNPIRTEEGQASPVKTCRDHTSDQLSTCREGGKDFVATAGFLQCEVTPSDGEPHEATEGVVDFHIALRHNKCCESGDAFNNKSTLVQHQRIHSRERPYECSKCGIFFTYAADLTQHQKVHNRGKPYECCECGKFFSQHSSLVKHRRVHTGESPHVCGDCGKFFSRSSNLIQHKRVHTGEKPYECSDCGKFFSQRSNLIHHKRVHTGRSAHECSECGKSFNCNSSLIKHWRVHTGERPYKCNECGKFFSHIASLIQHQIVHTGERPHGCGECGKAFSRSSDLMKHQRVHTGERPYECNECGKLFSQSSSLNSHRRLHTGERPYQCSECGKFFNQSSSLNNHRRLHTGERPYECSECGKTFRQRSNLRQHLKVHKPDRPYECSECGKAFNQRPTLIRHQKIHIRERSMENVLLPCSQHTPEISSENRPYQGAVNYKLKLVHPSTHPGEVP

SEQ ID NO: 367 - protein, 647 aa, Homo sapiens
MAQGSVSFNDVTVDFTQEEWQHLDHAQKTLYMDVMLENYCHLISVGCHMTKPDVILKLERGEEPWTSFAGHTCLEENWKAEDFLVKFKEHQEKYSRSVVSINHKKLVKEKSKIYEKTFTLGKNPVNSKNLPPEYDTHGRILKNVSELIISNLNPARKRLSEYNGYGKSLLSTKQETTHPEVKSHNQSARAFSHNEVLMQYQKTETPAQSFGYNDCEKSFLQRGGLITHSRPYKGENPSVYNKKRRATNIEKKHTCNECGKSFCRKSVLILHQGIHSEEKPYQCHQCGNAFRRKSYLIDHQRTHTGEKPFVCNECGKSFRLKTALTDHQRTHTGEKSYECLQCRNAFRLKSHLIRHQRTHTGEKPYECNDCGKSFRQKTTLSLHQRIHTGEKPYICKECGKSFHQKANLTVHQRTHTGEKPYICNECGKSFSQKTTLALHEKTHNEEKPYICSECGKSFRQKTTLVAHQRTHTGEKSYECPHCGKAFRMKSYLIDHHRTHTGEKPYECNECGKSFSQKTNLNLHQRIHTGEKPYVCNECGKSFRQKATLTVHQKIHTGQKSYECPQCGKAFSRKSYLIHHQRTHTGEKPYKCSECGKCFRQKTNLIVHQRTHTGEKPYVCNECGKSFSYKRNLIVHQRTHKGENIEMQ

SEQ ID NO: 368 - protein, 616 aa, Homo sapiens
MDVMLENYCHLISVGCHMTKPDVILKLERGEEPWTSFAGHTCLEENWKAEDFLVKFKEHQEKYSRSVVSINHKKLVKEKSKIYEKTFTLGKNPVNSKNLPPEYDTHGRILKNVSELIISNLNPARKRLSEYNGYGKSLLSTKQETTHPEVKSHNQSARAFSHNEVLMQYQKTETPAQSFGYNDCEKSFLQRGGLITHSRPYKGENPSVYNKKRRATNIEKKHTCNECGKSFCRKSVLILHQGIHSEEKPYQCHQCGNAFRRKSYLIDHQRTHTGEKPFVCNECGKSFRLKTALTDHQRTHTGEKSYECLQCRNAFRLKSHLIRHQRTHTGEKPYECNDCGKSFRQKTTLSLHQRIHTGEKPYICKECGKSFHQKANLTVHQRTHTGEKPYICNECGKSFSQKTTLALHEKTHNEEKPYICSECGKSFRQKTTLVAHQRTHTGEKSYECPHCGKAFRMKSYLIDHHRTHTGEKPYECNECGKSFSQKTNLNLHQRIHTGEKPYVCNECGKSFRQKATLTVHQKIHTGQKSYECPQCGKAFSRKSYLIHHQRTHTGEKPYKCSECGKCFRQKTNLIVHQRTHTGEKPYVCNECGKSFSYKRNLIVHQRTHKGENIEMQ

SEQ ID NO: 369 - protein, 591 aa, Homo sapiens
MAQGSVSFNDVTVDFTQEEWQHLDHAQKTLYMDVMLENYCHLISVGCHMTKPDVILKLERGEEPWTSFAGHTCLEENWKAEDFLVKFKEHQEKYSRSVVSINHKKLVKEKSKIYEKTFTLGKNPVNSKNLPPEYDTHGRILKNVSELIISNLNPARKRLSEYNGYGKSLLSTKQETTHPEVKSHNQSARAFSHNEVLMQYQKTETPAQSFGYNDCEKSFLQRGGLITHSRPYKGENPSVYNKKRRATNIEKKHTCNECGKSFCRKSVLILHQGIHSEEKPYQCHQCGNAFRRKSYLIDHQRTHTGEKPFVCNECGKSFRLKTALTDHQRTHTGEKSYECLQCRNAFRLKSHLIRHQRTHTGEKPYECNDCGKSFRQKTTLSLHQRIHTGEKPYICKECGKSFHQKANLTVHQRTHTGEKPYICNECGKSFSQKTTLALHEKTHNEEKPYICSECGKSFRQKTTLVAHQRTHTGEKSYECPHCGKAFRMKSYLIDHHRTHTGEKPYECNECGKSFSQKTNLNLHQRIHTGEKPYVCNECGKSFRQKATLTVHQKIHTGQKSYECPQCGKAFSRKSYLIHHQRTHKGENIEMQ

SEQ ID NO: 370 - protein, 137 aa, Homo sapiens
MGWVIPEWPGAQSCPTAAQVAQPVPFMCNAPASPINDKEKDKAGGRLPSGSEPRARAFCEAGADGEQGDPSPADTIKANQGHIPAAPGETGSVICWCDQSVAPPRPAGLSVSGRQSYLVGCFRWVLTFFFSVFYLTP

SEQ ID NO: 371 - protein, 1422 aa, Homo sapiens
MSGIKRTIKETDPDYEDVSVALPNKRHKAIENSARDAAVQKIETIIKEQFALEMKNKEHEIEVIDQRLIEARRMMDKLRACIVANYYASAGLLKVSEGSKTCDTMVFNHPAIKKFLESPSRSSSPANQRAETPSANHSESDSLSQHNDFLSDKDNNSNMDIEERLSNNMEQRPSRNTGRDTSRITGSHKTEQRNADLTDETSRLFVKKTIVVGNVSKYIPPDKREENDQSTHKWMVYVRGSRREPSINHFVKKVWFFLHPSYKPNDLVEVREPPFHLTRRGWGEFPVRVQVHFKDSQNKRIDIIHNLKLDRTYTGLQTLGAETVVDVELHRHSLGEDCIYPQSSESDISDAPPSLPLTIPAPVKASSPIKQSHEPVPDTSVEKGFPASTEAERHTPFYALPSSLERTPTKMTTSQKVTFCSHGNSAFQPIASSCKIVPQSQVPNPESPGKSFQPITMSCKIVSGSPISTPSPSPLPRTPTSTPVHVKQGTAGSVINNPYVIMDKQPGQVIGATTPSTGSPTNKISTASQVSQGTGSPVPKIHGSSFVTSTVKQEDSLFASMPPLCPIGSHPKVQSPKPITGGLGAFTKVIIKQEPGEAPHVPATGAASQSPLPQYVTVKGGHMIAVSPQKQVITPGEGIAQSAKVQPSKVVGVPVGSALPSTVKQAVAISGGQILVAKASSSVSKAVGPKQVVTQGVAKAIVSGGGGTIVAQPVQTLTKAQVTAAGPQKSGSQGSVMATLQLPATNLANLANLPPGTKLYLTTNSKNPSGKGKLLLIPQGAILRATNNANLQSGSAASGGSGAGGGGGGGGGGGSGSGGGGSTGGGGGTAGGGTQSTAGPGGISQHLTYTSYILKQTPQGTFLVGQPSPQTSGKQLTTGSVVQGTLGVSTSSAQGQQTLKVISGQKTTLFTQAAHGGQASLMKISDSTLKTVPATSQLSKPGTTMLRVAGGVITTATSPAVALSANGPAQQSEGMAPVSSSTVSSVTKTSGQQQVCVSQATVGTCKAATPTVVSATSLVPTPNPISGKATVSGLLKIHSSQSSPQQAVLTIPSQLKPLSVNTSGGVQTILMPVNKVVQSFSTSKPPAILPVAAPTPVVPSSAPAAVAKVKTEPETPGPSCLSQEGQTAVKTEESSELGNYVIKIDHLETIQQLLTAVVKKIPLITAKSEDASCFSAKSVEQYYGWNIGKRRAAEWQRAMTMRKVLQEILEKNPRFHHLTPLKTKHIAHWCRCHGYTPPDPESLRNDGDSIEDVLTQIDSEPECPSSFSSADNLCRKLEDLQQFQKREPENEEEVDILSLSEPVKINIKKEQEEKQEEVKFYLPPTPGSEFIGDVTQKIGITLQPVALHRNVYASVVEDMILKATEQLVNDILRQALAVGYQTASHNRIPKEITVSNIHQAICNIPFLDFLTNKHMGILNEDQ

SEQ ID NO: 372 - protein, 308 aa, Homo sapiens
MQPSGHRLRDVEHHPLLAENDNYDSSSSSSSEADVADRVWFIRDGCGMICAVMTWLLVAYADFVVTFVMLLPSKDFWYSVVNGVIFNCLAVLALSSHLRTMLTDPGAVPKGNATKEYMESLQLKPGEVIYKCPKCCCIKPERAHHCSICKRCIRKMDHHCPWVNNCVGEKNQRFFVLFTMYIALSSVHALILCGFQFISCVRGQWTECSDFSPPITVILLIFLCLEGLLFFTFTAVMFGTQIHSICNDETEIERLKSEKPTWERRLRWEGMKSVFGGPPSLLWMNPFVGFRFRRLPTRPRKGGPEFSV

SEQ ID NO: 373 - protein, 345 aa, Homo sapiens
MQPSGHRLRDVEHHPLLAENDNYDSSSSSSSEADVADRVWFIRDGCGMICAVMTWLLVAYADFVVTFVMLLPSKDFWYSVVNGVIFNCLAVLALSSHLRTMLTDPEKSSDCRPSACTVKTGLDPTLVGICGEGTESVQSLLLGAVPKGNATKEYMESLQLKPGEVIYKCPKCCCIKPERAHHCSICKRCIRKMDHHCPWVNNCVGEKNQRFFVLFTMYIALSSVHALILCGFQFISCVRGQWTECSDFSPPITVILLIFLCLEGLLFFTFTAVMFGTQIHSICNDETEIERLKSEKPTWERRLRWEGMKSVFGGPPSLLWMNPFVGFRFRRLPTRPRKGGPEFSV

SEQ ID NO: 374 - protein, 485 aa, Homo sapiens
MYKMNICNKPSNKTAPEKSVWTAPAQPSGPSPELQGQRSRRNGWSWPPHPLQIVAWLLYLFFAVIGFGILVPLLPHHWVPAGYACMGAIFAGHLVVHLTAVSIDPADANVRDKSYAGPLPIFNRSQHAHVIEDLHCNLCNVDVSARSKHCSACNKCVCGFDHHCKWLNNCVGERNYRLFLHSVASALLGVLLLVLVATYVFVEFFVNPMRLRTNRHFEVLKNHTDVWFVFLPAAPVETQAPAILALAALLILLGLLSTALLGHLLCFHIYLMWHKLTTYEYIVQHRPPQEAKGVHRELESCPPKMRPIQEMEFYMRTFRHMRPEPPGQAGPAAVNAKHSRPASPDPTPGRRDCAGPPVQVEWDRKKPLPWRSPLLLLAMWGPQAPPCLCRKRGRGACIKCERLRPRIRRRGLGPPAAAPARRRIPRTPALCTPLALPAPTTRRRQSPWTRFQWRRRAWAAPLWPPRGAGADSPRWRGRRVRPPFS

SEQ ID NO: 375 - protein, 900 aa, Homo sapiens
MSHLKTSTEDEEPTEEYENVGNAASKWPKVEDPMPESKVGDTCVWDSKVENQQKKPVENRMKEDKSSIREAISKAKSTANIKTEQEGEASEKSLHLSPQHITHQTMPIGQRGSEQGKRVENINGTSYPSLQQKTNAVKKLHKCDECGKSFKYNSRLVQHKIMHTGEKRYECDDCGGTFRSSSSLRVHKRIHTGEKPYKCEECGKAYMSYSSLINHKSTHSGEKNCKCDECGKSFNYSSVLDQHKRIHTGEKPYECGECGKAFRNSSGLRVHKRIHTGEKPYECDICGKTFSNSSGLRVHKRIHTGEKPYECDECGKAFITCRTLLNHKSIHFGDKPYKCDECEKSFNYSSLLIQHKVIHTGEKPYECDECGKAFRNSSGLIVHKRIHTGEKPYKCDVCGKAFSYSSGLAVHKSIHPGKKAHECKECGKSFSYNSLLLQHRTIHTGERPYVCDVCGKTFRNNAGLKVHRRLHTGEKPYKCDVCGKAYISRSSLKNHKGIHLGEKPYKCSYCEKSFNYSSALEQHKRIHTREKPFGCDECGKAFRNNSGLKVHKRIHTGERPYKCEECGKAYISLSSLINHKSVHPGEKPFKCDECEKAFITYRTLTNHKKVHLGEKPYKCDVCEKSFNYTSLLSQHRRVHTREKPYECDRCEKVFRNNSSLKVHKRIHTGERPYECDVCGKAYISHSSLINHKSTHPGRTPHTCDECGKAFFSSRTLISHKRVHLGEKPFKCVECGKSFSYSSLLSQHKRIHTGEKPYVCDRCGKAFRNSSGLTVHKRIHTGEKPYECDECGKAYISHSSLINHKSVHQGKQPYNCECGKSFNYRSVLDQHKRIHTGKKPYRCNECGKAFNIRSNLTKHKRTHTGEESLNVIYVGSYSGTSQKRTYEGGNALDGGRMRMPL

SEQ ID NO: 376 - protein, 704 aa, Homo sapiens
MSHLKTSTEDEEPTEEYENVGNAASKWPKVEDPMPESKVGDTCVWDSKVENQQKKPVENRMKEDKSSIREAISKAKSTANIKTEQEGEASEKSLHLSPQHITHQTMPIGQRGSEQGKRVENINGTSYPSLQQKTNAVKKLHKCDECGKSFKYNSRLVQHKIMHTGEKRYECDDCGGTFRSSSSLRVHKRIHTGEKPYKCEECGKAYMSYSSLINHKSTHSGEKNCKCDECGKSFNYSSVLDQHKRIHTGEKPYECGECGKAFRNSSGLRVHKRIHTGEKPYECDICGKTFSNSSGLRVHKRIHTGEKPYECDECGKAFITCRTLLNHKSIHFGDKPYKCDECGKAFRNNSGLKVHKRIHTGERPYKCEECGKAYISLSSLINHKSVHPGEKPFKCDECEKAFITYRTLTNHKKVHLGEKPYKCDVCEKSFNYTSLLSQHRRVHTREKPYECDRCEKVFRNNSSLKVHKRIHTGERPYECDVCGKAYISHSSLINHKSTHPGRTPHTCDECGKAFFSSRTLISHKRVHLGEKPFKCVECGKSFSYSSLLSQHKRIHTGEKPYVCDRCGKAFRNSSGLTVHKRIHTGEKPYECDECGKAYISHSSLINHKSVHQGKQPYNCECGKSFNYRSVLDQHKRIHTGKKPYRCNECGKAFNIRSNLTKHKRTHTGEESLNVIYVGSYSGTSQKRTYEGGNALDGGRMRMPL

SEQ ID NO: 377 - protein, 867 aa, Homo sapiens
MPESKVGDTCVWDSKVENQQKKPVENRMKEDKSSIREAISKAKSTANIKTEQEGEASEKSLHLSPQHITHQTMPIGQRGSEQGKRVENINGTSYPSLQQKTNAVKKLHKCDECGKSFKYNSRLVQHKIMHTGEKRYECDDCGGTFRSSSSLRVHKRIHTGEKPYKCEECGKAYMSYSSLINHKSTHSGEKNCKCDECGKSFNYSSVLDQHKRIHTGEKPYECGECGKAFRNSSGLRVHKRIHTGEKPYECDICGKTFSNSSGLRVHKRIHTGEKPYECDECGKAFITCRTLLNHKSIHFGDKPYKCDECEKSFNYSSLLIQHKVIHTGEKPYECDECGKAFRNSSGLIVHKRIHTGEKPYKCDVCGKAFSYSSGLAVHKSIHPGKKAHECKECGKSFSYNSLLLQHRTIHTGERPYVCDVCGKTFRNNAGLKVHRRLHTGEKPYKCDVCGKAYISRSSLKNHKGIHLGEKPYKCSYCEKSFNYSSALEQHKRIHTREKPFGCDECGKAFRNNSGLKVHKRIHTGERPYKCEECGKAYISLSSLINHKSVHPGEKPFKCDECEKAFITYRTLTNHKKVHLGEKPYKCDVCEKSFNYTSLLSQHRRVHTREKPYECDRCEKVFRNNSSLKVHKRIHTGERPYECDVCGKAYISHSSLINHKSTHPGRTPHTCDECGKAFFSSRTLISHKRVHLGEKPFKCVECGKSFSYSSLLSQHKRIHTGEKPYVCDRCGKAFRNSSGLTVHKRIHTGEKPYECDECGKAYISHSSLINHKSVHQGKQPYNCECGKSFNYRSVLDQHKRIHTGKKPYRCNECGKAFNIRSNLTKHKRTHTGEESLNVIYVGSYSGTSQKRTYEGGNALDGGRMRMPL

SEQ ID NO: 378 - protein, 539 aa, Homo sapiens
MGSPEDDLIGIPFPDHSSELLSCLNEQRQLGHLCDLTIRTQGLEYRTHRAVLAACSHYFKKLFTEGGGGAVMGAGGSGTATGGAGAGVCELDFVGPEALGALLEFAYTATLTTSSANMPAVLQAARLLEIPCVIAACMEILQGSGLEAPSPDEDDCERARQYLEAFATATASGVPNGEDSPPQVPLPPPPPPPPRPVARRSRKPRKAFLQTKGARANHLVPEVPTVPAHPLTYEEEEVAGRVGSSGGSGPGDSYSPPTGTASPPEGPQSYEPYEGEEEEEELVYPPAYGLAQGGGPPLSPEELGSDEDAIDPDLMAYLSSLHQDNLAPGLDSQDKLVRKRRSQMPQECPVCHKIIHGAGKLPRHMRTHTGEKPFACEVCGVRFTRNDKLKIHMRKHTGERPYSCPHCPARFLHSYDLKNHMHLHTGDRPYECHLCHKAFAKEDHLQRHLKGQNCLEVRTRRRRKDDAPPHYPPPSTAAASPAGLDLSNGHLDTFRLSLARFWEQSAPTGPPVSTPGPPDDDEEEGAPTTPQAEGAMESS

SEQ ID NO: 379 - protein, 573 aa, Homo sapiens
MLQPGPHPPSPQAAAPGEAWPGPSQAPWQSLEEKMGSPEDDLIGIPFPDHSSELLSCLNEQRQLGHLCDLTIRTQGLEYRTHRAVLAACSHYFKKLFTEGGGGAVMGAGGSGTATGGAGAGVCELDFVGPEALGALLEFAYTATLTTSSANMPAVLQAARLLEIPCVIAACMEILQGSGLEAPSPDEDDCERARQYLEAFATATASGVPNGEDSPPQVPLPPPPPPPPRPVARRSRKPRKAFLQTKGARANHLVPEVPTVPAHPLTYEEEEVAGRVGSSGGSGPGDSYSPPTGTASPPEGPQSYEPYEGEEEEEELVYPPAYGLAQGGGPPLSPEELGSDEDAIDPDLMAYLSSLHQDNLAPGLDSQDKLVRKRRSQMPQECPVCHKIIHGAGKLPRHMRTHTGEKPFACEVCGVRFTRNDKLKIHMRKHTGERPYSCPHCPARFLHSYDLKNHMHLHTGDRPYECHLCHKAFAKEDHLQRHLKGQNCLEVRTRRRRKDDAPPHYPPPSTAAASPAGLDLSNGHLDTFRLSLARFWEQSAPTGPPVSTPGPPDDDEEEGAPTTPQAEGAMESS

SEQ ID NO: 380 - protein, 407 aa, Homo sapiens
MAAKMEITLSSNTEASSKQERHIIAKLEEKRGPPLQKNCPDPELCRQSFRRFCYQEVSGPQEALSQLRQLCRQWLQPELHTKEQILELLVMEQFLTILPPEIQARVRHRCPMSSKEIVTLVEDFHRASKKPKQWVAVCMQGQKVLLEKTGSQLGEQELPDFQPQTPRRDLRESSPAEPSQAGAYDRLSPHHWEKSPLLQEPTPKLAGTEAPRMRSDNKENPQQEGAKGAKPCAVSAGRSKGNGLQNPEPRGANMSEPRLSRRQVSSPNAQKPFAHYQRHCRVEYISSPLKSHPLRELKKSKGGKRSLSNRLQHLGHQPTRSAKKPYKCDDCGKSFTWNSELKRHKRVHTGERPYTCGECGNCFGRQSTLKLHQRIHTGEKPYQCGQCGKSFRQSSNLHQHHRLHHGD

SEQ ID NO: 381 - protein, 234 aa, Homo sapiens
MAAKMEITLSSNTEASSKQERHIIAKLEEKRGPPLQKNCPDPELCRQSFRRFCYQEVSGPQEALSQLRQLCRQWLQPELHTKEQILELLVMEQFLTILPPEIQARVRHRCPMSSKEIVTLVEDFHRASKKPKQWVAVCMQGQKVLLEKTGSQLGEQELPDFQPQTPRRDLRESSPAEPSQAGAYDRLSPHHWEKSPLLQEPTPKLAGTELLIEKTDPNMATDELPCKLWLSFIA

SEQ ID NO: 382 - protein, 634 aa, Homo sapiens
MEPSPLSPSGAALPLPLSLAPPPLPLPAAAVVHVSFPEVTSALLESLNQQRLQGQLCDVSIRVQGREFRAHRAVLAASSPYFHDQVLLKGMTSISLPSVMDPGAFETVLASAYTGRLSMAAADIVNFLTVGSVLQMWHIVDKCTELLREGRASATTTITTAAATSVTVPGAGVPSGSGGTVAPATMGSARSHASSRASENQSPSSSNYFSPRESTDFSSSSQEAFAASAVGSGERRGGGPVFPAPVVGSGGATSGKLLLEADELCDDGGDGRGAVVPGAGLRRPTYTPPSIMPQKHWVYVKRGGNCPAPTPLVPQDPDLEEEEEEEDLVLTCEDDEDEELGGSSRVPVGGGPEATLSISDVRTLSEPPDKGEEQVNFCESSNDFGPYEGGGPVAGLDDSGGPTPSSYAPSHPPRPLLPLDMQGNQILVFPSSSSSSSSQAPGQPPGNQAEHGAVTVGGTSVGSLGVPGSVGGVPGGTGSGDGNKIFLCHCGKAFSHKSMRDRHVNMHLNLRPFDCPVCNKKFKMKHHLTEHMKTHTGLKPYECGVCAKKFMWRDSFMRHRGHCERRHRLGGVGAVPGPGTPTGPSLPSKRESPGVGGGSGDEASAATPPSSRRVWSPPRVHKVEMGFGGGGGAN

SEQ ID NO: 383 - protein, 1214 aa, Homo sapiens
MKQPIMADGPRCKRRKQANPRRKNVVNYDNVVDTGSETDEEDKLHIAEDDGIANPLDQETSPASVPNHESSPHVSQALLPREEEEDEIREGGVEHPWHNNEILQASVDGPEEMKEDYDTMGPEATIQTAINNGTVKNANCTSDFEEYFAKRKLEERDGHAVSIEEYLQRSDTAIIYPEAPEELSRLGTPEANGQEENDLPPGTPDAFAQLLTCPYCDRGYKRLTSLKEHIKYRHEKNEENFSCPLCSYTFAYRTQLERHMVTHKPGTDQHQMLTQGAGNRKFKCTECGKAFKYKHHLKEHLRIHSGEKPYECPNCKKRFSHSGSYSSHISSKKCIGLISVNGRMRNNIKTGSSPNSVSSSPTNSAITQLRNKLENGKPLSMSEQTGLLKIKTEPLDFNDYKVLMATHGFSGTSPFMNGGLGATSPLGVHPSAQSPMQHLGVGMEAPLLGFPTMNSNLSEVQKVLQIVDNTVSRQKMDCKAEEISKLKGYHMKDPCSQPEEQGVTSPNIPPVGLPVVSHNGATKSIIDYTLEKVNEAKACLQSLTTDSRRQISNIKKEKLRTLIDLVTDDKMIENHNISTPFSCQFCKESFPGPIPLHQHERYLCKMNEEIKAVLQPHENIVPNKAGVFVDNKALLLSSVLSEKGMTSPINPYKDHMSVLKAYYAMNMEPNSDELLKISIAVGLPQEFVKEWFEQRKVYQYSNSRSPSLERSSKPLAPNSNPPTKDSLLPRSPVKPMDSITSPSIAELHNSVTNCDPPLRLTKPSHFTNIKPVEKLDHSRSNTPSPLNLSSTSSKNSHSSSYTPNSFSSEELQAEPLDLSLPKQMKEPKSIIATKNKTKASSISLDHNSVSSSSENSDEPLNLTFIKKEFSNSNNLDNKSTNPVFSMNPFSAKPLYTALPPQSAFPPATFMPPVQTSIPGLRPYPGLDQMSFLPHMAYTYPTGAATFADMQQRRKYQRKQGFQGELLDGAQDYMSGLDDMTDSDSCLSRKKIKKTESGMYACDLCDKTFQKSSSLLRHKYEHTGKRPHQCQICKKAFKHKHHLIEHSRLHSGEKPYQCDKCGKRFSHSGSYSQHMNHRYSYCKREAEEREAAEREAREKGHLEPTELLMNRAYLQSITPQGYSDSEERESMPRDGESEKEHEKEGEDGYGKLGRQDGDEEFEEEEEESENKSMDTDPETIRDEEETGDHSMDDSSEDGKMETKSDHEEDNMEDGM

SEQ ID NO: 384 - protein, 1190 aa, Homo sapiens
MKQPIMADGPRCKRRKQANPRRKNVVNYDNVVDTGSETDEEDKLHIAEDDGIANPLDQETSPASVPNHESSPHVSQALLPREEEEDEIREGGVEHPWHNNEILQASVDGPVKNANCTSDFEEYFAKRKLEERDGHAVSIEEYLQRSDTAIIYPEAPEELSRLGTPEANGQEENDLPPGTPDAFAQLLTCPYCDRGYKRLTSLKEHIKYRHEKNEENFSCPLCSYTFAYRTQLERHMVTHKPGTDQHQMLTQGAGNRKFKCTECGKAFKYKHHLKEHLRIHSGEKPYECPNCKKRFSHSGSYSSHISSKKCIGLISVNGRMRNNIKTGSSPNSVSSSPTNSAITQLRNKLENGKPLSMSEQTGLLKIKTEPLDFNDYKVLMATHGFSGTSPFMNGGLGATSPLGVHPSAQSPMQHLGVGMEAPLLGFPTMNSNLSEVQKVLQIVDNTVSRQKMDCKAEEISKLKGYHMKDPCSQPEEQGVTSPNIPPVGLPVVSHNGATKSIIDYTLEKVNEAKACLQSLTTDSRRQISNIKKEKLRTLIDLVTDDKMIENHNISTPFSCQFCKESFPGPIPLHQHERYLCKMNEEIKAVLQPHENIVPNKAGVFVDNKALLLSSVLSEKGMTSPINPYKDHMSVLKAYYAMNMEPNSDELLKISIAVGLPQEFVKEWFEQRKVYQYSNSRSPSLERSSKPLAPNSNPPTKDSLLPRSPVKPMDSITSPSIAELHNSVTNCDPPLRLTKPSHFTNIKPVEKLDHSRSNTPSPLNLSSTSSKNSHSSSYTPNSFSSEELQAEPLDLSLPKQMKEPKSIIATKNKTKASSISLDHNSVSSSSENSDEPLNLTFIKKEFSNSNNLDNKSTNPVFSMNPFSAKPLYTALPPQSAFPPATFMPPVQTSIPGLRPYPGLDQMSFLPHMAYTYPTGAATFADMQQRRKYQRKQGFQGELLDGAQDYMSGLDDMTDSDSCLSRKKIKKTESGMYACDLCDKTFQKSSSLLRHKYEHTGKRPHQCQICKKAFKHKHHLIEHSRLHSGEKPYQCDKCGKRFSHSGSYSQHMNHRYSYCKREAEEREAAEREAREKGHLEPTELLMNRAYLQSITPQGYSDSEERESMPRDGESEKEHEKEGEDGYGKLGRQDGDEEFEEEEEESENKSMDTDPETIRDEEETGDHSMDDSSEDGKMETKSDHEEDNMEDGM

SEQ ID NO: 385 - protein, 513 aa, Homo sapiens
MAASRNGFEAVEAEGSAGCRGSSGMEVVLPLDPAVPAPLCPHGPTLLFVKVTQGKEETRRFYACSACRDRKDCNFFQWEDEKLSGARLAAREAHNRRCQPPLSRTQCVERYLKFIELPLTQRKFCQTCQQLLLPDDWGQHSEHQVLGNVSITQLRRPSQLLYPLENKKTNAQYLFADRSCQFLVDLLSALGFRRVLCVGTPRLHELIKLTASGDKKSNIKSLLLDIDFRYSQFYMEDSFCHYNMFNHHFFDGKTALEVCRAFLQEDKGEGIIMVTDPPFGGLVEPLAITFKKLIAMWKEGQSQDDSHKELPIFWIFPYFFESRICQFFPSFQMLDYQVDYDNHALYKHGKTGRKQSPVRIFTNIPPNKIILPTEEGYRFCSPCQRYVSLENQHCELCNSCTSKDGRKWNHCFLCKKCVKPSWIHCSICNHCAVPDHSCEGPKHGCFICGELDHKRSTCPNIATSKRANKAVRKQKQRKSNKMKMETTKGQSMNHTSATRRKKRRERAHQYLGS

SEQ ID NO: 386 - protein, 229 aa, Homo sapiens
MAASRNGFEAVEAEGSAGCRGSSGMEVVLPLDPAVPAPLCPHGPTLLFVKVTQGKEETRRFYACSACRDRKDCNFFQWEDEKLSGARLAAREAHNRRCQPPLSRTQCVERYLKFIELPLTQRKFCQTCQQLLLPDDWGQHSEHQVLGNVSITQLRRPSQLLYPLENKKTNAQYLFADRSCQFLVDLLSALGFRRVLCVGTPRLHELIKLTASGDKKSNIKSLLLDIDFR

SEQ ID NO: 387 - protein, 510 aa, Homo sapiens
MAASRNGFEAVEAEGSAGCRGSSGMEVVLPLDPAVPAPLCPHGPTLLFVKVTQGKEETRRFYACSACRDRKDCNFFQWEDEKLSGARLAAREAHNRRCQPPLSRTQCVERYLKFIELPLTQRKFCQTCQQLLLPDDWGQHSEHQVLGNVSITQLRRPSQLLYPLENKKTNAQYLFADRSCQFLVDLLSALGFRRVLCVGTPRLHELIKLTASGDKKSNIKSLLLDIDFRYSQFYMEDSFCHYNMFNHHFFDGKTALEVCRAFLQEDKGEGIIMVTDPPFGGLVEPLAITFKKLIAMWKEGQSQDDSHKELPIFWIFPYFFESRICQFFPSFQMLDYQVDYDNHALYKHGKTGRKQSPVRIFTNIPPNKIILPTEEGYRFCSPCQRYVSLENQHCELCNSCTSKDGRKWNHCFLCKKCVKPSWIHCSICNHCAVPDHSCEGPKHGCFICGELDHKRSTCPNIATSKRANKKQKQRKSNKMKMETTKGQSMNHTSATRRKKRRERAHQYLGS

SEQ ID NO: 388 - protein, 240 aa, Homo sapiens
MGIHFSCIRGDLKKPSKKRVKREPYSTTMLQVTSLSPINEILRRYSLYTNQHWRHHGFWRKKIQPQEASEEPPAHKDRGGGERPVNARVVRVAPLRPGFALCGYAVQDISKEDTVYDICNEDAVDISDEDTVDISNEASVHDISNEAAVCDISNDAVNISNEAAVRDISNDAVDICNEAAVHDISNEDTIEDISYEDTVYDITNEDAVRYLCKKDATKEPLTLENDLIVESMSDDEDFAA

SEQ ID NO: 389 - protein, 365 aa, Homo sapiens
MNVIYPLAVPKGRRLCCEVCEAPAERVCAACTVTYYCGVVHQKADWDSIHEKICQLLIPLRTSMPFYNSEEERQHGLQQLQQRQKYLIEFCYTIAQKYLFEGKHEDAVPAALQSLRFRVKLYGLSSVELVPAYLLLAEASLGLGRIVQAEEYLFQAQWTVLKSTDCSNATHSLLHRNLGLLYIAKKNYEEARYHLANDIYFASCAFGTEDIRTSGGYFHLANIFYDLKKLDLADTLYTKVSEIWHAYLNNHYQVLSQAHIQQMDLLGKLFENDTGLDEAQEAEAIRILTSILNIRESTSDKAPQKTIFVLKILVMFYYLMMNSSKAQEYGMRALSLAKEQQLDVHEQSTIQELLSLISTEDHPIT

SEQ ID NO: 390 - protein, 264 aa, Homo sapiens
MDTPSPDPLPSPLPGEEEKPLALSPPVPRGRRGRRPGGATSSNRTLKASLPRKRGRPPKSGQEPPLVQVQGVTAPVGSSGGSDLLLIDDQGVPYTVSEGSAAGPEGSGPRKAPHFCPVCLRAFPYLSDLERHSISHSELKPHQCKVCGKTFKRSSHLRRHCNIHAGLRPFRCPLCPRRFREAGELAHHHRVHSGERPYQCPICRLRFTEANTLRRHAKRKHPEAMGVPLCAPDPGSEPPWDEEGIPATAGAEEEEETEGKGEPA

SEQ ID NO: 391 - protein, 3925 aa, Homo sapiens
MPGERPRGAPPPTMTGDLQPRQVASSPGHPSQPPLEDNTPATRTTKGAREAGGQAQAMELPEAQPRQARDGELKPPSLRGQAPSSTPGKRGSPQTPPGRSPLQAPSRLAGRAEGSPPQRYILGIASSRTKPTLDETPENPQLEAAQLPEVDTPQGPGTGAPLRPGLPRTEAQPAAEELGFHRCFQEPPSSFTSTNYTSPSATPRPPAPGPPQSRGTSPLQPGSYPEYQASGADSWPPAAENSFPGANFGVPPAEPEPIPKGSRPGGSPRGVSFQFPFPALHGASTKPFPADVAGHAFTNGPLVFAFHQPQGAWPEEAVGTGPAYPLPTQPAPSPLPCYQGQPGGLNRHSDLSGALSSPGAAHSAPRPFSDSLHKSLTKILPERPPSAQDGLGSTRGPPSSLPQRHFPGQAYRASGVDTSPGPPDTELAAPGPPPARLPQLWDPTAAPYPTPPGGPLAATRSMFFNGQPSPGQRLCLPQSAPLPWPQVLPTARPSPHGMEMLSRLPFPAGGPEWQGGSQGALGTAGKTPGPREKLPAVRSSQGGSPALFTYNGMTDPGAQPLFFGVAQPQVSPHGTPSLPPPRVVGASPSESPLPSPATNTAGSTCSSLSPMSSSPANPSSEESQLPGPLGPSAFFHPPTHPQETGSPFPSPEPPHSLPTHYQPEPAKAFPFPADGLGAEGAFQCLEETPFPHEGPEVGRGGLQGFPRAPPPYPTHHFSLSSASLDQLDVLLTCRQCDRNYSSLAAFLAHRQFCGLLLARAKDGHQRSPGPPGLPSPPAAPRVPADAHAGLLSHAKTFLLAGDAQAEGKDDPLRTGFLPSLAATPFPLPASDLDMEDDAKLDSLITEALNGMEYQSDNPEIDSSFIDVFADEEPSGPRGPSSGHPLKSKAGVTPESKAPPPLPAATPDPQTPRPGDRGCPARGRPKTRSLGLAPTEADAPSQGRQQRRGKQLKLFRKDLDSGGAAEGSGSGGGGRASGLRPRRNDGLGERPPPRPRRPRTQAPGSRADPAPRVPRAAALPEETRSSRRRRLPPRKDPRKRKARGGAWGKELILKIVQQKNRLREYDFASESEEDEQPPPRGPGFRGRRGRGEKRKEVELTQGPREDEPQKPRKAARQEAGGDGAPANPEEPGGSRPGPGRSPQARGPSRSLETGAAAREGGPKCADRPSVAPKDPLQVPTNTETSEETRPSLDFPQEAKEPETAEESAPDSTEFTEALRSPPAACAGEMGASPGLLIPEQPPPSRHDTGTPKPSGSLANTAPHGSSPTPGVGSLLGGPGGTQAPVSHNSKDPPARQPGEFLAPVANPSSTACPKPSVLSSKISSFGCDPAGFNRDPLGVPVAKKGPQPYSSPHSELFLGPKDLAGCFLEELHPKPSARDAPPASSSCLCQDGEDAGSLEPQLPRSPPGTAETEPGRAASPPTLESSSLFPDLPVDRFDPPLYGSLSANRDSGLPFACADPPQKTVPSDPPYPSFLLLEEVSPMLPSHFPDLSGGKVLSKTCPPERTVVPGAAPSLPGKGSGCSVALMSHLSEDELEIQKLVTELESQLQRSKDTRGAPRELAEAESVGRVELGTGTEPPSQRRTCQATVPHEDTFSAADLTRVGESTAHREGAESAVATVEAVQGRPGGTWPCPASFHPGHAALLPCAQEDLVSGAPFSPRGANFHFQPVQKAGASKTGLCQAEGDSRPPQDVCLPEPSKQPGPQLDAGSLAKCSPDQELSFPKNKEAASSQESEDSLRLLPCEQRGGFLPEPGTADQPHRGAPAPEAFGSPAVHLAPDLAFQGDGAPPLDATWPFGASPSHAAQGHSAGRAGGHLHPTAGRPGFEGNEFAPAGASSLTAPRGREAWLVPVPSPACVSNTHPSRRSQDPALSPPIRQLQLPGPGVAKSKDGILGLQELTPAAQSPPRVNPSGLEGGTVEGGKVACGPAQGSPGGVQVTTLPAVAGHQLGLEADGHWGLLGQAEKTQGQGTANQLQPENGVSPGGTDNHASVNASPKTALTGPTEGAVLLEKCKGSRAAMSLQEEAEPTPSPPSPNRESLALALTAAHSRSGSEGRTPERASSPGLNKPLLATGDSPAPSVGDLAACAPSPTSAAHMPCSLGPLPREDPLTSPSRAQGGLGGQLPASPSCRDPPGPQQLLACSPAWAPLEEADGVQATTDTGAEDSPVAPPSLTTSPCDPKEALAGCLLQGEGSPLEDPSSWPPGSVSAVTCTHSGDTPKDSTLRIPEDSRKEKLWESPGRATSPPLAGAVSPSVAVRATGLSSTPTGDEAQAGRGLPGPDPQSRGAPPHTNPDRMPRGHSSYSPSNTARLGHREGQAVTAVPTEPPTLQGAGPDSPACLEGEMGTSSKEPEDPGTPETGRSGATKMPRVTCPSTGLGLGRTTAPSSTASDFQSDSPQSHRNASHQTPQGDPLGPQDLKQRSRGYKKKPASTENGQWKGQAPHGPVTCEVCAASFRSGPGLSRHKARKHRPHPGAPAEPSPAALPAQQPLEPLAQKCQPPRKKSHRVSGKERPNHSRGDPSHVTQPPPAQGSKEVLRAPGSPHSQQLHPPSPTEHEVDVKTPASKPRPDQAREDELHPKQAEKREGRRWRREPTVDSPSHSEGKSNKKRGKLRGRRLREESILPVSADVISDGRGSRPSPAMASYAASPSHCLSVEGGPEADGEQPPRLATLGPGVMEGAAETDQEALCAGETGAQKPPGDRMLCPGRMDGAALGEQPTGQKGASARGFWGPRETKALGVCKESGSEPAEDSSRAHSRSEEGVWEENTPPLGPLGFPETSSSPADSTTSSCLQGLPDNPDTQGGVQGPEGPTPDASGSSAKDPPSLFDDEVSFSQLFPPGGRLTRKRNPHVYGKRCEKPVLPLPTQPSFEEGGDPTLGPARLPTDLSDSSSLCLCHEDPWEDEDPAGLPESFLLDGFLNSRVPGIDPWAPGLSLWALEPSREAGAEKLPSHCPEDDRPEAIPELHMVPAAWRGLEMPAPADDSSSSLGDVSPEPPSLERERCDGGLPGNTHLLPLRATDFEVLSTKFEMQDLCFLGPFEDPVGLPGPSFLDFEGTASSQGPQSRRTEEAAGAGRAQGRGRPAKGRRASYKCKVCFQRFRSLGELDLHKLAHTPAPPPTCYMCVERRFGSRELLRGHLQERHAQSKAGPWACGMCLKEVADVWMYNEHLREHAVRFARRGQARRSLGDLPGGLEGSSAVAHLLNSITEPAPKHHRGKRSAGKAAGSPGDPWGQEGEAKKDSPGERAKPRARSTPSNPDGAATPDSASATALADAGSPGPPRTTPSPSPDPWAGGEPLLQATPVHEACKDPSRDCHHCGKRFPKPFKLQRHLAVHSPQRVYLCPRCPRVYPEHGELLAHLGGAHGLLERPELQHTPLYACELCATVMRIIKKSFACSSCNYTFAKKEQFDRHMNKHLRGGRQPFAFRGVRRPGAPGQKARALEGTLPSKRRRVAMPGSAPGPGEDRPPPRGSSPILSEGSLPALLHLCSEVAPSTTKGWPETLERPVDPVTHPIRGCELPSNHQECPPPSLSPFPAALADGRGDCALDGALERPENEASPGSPGPLLQQALPLGASLPRPGARGQDAEGKRAPLVFSGKRRAPGARGRCAPDHFQEDHLLQKEKEVSSSHMVSEGGPRGTFHKGSATKPAGCQSSSKDRSAASTPSKALKFPVHPRKAVGSLAPGELARGTENGMKPATPKAKPGPSSQGSGSPRPGTKTGGGSQPQPASGQLQSETATTPAKPSFPSRSPAPERLPARAQAKSCTKGPREAGEQGPHGSLGPKEKGESSTKRKKGQVPGPARSESVGSFGRAPSAPDKPPRTPRKQATPSRVLPTKPKPNSQNKPRPPPSEQRKAEPGHTQRKDRLGKAFPQGRPLLRPPKRGTAVHGAEPAEPHTHRTAEAQSDLLSQLFGQRLTGFKIPLKKDASE

SEQ ID NO: 392 - protein, 311 aa, Homo sapiens
MGVPTALEAGSWRWGSLLFALFLAASLGPVAAFKVATPYSLYVCPEGQNVTLTCRLLGPVDKGHDVTFYKTWYRSSRGEVQTCSERRPIRNLTFQDLHLHHGGHQAANTSHDLAQRHGLESASDHHGNFSITMRNLTLLDSGLYCCLVVEIRHHHSEHRVHGAMELQVQTGKDAPSNCVVYPSSSQDSENITAAALATGACIVGILCLPLILLLVYKQRQAASNRRAQELVRMDSNIQGIENPGFEASPPAQGIPEAKVRHPLSYVAQRQPSESGRHLLSEPSTPLSPPGPGDVFFPSLDPVPDSPNFEVI

SEQ ID NO: 393 - protein, 1190 aa, Homo sapiens
MTSRFGKTYSRKGGNGSSKFDEVFSNKRTTLSTKWGETTFMAKLGQKRPNFKPDIQEIPKKPKVEEESTGDPFGFDSDDESLPVSSKNLAQVKCSSYSESSEAAQLEEVTSVLEANSKISHVVVEDTVVSDKCFPLEDTLLGKEKSTNRIVEDDASISSCNKLITSDKVENFHEEHEKNSHHIHKNADDSTKKPNAETTVASEIKETNDTWNSQFGKRPESPSEISPIKGSVRTGLFEWDNDFEDIRSEDCILSLDSDPLLEMKDDDFKNRLENLNEAIEEDIVQSVLRPTNCRTYCRANKTKSSQGASNFDKLMDGTSQALAKANSESSKDGLNQAKKGGVSCGTSFRGTVGRTRDYTVLHPSCLSVCNVTIQDTMERSMDEFTASTPADLGEAGRLRKKADIATSKTTTRFRPSNTKSKKDVKLEFFGFEDHETGGDEGGSGSSNYKIKYFGFDDLSESEDDEDDDCQVERKTSKKRTKTAPSPSLQPPPESNDNSQDSQSGTNNAENLDFTEDLPGVPESVKKPINKQGDKSKENTRKIFSGPKRSPTKAVYNARHWNHPDSEELPGPPVVKPQSVTVRLSSKEPNQKDDGVFKAPAPPSKVIKTVTIPTQPYQDIVTALKCRREDKELYTVVQHVKHFNDVVEFGENQEFTDDIEYLLSGLKSTQPLNTRCLSVISLATKCAMPSFRMHLRAHGMVAMVFKTLDDSQHHQNLSLCTAALMYILSRDRLNMDLDRASLDLMIRLLELEQDASSAKLLNEKDMNKIKEKIRRLCETVHNKHLDLENITTGHLAMETLLSLTSKRAGDWFKEELRLLGGLDHIVDKVKECVDHLSRDEDEEKLVASLWGAERCLRVLESVTVHNPENQSYLIAYKDSQLIVSSAKALQHCEELIQQYNRAEDSICLADSKPLPHQNVTNHVGKAVEDCMRAIIGVLLNLTNDNEWGSTKTGEQDGLIGTALNCVLQVPKYLPQEQRFDIRVLGLGLLINLVEYSARNRHCLVNMETSCSFDSSICSGEGDDSLRIGGQVHAVQALVQLFLERERAAQLAESKTDELIKDAPTTQHDKSGEWQETSGEIQWVSTEKTDGTEEKHKKEEEDEELDLNKALQHAGKHMEDCIVASYTALLLGCLCQESPINVTTVREYLPEGDFSIMTEMLKKFLSFMNLTCAVGTTGQKSISRVIEYLEHC

SEQ ID NO: 394 - protein, 1227 aa, Homo sapiens
MVQGPVQTPALTIHRRKRRRRRRRRPVAKAPARLRGEYETGVKMTSRFGKTYSRKGGNGSSKFDEVFSNKRTTLSTKWGETTFMAKLGQKRPNFKPDIQEIPKKPKVEEESTGDPFGFDSDDESLPVSSKNLAQVKCSSYSESSEAAQLEEVTSVLEANSKISHVVVEDTVVSDKCFPLEDTLLGKEKSTNRIVEDDASISSCNKLITSDKVENFHEEHEKNSHHIHKNADDSTKKPNAETTVASEIKETNDTWNSQFGKRPESPSEISPIKGSVRTGLFEWDNDFEDIRSEDCILSLDSDPLLEMKDDDFKNRLENLNEAIEEDIVQSVLRPTNCRTYCRANKTKSSQGASNFDKLMDGTSQALAKANSESSKDGLNQAKKGGVSCGTSFRGTVGRTRDYTVLHPSCLSVCNVTIQDTMERSMDEFTASTPADLGEAGRLRKKADIATSKTTTRFRPSNTKSKKDVKLEFFGFEDHETGGDEGGSGSSNYKIKYFGFDDLSESEDDEDDDCQVERKTSKKRTKTAPSPSLQPPPESNDNSQDSQSGTNNAEDLPGVPESVKKPINKQGDKSKENTRKIFSGPKRSPTKAVYNARHWNHPDSEELPGPPVVKPQSVTVRLSSKEPNQKDDGVFKAPAPPSKVIKTVTIPTQPYQDIVTALKCRREDKELYTVVQHVKHFNDVVEFGENQEFTDDIEYLLSGLKSTQPLNTRCLSVISLATKCAMPSFRMHLRAHGMVAMVFKTLDDSQHHQNLSLCTAALMYILSRDRLNMDLDRASLDLMIRLLELEQDASSAKLLNEKDMNKIKEKIRRLCETVHNKHLDLENITTGHLAMETLLSLTSKRAGDWFKEELRLLGGLDHIVDKVKECVDHLSRDEDEEKLVASLWGAERCLRVLESVTVHNPENQSYLIAYKDSQLIVSSAKALQHCEELIQQYNRAEDSICLADSKPLPHQNVTNHVGKAVEDCMRAIIGVLLNLTNDNEWGSTKTGEQDGLIGTALNCVLQVPKYLPQEQRFDIRVLGLGLLINLVEYSARNRHCLVNMETSCSFDSSICSGEGDDSLRIGGQVHAVQALVQLFLERERAAQLAESKTDELIKDAPTTQHDKSGEWQETSGEIQWVSTEKTDGTEEKHKKEEEDEELDLNKALQHAGKHMEDCIVASYTALLLGCLCQESPINVTTVREYLPEGDFSIMTEMLKKFLSFMNLTCAVGTTGQKSISRVIEYLEHC

SEQ ID NO: 395 - protein, 1275 aa, Homo sapiens
MVQGPVQTPALTIHRRKRRRSCPPNRASYLPKAESLASLGSHLPALLSRARVPRPPAGRRERERRRRPVAKAPARLRGEYETGVKMTSRFGKTYSRKGGNGSSKFDEVFSNKRTTLSTKWGETTFMAKLGQKRPNFKPDIQEIPKKPKVEEESTGDPFGFDSDDESLPVSSKNLAQVKCSSYSESSEAAQLEEVTSVLEANSKISHVVVEDTVVSDKCFPLEDTLLGKEKSTNRIVEDDASISSCNKLITSDKVENFHEEHEKNSHHIHKNADDSTKKPNAETTVASEIKETNDTWNSQFGKRPESPSEISPIKGSVRTGLFEWDNDFEDIRSEDCILSLDSDPLLEMKDDDFKNRLENLNEAIEEDIVQSVLRPTNCRTYCRANKTKSSQGASNFDKLMDGTSQALAKANSESSKDGLNQAKKGGVSCGTSFRGTVGRTRDYTVLHPSCLSVCNVTIQDTMERSMDEFTASTPADLGEAGRLRKKADIATSKTTTRFRPSNTKSKKDVKLEFFGFEDHETGGDEGGSGSSNYKIKYFGFDDLSESEDDEDDDCQVERKTSKKRTKTAPSPSLQPPPESNDNSQDSQSGTNNAENLDFTEDLPGVPESVKKPINKQGDKSKENTRKIFSGPKRSPTKAVYNARHWNHPDSEELPGPPVVKPQSVTVRLSSKEPNQKDDGVFKAPAPPSKVIKTVTIPTQPYQDIVTALKCRREDKELYTVVQHVKHFNDVVEFGENQEFTDDIEYLLSGLKSTQPLNTRCLSVISLATKCAMPSFRMHLRAHGMVAMVFKTLDDSQHHQNLSLCTAALMYILSRDRLNMDLDRASLDLMIRLLELEQDASSAKLLNEKDMNKIKEKIRRLCETVHNKHLDLENITTGHLAMETLLSLTSKRAGDWFKEELRLLGGLDHIVDKVKECVDHLSRDEDEEKLVASLWGAERCLRVLESVTVHNPENQSYLIAYKDSQLIVSSAKALQHCEELIQQYNRAEDSICLADSKPLPHQNVTNHVGKAVEDCMRAIIGVLLNLTNDNEWGSTKTGEQDGLIGTALNCVLQVPKYLPQEQRFDIRVLGLGLLINLVEYSARNRHCLVNMETSCSFDSSICSGEGDDSLRIGGQVHAVQALVQLFLERERAAQLAESKTDELIKDAPTTQHDKSGEWQETSGEIQWVSTEKTDGTEEKHKKEEEDEELDLNKALQHAGKHMEDCIVASYTALLLGCLCQESPINVTTVREYLPEGDFSIMTEMLKKFLSFMNLTCAVGTTGQKSISRVIEYLEHC

SEQ ID NO: 396 - protein, 313 aa, Homo sapiens
MKLTDSVLRSFRVAKVFRENSDKINCFDFSPNGETVISSSDDDSIVLYDCQEGKPKRTLYSKKYGVDLIRYTHAANTVVYSSNKIDDTIRYLSLHDNKYIRYFPGHSKRVVALSMSPVDDTFISGSLDKTIRLWDLRSPNCQGLMHLQGKPVCSFDPEGLIFAAGVNSEMVKLYDLRSFDKGPFATFKMQYDRTCEWTGLKFSNDGKLILISTNGSFIRLIDAFKGVVMHTFGGYANSKAVTLEASFTPDSQFIMIGSEDGKIHVWNGESGIKVAVLDGKHTGPITCLQFNPKFMTFASACSNMAFWLPTIDD

SEQ ID NO: 397 - protein, 385 aa, Homo sapiens
MAAAAARWNHVWVGTETGILKGVNLQRKQAANFTAGGQPRREEAVSALCWGTGGETQMLVGCADRTVKHFSTEDGIFQGQRHCPGGEGMFRGLAQADGTLITCVDSGILRVWHDKDKDTSSDPLLELRVGPGVCRMRQDPAHPHVVATGGKENALKIWDLQGSEEPVFRAKNVRNDWLDLRVPIWDQDIQFLPGSQKLVTCTGYHQVRVYDPASPQRRPVLETTYGEYPLTAMTLTPGGNSVIVGNTHGQLAEIDLRQGRLLGCLKGLAGSVRGLQCHPSKPLLASCGLDRVLRIHRIQNPRGLEHKVYLKSQLNCLLLSGRDNWEDEPQEPQEPNKVPLEDTETDELWASLEAAAKRKLSGLEQPQGALQTRRRKKKRPGSTSP

SEQ ID NO: 398 - protein, 366 aa, Homo sapiens
MAAAAARWNHVWVGTETGILKGVNLQRKQAANFTAGGQPRREEAVSALCWGTGGETQMLVGCADRTVKHFSTEDGIFQGQRHCPGGEGMFRGLAQADGTLITCVDSGILRVWHDKDKDTSSDPLLELRVGPGVCRMRQDPAHPHVVATGGKENALKIWDLQGSEEPVFRAKNVRNDWLDLRVPIWDQDIQFLPGSQKLVTCTGYHQVRVYDPASPQRRPVLETTYGEYPLTAMTLTPGGNSVIVGNTHGQLAEIDLRQGRLLGCLKGLAGSVRGLQCHPSKPLLASCGLDRVLRIHRIQNPRGLEHKDEPQEPQEPNKVPLEDTETDELWASLEAAAKRKLSGLEQPQGALQTRRRKKKRPGSTSP

SEQ ID NO: 399 - protein, 1071 aa, Homo sapiens
MPAIMTMLADHAARQLLDFSQKLDINLLDNVVNCLYHGEGAQQRMAQEVLTHLKEHPDAWTRVDTILEFSQNMNTKYYGLQILENVIKTRWKILPRNQCEGIKKYVVGLIIKTSSDPTCVEKEKVYIGKLNMILVQILKQEWPKHWPTFISDIVGASRTSESLCQNNMVILKLLSEEVFDFSSGQITQVKSKHLKDSMCNEFSQIFQLCQFVMENSQNAPLVHATLETLLRFLNWIPLGYIFETKLISTLIYKFLNVPMFRNVSLKCLTEIAGVSVSQYEEQFVTLFTLTMMQLKQMLPLNTNIRLAYSNGKDDEQNFIQNLSLFLCTFLKEHDQLIEKRLNLRETLMEALHYMLLVSEVEETEIFKICLEYWNHLAAELYRESPFSTSASPLLSGSQHFDVPPRRQLYLPMLFKVRLLMVSRMAKPEEVLVVENDQGEVVREFMKDTDSINLYKNMRETLVYLTHLDYVDTERIMTEKLHNQVNGTEWSWKNLNTLCWAIGSISGAMHEEDEKRFLVTVIKDLLGLCEQKRGKDNKAIIASNIMYIVGQYPRFLRAHWKFLKTVVNKLFEFMHETHDGVQDMACDTFIKIAQKCRRHFVQVQVGEVMPFIDEILNNINTIICDLQPQQVHTFYEAVGYMIGAQTDQTVQEHLIEKYMLLPNQVWDSIIQQATKNVDILKDPETVKQLGSILKTNVRACKAVGHPFVIQLGRIYLDMLNVYKCLSENISAAIQANGEMVTKQPLIRSMRTVKRETLKLISGWVSRSNDPQMVAENFVPPLLDAVLIDYQRNVPAAREPEVLSTMAIIVNKLGGHITAEIPQIFDAVFECTLNMINKDFEEYPEHRTNFFLLLQAVNSHCFPAFLAIPPTQFKLVLDSIIWAFKHTMRNVADTGLQILFTLLQNVAQEEAAAQSFYQTYFCDILQHIFSVVTDTSHTAGLTMHASILAYMFNLVEEGKISTSLNPGNPVNNQIFLQEYVANLLKSAFPHLQDAQVKLFVTGLFSLNQDIPAFKEHLRDFLVQIKEFAGEDTSDLFLEEREIALRQADEEKHKRQMSVPGIFNPHEIPEEMCD

SEQ ID NO: 400 - protein, 236 aa, Homo sapiens
MAEAEESPGDPGTASPRPLFAGLSDISISQDIPVEGEITIPMRSRIREFDSSTLNESVRNTIMRDLKAVGKKFMHVLYPRKSNTLLRDWDLWGPLILCVTLALMLQRDSADSEKDGGPQFAEVFVIVWFGAVTITLNSKLLGGNISFFQSLCVLGYCILPLTVAMLICRLVLLADPGPVNFMVRLFVVIVMFAWSIVASTAFLADSQPPNRRALAVYPVFLFYFVISWMILTFTPQ

SEQ ID NO: 401 - protein, 193 aa, Homo sapiens
MAEAEESPGDPGTASPRPLMRDLKAVGKKFMHVLYPRKSNTLLRDWDLWGPLILCVTLALMLQRDSADSEKDGGPQFAEVFVIVWFGAVTITLNSKLLGGNISFFQSLCVLGYCILPLTVAMLICRLVLLADPGPVNFMVRLFVVIVMFAWSIVASTAFLADSQPPNRRALAVYPVFLFYFVISWMILTFTPQ

SEQ ID NO: 402 - protein, 171 aa, Homo sapiens
MLKKPSSLEQWEILGTSSGEFRCISRDCPGAGNNNREPSISTRGRTSSSKMVLPHPKVAEEAVGGPQSCKWLSCGLQGTGGGHLEGHPPRVSQESAPAGHTGISPSSSGVHLIQAKTAGWPQRVSSAEQCLLPIQHVPGADFLHVFTLRLHCGPARNAKLVEALFNSNSSC

SEQ ID NO: 403 - protein, 180 aa, Homo sapiens
MPSSVPKTSIESLGSPSSLSSSQASEPLCPLKHPSHRPPASTLSPNLTSSTESLGYLSSLSSSQPPEPLRPLECPSHKPCGRSLPRRRNPGWVSWSDSMQADSETDAIICPMCKAPERSCPHTWWVPSSPRVIRGVGRCSDPNLGLSWRQEAARAWCHCTSSQYPFKHPNLPTHLPKASF

SEQ ID NO: 404 - protein, 636 aa, Homo sapiens
MAPRPPTAAPQESVTFKDVSVDFTQEEWYHVDPAQRSLYRDVMLENYSHLVSLGYQVSKPEVIFKLEQGEEPWISEGEIQRPFYPDWKTRPEVKSSHLQQDVSEVSHCTHDLLHATLEDSWDVSSQLDRQQENWKRHLGSEASTQKKIITPQENFEQNKFGENSRLNTNLVTQLNIPARIRPSECETLGSNLGHNADLLNENNILAKKKPYKCDKCRKAFIHRSSLTKHEKTHKGEGAFPNGTDQGIYPGKKHHECTDCGKTFLWKTQLTEHQRIHTGEKPFECNVCGKAFRHSSSLGQHENAHTGEKPYQCSLCGKAFQRSSSLVQHQRIHTGEKPYRCNLCGRSFRHGTSLTQHEVTHSGEKPFQCKECGKAFSRCSSLVQHERTHTGEKPFECSICGRAFGQSPSLYKHMRIHKRGKPYQSSNYSIDFKHSTSLTQDESTLTEVKSYHCNDCGEDFSHITDFTDHQRIHTAENPYDCEQAFSQQAISHPGEKPYQCNVCGKAFKRSTSFIEHHRIHTGEKPYECNECGEAFSRRSSLTQHERTHTGEKPYECIDCGKAFSQSSSLIQHERTHTGEKPYECNECGRAFRKKTNLHDHQRIHTGEKPYSCKECGKNFSRSSALTKHQRIHTRNKL

SEQ ID NO: 405 - protein, 113 aa, Homo sapiens
MAPRPPTAAPQESVTFKDVSVDFTQEEWYHVDPAQRSLYRDVMLENYSHLVSLGYQVSKPEVIFKLEQGEEPWISEGEIQRPFYPGFVCLLPLSLPSGSKGERRQKLPRKNPE

SEQ ID NO: 406 - protein, 599 aa, Homo sapiens
MSGPCGEKPVLEASPTMSLWEFEDSHSRQGTPRPGQELAAEEASALELQMKVDFFRKLGYSSTEIHSVLQKLGVQADTNTVLGELVKHGTATERERQTSPDPCPQLPLVPRGGGTPKAPNLEPPLPEEEKEGSDLRPVVIDGSNVAMSHGNKEVFSCRGILLAVNWFLERGHTDITVFVPSWRKEQPRPDVPITDQHILRELEKKKILVFTPSRRVGGKRVVCYDDRFIVKLAYESDGIVVSNDTYRDLQGERQEWKRFIEERLLMYSFVNDKFMPPDDPLGRHGPSLDNFLRKKPLTLEHRKQPCPYGRKCTYGIKCRFFHPERPSCPQRSVADELRANALLSPPRAPSKDKNGRRPSPSSQSSSLLTESEQCSLDGKKLGAQASPGSRQEGLTQTYAPSGRSLAPSGGSGSSFGPTDWLPQTLDSLPYVSQDCLDSGIGSLESQMSELWGVRGGGPGEPGPPRAPYTGYSPYGSELPATAAFSAFGRAMGAGHFSVPADYPPAPPAFPPREYWSEPYPLPPPTSVLQEPPVQSPGAGRSPWGRAGSLAKEQASVYTKLCGVFPPHLVEAVMGRFPQLLDPQQLAAEILSYKSQHPSE

SEQ ID NO: 407 - protein, 825 aa, Homo sapiens
METLTSRHEKRALHSQASAISQDREEKIMSQEPLSFKDVAVVFTEEELELLDSTQRQLYQDVMQENFRNLLSVGERNPLGDKNGKDTEYIQDEELRFFSHKELSSCKIWEEVAGELPGSQDCRVNLQGKDFQFSEDAAPHQGWEGASTPCFPIENSLDSLQGDGLIGLENQQFPAWRAIRPIPIQGSWAKAFVNQLGDVQERCKNLDTEDTVYKCNWDDDSFCWISCHVDHRFPEIDKPCGCNKCRKDCIKNSVLHRINPGENGLKSNEYRNGFRDDADLPPHPRVPLKEKLCQYDEFSEGLRHSAHLNRHQRVPTGEKSVKSLERGRGVRQNTHIRNHPRAPVGDMPYRCDVCGKGFRYKSVLLIHQGVHTGRRPYKCEECGKAFGRSSNLLVHQRVHTGEKPYKCSECGKGFSYSSVLQVHQRLHTGEKPYTCSECGKGFCAKSALHKHQHIHPGEKPYSCGECGKGFSCSSHLSSHQKTHTGERPYQCDKCGKGFSHNSYLQAHQRVHMGQHLYKCNVCGKSFSYSSGLLMHQRLHTGEKPYKCECGKSFGRSSDLHIHQRVHTGEKPYKCSECGKGFRRNSDLHSHQRVHTGERPYVCDVCGKGFIYSSDLLIHQRVHTGEKPYKCAECGKGFSYSSGLLIHQRVHTGEKPYRCQECGKGFRCTSSLHKHQRVHTGKKPYTCDQCGKGFSYGSNLRTHQRLHTGEKPYTCCECGKGFRYGSGLLSHKRVHTGEKPYRCHVCGKGYSQSSHLQGHQRVHTGEKPYKCEECGKGFGRNSCLHVHQRVHTGEKPYTCGVCGKGFSYTSGLRNHQRVHLGENPYK

SEQ ID NO: 408 - protein, 819 aa, Homo sapiens
METLTSRHEKRALHSQASAISQDREEKIMSQEPLSFKDVAVVFTEEELELLDSTQRQLYQDVMQENFRNLLSVGDKNGKDTEYIQDEELRFFSHKELSSCKIWEEVAGELPGSQDCRVNLQGKDFQFSEDAAPHQGWEGASTPCFPIENSLDSLQGDGLIGLENQQFPAWRAIRPIPIQGSWAKAFVNQLGDVQERCKNLDTEDTVYKCNWDDDSFCWISCHVDHRFPEIDKPCGCNKCRKDCIKNSVLHRINPGENGLKSNEYRNGFRDDADLPPHPRVPLKEKLCQYDEFSEGLRHSAHLNRHQRVPTGEKSVKSLERGRGVRQNTHIRNHPRAPVGDMPYRCDVCGKGFRYKSVLLIHQGVHTGRRPYKCEECGKAFGRSSNLLVHQRVHTGEKPYKCSECGKGFSYSSVLQVHQRLHTGEKPYTCSECGKGFCAKSALHKHQHIHPGEKPYSCGECGKGFSCSSHLSSHQKTHTGERPYQCDKCGKGFSHNSYLQAHQRVHMGQHLYKCNVCGKSFSYSSGLLMHQRLHTGEKPYKCECGKSFGRSSDLHIHQRVHTGEKPYKCSECGKGFRRNSDLHSHQRVHTGERPYVCDVCGKGFIYSSDLLIHQRVHTGEKPYKCAECGKGFSYSSGLLIHQRVHTGEKPYRCQECGKGFRCTSSLHKHQRVHTGKKPYTCDQCGKGFSYGSNLRTHQRLHTGEKPYTCCECGKGFRYGSGLLSHKRVHTGEKPYRCHVCGKGYSQSSHLQGHQRVHTGEKPYKCEECGKGFGRNSCLHVHQRVHTGEKPYTCGVCGKGFSYTSGLRNHQRVHLGENPYK

SEQ ID NO: 409 - protein, 211 aa, Homo sapiens
MQLGEHTHPQKNPKSLAGCLLPNPHPQLQLRGKRAAGLLLRRNPWCHPQAPGGSSTWAPSLPPILAPQAYLNFAPPTLVPGGSPGTEAQPVAPANALGSRSKLNLTQPSCLSSGSHLPLPFPAGMCPHPANPTWALRKGAEVPQGPPLSHTRKALCLAASGVGALLLEVPRHPGWGQQSAAGFQQVFQEGAGTHFPSVRVQPGRGKLQGQR

SEQ ID NO: 410 - protein, 626 aa, Homo sapiens
MASPSPPPESKGLLTFEDVAVFFTQEEWDYLDPAQRSLYKDVMMENYGNLVSLDVLNRDKDEEPTVKQEIEEIEEEVEPQGVIVTRIKSEIDQDPMGRETFELVGRLDKQRGIFLWEIPRESLTQEQRMFRENTNIIRKRPNSEEKCHKCEECGKGFVRKAHFIQHQRVHTGEKPFQCNECGKSFSRSSFVIEHQRIHTGERPYECNYCGKTFSVSSTLIRHQRIHTGERPYQCNQCKQSFSQRRSLVKHQRIHTGEKPHKCSDCGKAFSWKSHLIEHQRTHTGEKPYHCTKCKKSFSRNSLLVEHQRIHTGERPHKCGECGKAFRLSTYLIQHQKIHTGEKPFLCIECGKSFSRSSFLIEHQRIHTGERPYQCKECGKSFSQLCNLTRHQRIHTGDKPHKCEECGKAFSRSSGLIQHQRIHTREKTYPYNETKESFDPNCSLVIQQEVYPKEKSYKCDECGKTFSVSAHLVQHQRIHTGEKPYLCTVCGKSFSRSSFLIEHQRIHTGERPYLCRQCGKSFSQLCNLIRHQGVHTGNKPHKCDECGKAFSRNSGLIQHQRIHTGEKPYKCEKCDKSFSQQRSLVNHQKIHAEVKTQETHECDACGEAFNCRISLIQHQKLHTAWMQ

SEQ ID NO: 411 - protein, 612 aa, Homo sapiens
MASPSPPPESKEEWDYLDPAQRSLYKDVMMENYGNLVSLDVLNRDKDEEPTVKQEIEEIEEEVEPQGVIVTRIKSEIDQDPMGRETFELVGRLDKQRGIFLWEIPRESLTQEQRMFRENTNIIRKRPNSEEKCHKCEECGKGFVRKAHFIQHQRVHTGEKPFQCNECGKSFSRSSFVIEHQRIHTGERPYECNYCGKTFSVSSTLIRHQRIHTGERPYQCNQCKQSFSQRRSLVKHQRIHTGEKPHKCSDCGKAFSWKSHLIEHQRTHTGEKPYHCTKCKKSFSRNSLLVEHQRIHTGERPHKCGECGKAFRLSTYLIQHQKIHTGEKPFLCIECGKSFSRSSFLIEHQRIHTGERPYQCKECGKSFSQLCNLTRHQRIHTGDKPHKCEECGKAFSRSSGLIQHQRIHTREKTYPYNETKESFDPNCSLVIQQEVYPKEKSYKCDECGKTFSVSAHLVQHQRIHTGEKPYLCTVCGKSFSRSSFLIEHQRIHTGERPYLCRQCGKSFSQLCNLIRHQGVHTGNKPHKCDECGKAFSRNSGLIQHQRIHTGEKPYKCEKCDKSFSQQRSLVNHQKIHAEVKTQETHECDACGEAFNCRISLIQHQKLHTAWMQ

SEQ ID NO: 412 - protein, 531 aa, Homo sapiens
MGRETFELVGRLDKQRGIFLWEIPRESLTQEQRMFRENTNIIRKRPNSEEKCHKCEECGKGFVRKAHFIQHQRVHTGEKPFQCNECGKSFSRSSFVIEHQRIHTGERPYECNYCGKTFSVSSTLIRHQRIHTGERPYQCNQCKQSFSQRRSLVKHQRIHTGEKPHKCSDCGKAFSWKSHLIEHQRTHTGEKPYHCTKCKKSFSRNSLLVEHQRIHTGERPHKCGECGKAFRLSTYLIQHQKIHTGEKPFLCIECGKSFSRSSFLIEHQRIHTGERPYQCKECGKSFSQLCNLTRHQRIHTGDKPHKCEECGKAFSRSSGLIQHQRIHTREKTYPYNETKESFDPNCSLVIQQEVYPKEKSYKCDECGKTFSVSAHLVQHQRIHTGEKPYLCTVCGKSFSRSSFLIEHQRIHTGERPYLCRQCGKSFSQLCNLIRHQGVHTGNKPHKCDECGKAFSRNSGLIQHQRIHTGEKPYKCEKCDKSFSQQRSLVNHQKIHAEVKTQETHECDACGEAFNCRISLIQHQKLHTAWMQ

SEQ ID NO: 413 - protein, 584 aa, Homo sapiens
MMENYGNLVSLDVLNRDKDEEPTVKQEIEEIEEEVEPQGVIVTRIKSEIDQDPMGRETFELVGRLDKQRGIFLWEIPRESLTQEQRMFRENTNIIRKRPNSEEKCHKCEECGKGFVRKAHFIQHQRVHTGEKPFQCNECGKSFSRSSFVIEHQRIHTGERPYECNYCGKTFSVSSTLIRHQRIHTGERPYQCNQCKQSFSQRRSLVKHQRIHTGEKPHKCSDCGKAFSWKSHLIEHQRTHTGEKPYHCTKCKKSFSRNSLLVEHQRIHTGERPHKCGECGKAFRLSTYLIQHQKIHTGEKPFLCIECGKSFSRSSFLIEHQRIHTGERPYQCKECGKSFSQLCNLTRHQRIHTGDKPHKCEECGKAFSRSSGLIQHQRIHTREKTYPYNETKESFDPNCSLVIQQEVYPKEKSYKCDECGKTFSVSAHLVQHQRIHTGEKPYLCTVCGKSFSRSSFLIEHQRIHTGERPYLCRQCGKSFSQLCNLIRHQGVHTGNKPHKCDECGKAFSRNSGLIQHQRIHTGEKPYKCEKCDKSFSQQRSLVNHQKIHAEVKTQETHECDACGEAFNCRISLIQHQKLHTAWMQ

SEQ ID NO: 414 - protein, 751 aa, Homo sapiens
MEDLSSPDSTLLQGGHNLLSSASFQEAVTFKDVIVDFTQEEWKQLDPGQRDLFRDVTLENYTHLVSIGLQVSKPDVISQLEQGTEPWIMEPSIPVGTCADWETRLENSVSAPEPDISEEELSPEVIVEKHKRDDSWSSNLLESWEYEGSLERQQANQQTLPKEIKVTEKTIPSWEKGPVNNEFGKSVNVSSNLVTQEPSPEETSTKRSIKQNSNPVKKEKSCKCNECGKAFSYCSALIRHQRTHTGEKPYKCNECEKAFSRSENLINHQRIHTGDKPYKCDQCGKGFIEGPSLTQHQRIHTGEKPYKCDECGKAFSQRTHLVQHQRIHTGEKPYTCNECGKAFSQRGHFMEHQKIHTGEKPFKCDECDKTFTRSTHLTQHQKIHTGEKTYKCNECGKAFNGPSTFIRHHMIHTGEKPYECNECGKAFSQHSNLTQHQKTHTGEKPYDCAECGKSFSYWSSLAQHLKIHTGEKPYKCNECGKAFSYCSSLTQHRRIHTREKPFECSECGKAFSYLSNLNQHQKTHTQEKAYECKECGKAFIRSSSLAKHERIHTGEKPYQCHECGKTFSYGSSLIQHRKIHTGERPYKCNECGRAFNQNIHLTQHKRIHTGAKPYECAECGKAFRHCSSLAQHQKTHTEEKPYQCNKCEKTFSQSSHLTQHQRIHTGEKPYKCNECDKAFSRSTHLTEHQNTHTGEKPYNCNECRKTFSQSTYLIQHQRIHSGEKPFGCNDCGKSFRYRSALNKHQRLHPGI

SEQ ID NO: 415 - protein, 578 aa, Homo sapiens
MAEESRKPSAPSPPDQTPEEDLVIVKVEEDHGWDQESSLHESNPLGQEVFRLRFRQLRYQETLGPREALIQLRALCHQWLRPDLNTKEQILELLVLEQFLTILPEELQTLVKEHQLENGEEVVTLLEDLERQIDILGRPVSARVHGHRVLWEEVVHSASAPEPPNTQLQSEATQHKSPVPQESQERAMSTSQSPTRSQKGSSGDQEMTATLLTAGFQTLEKIEDMAVSLIREEWLLDPSQKDLCRDNRPENFRNMFSLGGETRSENRELASKQVISTGIQPHGETAAKCNGDVIRGLEHEEARDLLGRLERQRGNPTQERRHKCDECGKSFAQSSGLVRHWRIHTGEKPYQCNVCGKAFSYRSALLSHQDIHNKVKRYHCKECGKAFSQNTGLILHQRIHTGEKPYQCNQCGKAFSQSAGLILHQRIHSGERPYECNECGKAFSHSSHLIGHQRIHTGEKPYECDECGKTFRRSSHLIGHQRSHTGEKPYKCNECGRAFSQKSGLIEHQRIHTGERPYKCKECGKAFNGNTGLIQHLRIHTGEKPYQCNECGKAFIQRSSLIRHQRIHSGEKSESISV

SEQ ID NO: 416 - protein, 158 aa, Homo sapiens
MAEESRKPSAPSPPDQTPEEDLVIVKVEEDHGWDQESSLHESNPLGQEVFRLRFRQLRYQETLGPREALIQLRALCHQWLRPDLNTKEQILELLVLEQFLTILPEELQTLVKEHQLENGEEVVTLLEDLERQIDILGRPVSRRRSQLAYMDIGYSGRR

SEQ ID NO: 417 - protein, 128 aa, Homo sapiens
MPSTEGFGGLDRLVLPPPPQVLPLLSPARGRIQFSGRKSTGSWVTQMENLLLAQPLPDDCEILCGWRSLLHLTFLIGFAPHFPHWFCNHHCHQHPPSHLTEVLQSSGELAHQLAPSRCSMRAEGTHRG

SEQ ID NO: 418 - protein, 126 aa, Homo sapiens
MISFHVIFLSLGRGKLFLPVNFCFLKLKNSQVRIPKDFTCNLHVLFRTVQGEDRNTMFRGHWSIYSRNFPLAVVPAYVTEDGKNTSHRASGQFCNALSQGEIPSSLQLVNSYALEPRTDMPCNFLT

SEQ ID NO: 419 - protein, 553 aa, Homo sapiens
MDSVASEDVAVNFTLEEWALLDPSQKKLYRDVMRETFRNLACVGKKWEDQSIEDWYKNQGRILRNHMEEGLSESKEYDQCGEAFSQILNLNLNKKIPTIVRPCECSLCGKVFMHHSSLSRHIRSHLGHKPYDYQEYGEKPYKCKQCGKAFSSCQSFRRHERTHTGEKPYACPECGKAFISLPSVRRHMIKHTGDGPYKCQECGKAFDRPSLFQIHERTHTGEKPYECQECAKAFISLPSFQRHMIRHTGDGPYKCQECGKAFDRPSLFRIHERTHTGEKPHECKQCGKAFISFTNFQSHMIRHTGDGPYKCKVCGRAFIFPSYVRKHERTHTGEKPYECNKCGKTFSSSSNVRTHERTHTGEKPYECKECGKAFISLPSVRRHMIKHTGDGPYKCQVCGRAFDCPSSFQIHERTHTGEKPYECQVCGKAFISLKRIRKHMILHTGDGPYKCQVCGKAFDCPSSVRTHERTHTGEKPYECKECGKAFNYASSIRIHERTHTGEKPYECKQCGKTFSYSSSFQRHERAHNGDKPYVKNVGKLSFITQPSNTCENE

SEQ ID NO: 420 - protein, 480 aa, Homo sapiens
MATVPGLQPLPTLEQDLEQEEILIVKVEEDFCLEEEPSVETEDPSPETFRQLFRLFCYQEVAGPREALSRLWELCCRWLRPELRTKEQILELLVLEQFLTVLPGEIQARVREQQPESGEEAVVLVEGLQRKPRKHRQRGSELLSDDEVPLGIGGQFLKHQAEAQPEDLSLEEEARFSSQQPPAQLSHRPQRGPLLWPERGPPAPRHQEMASASPFLSAWSQVPVNLEDVAVYLSGEEPRCMDPAQRDAPLENEGPGIQLEDGGDGREDAPLRMEWYRVLSARCQGPGHPLPGQRPAPVRGLVRPDQPRGGPPPGRRASHGADKPYTCPECGKGFSKTSHLTKHQRTHTGERPYKCLVCGKGFSDRSNFSTHQRVHTGEKPYPCPECGKRFSQSSSLVIHRRTHSGERPYACTQCGKRFNNSSHFSAHRRTHTGEKPYTCPACGRGFRRGTDLHKHQRTHMGAGSLPTLQPVAPGGPGAKA

SEQ ID NO: 421 - protein, 441 aa, Homo sapiens
MATVPGLQPLPTLEQDLEQEEILIVKVEEDFCLEEEPSVETEDPSPETFRQLFRLFCYQEVAGPREALSRLWELCCRWLRPELRTKEQILELLVLEQFLTVLPGEIQARVREQQPESGEEAVVLVEGLQRKPRKHRQRGSELLSDDEVPLGIGGQFLKHQAEAQPEDLSLEEEARFSSQQPPAQLSHRPQRGPLLWPERGPPAPRHQEMASASPFLSAWSQVPVNLEDVAVYLSGEEPRCMDPAQRDAPLENEGPGIQLEDGGDGREDAPLRMEWYRVLSARCQGPGHPLPGQRPAPVRGLVRPDQPRGGPPPGRRASHGADKPYTCPECGKGFSKTSHLTKHQRTHTGERPYKCLVCGKGFSDRSNFSTHQRVHTGEKPYPCPECGKRFSQSSSLVIHRRTHSGERPYACTQCGKRFNNSSHFSAHRRTHTGHILRSGCT

SEQ ID NO: 422 - protein, 541 aa, Homo sapiens
MPRRKQSHPQPVKCEGVKVDTEDSLDEGPGALVLESDLLLGQDLEFEEEEEEEEGDGNSDQLMGFERDSEGDSLGARPGLPYGLSDDESGGGRALSAESEVEEPARGPGEARGERPGPACQLCGGPTGEGPCCGAGGPGGGPLLPPRLLYSCRLCTFVSHYSSHLKRHMQTHSGEKPFRCGRCPYASAQLVNLTRHTRTHTGEKPYRCPHCPFACSSLGNLRRHQRTHAGPPTPPCPTCGFRCCTPRPARPPSPTEQEGAVPRRPEDALLLPDLSLHVPPGGASFLPDCGQLRGEGEGLCGTGSEPLPELLFPWTCRGCGQELEEGEGSRLGAAMCGRCMRGEAGGGASGGPQGPSDKGFACSLCPFATHYPNHLARHMKTHSGEKPFRCARCPYASAHLDNLKRHQRVHTGEKPYKCPLCPYACGNLANLKRHGRIHSGDKPFRCSLCNYSCNQSMNLKRHMLRHTGEKPFRCATCAYTTGHWDNYKRHQKVHGHGGAGGPGLSASEGWAPPHSPPSVLSSRGPPALGTAGSRAVHTDSS

SEQ ID NO: 423 - protein, 479 aa, Homo sapiens
MGFERDSEGDSLGARPGLPYGLSDDESGGGRALSAESEVEEPARGPGEARGERPGPACQLCGGPTGEGPCCGAGGPGGGPLLPPRLLYSCRLCTFVSHYSSHLKRHMQTHSGEKPFRCGRCPYASAQLVNLTRHTRTHTGEKPYRCPHCPFACSSLGNLRRHQRTHAGPPTPPCPTCGFRCCTPRPARPPSPTEQEGAVPRRPEDALLLPDLSLHVPPGGASFLPDCGQLRGEGEGLCGTGSEPLPELLFPWTCRGCGQELEEGEGSRLGAAMCGRCMRGEAGGGASGGPQGPSDKGFACSLCPFATHYPNHLARHMKTHSGEKPFRCARCPYASAHLDNLKRHQRVHTGEKPYKCPLCPYACGNLANLKRHGRIHSGDKPFRCSLCNYSCNQSMNLKRHMLRHTGEKPFRCATCAYTTGHWDNYKRHQKVHGHGGAGGPGLSASEGWAPPHSPPSVLSSRGPPALGTAGSRAVHTDSS

SEQ ID NO: 424 - protein, 207 aa, Homo sapiens
MCGRCMRGEAGGGASGGPQGPSDKGFACSLCPFATHYPNHLARHMKTHSGEKPFRCARCPYASAHLDNLKRHQRVHTGEKPYKCPLCPYACGNLANLKRHGRIHSGDKPFRCSLCNYSCNQSMNLKRHMLRHTGEKPFRCATCAYTTGHWDNYKRHQKVHGHGGAGGPGLSASEGWAPPHSPPSVLSSRGPPALGTAGSRAVHTDSS

SEQ ID NO: 425 - protein, 1267 aa, Homo sapiens
MGDMKTPDFDDLLAAFDIPDPTSLDAKEAIQTPSEENESPLKPPGICMDESVSLSHSGSAPDVPAVSVIVKNTSRQESFEAEKDHITPSLLHNGFRGSDLPPDPHNCGKFDSTFMNGDSARSFPGKLEPPKSEPLPTFNQFSPISSPEPEDPIKDNGFGIKPKHSDSYFPPPLGCGAVGGPVLEALAKFPVPELHMFDHFCKKEPKPEPLPLGSQQEHEQSGQNTVEPHKDPDATRFFGEALEFNSHPSNSIGESKGLARELGTCSSVPPRQRLKPAHSKLSSCVAALVALQAKRVASVTKEDQPGHTKDLSGPTKESSKGSPKMPKSPKSPRSPLEATRKSIKPSDSPRSICSDSSSKGSPSVAASSPPAIPKVRIKTIKTSSGEIKRTVTRILPDPDDPSKSPVGSPLGSAIAEAPSEMPGDEVPVEEHFPEAGTNSGSPQGARKGDESMTKASDSSSPSCSSGPRVPKGAAPGSQTGKKQQSTALQASTLAPANLLPKAVHLANLNLVPHSVAASVTAKSSVQRRSQPQLTQMSVPLVHQVKKAAPLIVEVFNKVLHSSNPVPLYAPNLSPPADSRIHVPASGYCCLECGDAFALEKSLSQHYGRRSVHIEVLCTLCSKTLLFFNKCSLLRHARDHKSKGLVMQCSQLLVKPISADQMFVSAPVNSTAPAAPAPSSSPKHGLTSGSASPPPPALPLYPDPVRLIRYSIKCLECHKQMRDYMVLAAHFQRTTEETEGLTCQVCQMLLPNQCSFCAHQRIHAHKSPYCCPECGVLCRSAYFQTHVKENCLHYARKVGYRCIHCGVVHLTLALLKSHIQERHCQVFHKCAFCPMAFKTASSTADHSATQHPTQPHRPSQLIYKCSCEMVFNKKRHIQQHFYQNVSKTQVGVFKCPECPLLFVQKPELMQHVKSTHGVPRNVDELSSLQSSADTSSSRPGSRVPTEPPATSVAARSSSLPSGRWGRPEAHRRVEARPRLRNTGWTCQECQEWVPDRESYVSHMKKSHGRTLKRYPCRQCEQSFHTPNSLRKHIRNNHDTVKKFYTCGYCTEDSPSFPRPSLLESHISLMHGIRNPDLSQTSKVKPPGGHSPQVNHLKRPVSGVGDAPGTSNGATVSSTKRHKSLFQCAKCSFATDSGLEFQSHIPQHQVDSSTAQCLLCGLCYTSASSLSRHLFIVHKVRDQEEEEEEEAAAAEMAVEVAEPEEGSGEEVPMETRENGLEECAGEPLSADPEARRLLGPAPEDDGGHNDHSQPQASQDQDSHTLSPQV

SEQ ID NO: 426 - protein, 1411 aa, Homo sapiens
MSLSSGASGGKGVDANPVETYDSGDEWDIGVGNLIIDLDADLEKDQQKLEMSGSKEVGIPAPNAVATLPDNIKFVTPVPGPQGKEGKSKSKRSKSGKDTSKPTPGTSLFTPSEGAASKKEVQGRSGDGANAGGLVAAIAPKGSEKAAKASRSVAGSKKEKENSSSKSKKERSEGVGTCSEKDPGVLQPVPLGGRGGQYDGSAGVDTGAVEPLGSIAIEPGAALNPLGTKPEPEEGENECRLLKKVKSEKMESPVSTPAVLPIHLLVPVVNNDISSPCEQIMVRTRSVGVNTCDVALATEPECLGPCEPGTSVNLEGIVWQETEDGMLVVNVTWRNKTYVGTLLDCTRHDWAPPRFCDSPTSDLEMRNGRGRGKRMRPNSNTPVNETATASDSKGTSNSSKTRAGANSKGRRGSQNSSEHRPPASSTSEDVKASPSSANKRKNKPLSDMELNSSSEDSKGSKRVRTNSMGSATGPLPGTKVEPTVLDRNCPSPVLIDCPHPNCNKKYKHINGLKYHQAHAHTDDDSKPEADGDSEYGEEPILHADLGSCNGASVSQKGSLSPARSATPKVRLVEPHSPSPSSKFSTKGLCKKKLSGEGDTDLGALSNDGSDDGPSVMDETSNDAFDSLERKCMEKEKCKKPSSLKPEKIPSKSLKSARPIAPAIPPQQIYTFQTATFTAASPGSSSGLTATVAQAMPNSPQLKPIQPKPTVMGEPFTVNPALTPAKDKKKKDKKKKESSKELESPLTPGKVCRAEEGKSPFRESSGDGMKMEGLLNGSSDPHQSRLASIKAEADKIYSFTDNAPSPSIGGSSRLENTTPTQPLTPLHVVTQNGAEASSVKTNSPAYSDISDAGEDGEGKVDSVKSKDAEQLVKEGAKKTLFPPQPQSKDSPYYQGFESYYSPSYAQSSPGALNPSSQAGVESQALKTKRDEEPESIEGKVKNDICEEKKPELSSSSQQPSVIQQRPNMYMQSLYYNQYAYVPPYGYSDQSYHTHLLSTNTAYRQQYEEQQKRQSLEQQQRGVDKKAEMGLKEREAALKEEWKQKPSIPPTLTKAPSLTDLVKSGPGKAKEPGADPAKSVIIPKLDDSSKLPGQAPEGLKVKLSDASHLSKEASEAKTGAECGRQAEMDPILWYRQEAEPRMWTYVYPAKYSDIKSEDERWKEERDRKLKEERSRSKDSVPKEDGKESTSSDCKLPTSEESRLGSKEPRPSVHVPVSSPLTQHQSYIPYMHGYSYSQSYDPNHPSYRSMPAVMMQNYPGSYLPSSYSFSPYGSKVSGGEDADKARASPSVTCKSSSESKALDILQQHASHYKSKSPTISDKTSQERDRGGCGVVGGGGSCSSVGGASGGERSVDRPRTSPSQRLMSTHHHHHHLGYSLLPAQYNLPYAAGLSSTAIVASQQGSTPSLYPPPRR

SEQ ID NO: 427 - protein, 250 aa, Homo sapiens
MSLSSGASGGKGVDANPVETYDSGDEWDIGVGNLIIDLDADLEKDQQKLEMSGSKEVGIPAPNAVATLPDNIKFVTPVPGPQGKEGKSKSKRSKSGKDTSKPTPGTSLFTPSEGAASKKEVQGRSGDGANAGGLVAAIAPKGSEKAAKASRSVAGSKKEKENSSSKSKKERSEGVGTCSEKDPGVLQPVPLGGRGGQYDGSAGVDTGAVEPLGSIAIEPGAALNPLGTKPEPEEGENECRLLKKVKSEKQ

SEQ ID NO: 428 - protein, 511 aa, Homo sapiens
MVDSTEYEVASQPEVETSPLGDGASPGPEQVKLKKEISLLNGVCLIVGNMIGSGIFVSPKGVLIYSASFGLSLVIWAVGGLFSVFGALCYAELGTTIKKSGASYAYILEAFGGFLAFIRLWTSLLIIEPTSQAIIAITFANYMVQPLFPSCFAPYAASRLLAAACICLLTFINCAYVKWGTLVQDIFTYAKVLALIAVIVAGIVRLGQGASTHFENSFEGSSFAVGDIALALYSALFSYSGWDTLNYVTEEIKNPERNLPLSIGISMPIVTIIYILTNVAYYTVLDMRDILASDAVAVTFADQIFGIFNWIIPLSVALSCFGGLNASIVAASRLFFVGSREGHLPDAICMIHVERFTPVPSLLFNGIMALIYLCVEDIFQLINYYSFSYWFFVGLSIVGQLYLRWKEPDRPRPLKLSVFFPIVFCLCTIFLVAVPLYSDTINSLIGIAIALSGLPFYFLIIRVPEHKRPLYLRRIVGSATRYLQVLCMSVAAEMDLEDGGEMPKQRDPKSN

SEQ ID NO: 429 - protein, 1748 aa, Homo sapiens
MSARAAAAKSTAMEETAIWEQHTVTLHRAPGFGFGIAISGGRDNPHFQSGETSIVISDVLKGGPAEGQLQENDRVAMVNGVSMDNVEHAFAVQQLRKSGKNAKITIRRKKKVQIPVSRPDPEPVSDNEEDSYDEEIHDPRSGRSGVVNRRSEKIWPRDRSASRERSLSPRSDRRSVASSQPAKPTKVTLVKSRKNEEYGLRLASHIFVKEISQDSLAARDGNIQEGDVVLKINGTVTENMSLTDAKTLIERSKGKLKMVVQRDERATLLNVPDLSDSIHSANASERDDISEIQSLASDHSGRSHDRPPRRSRSRSPDQRSEPSDHSRHSPQQPSNGSLRSRDEERISKPGAVSTPVKHADDHTPKTVEEVTVERNEKQTPSLPEPKPVYAQVGQPDVDLPVSPSDGVLPNSTHEDGILRPSMKLVKFRKGDSVGLRLAGGNDVGIFVAGVLEDSPAAKEGLEEGDQILRVNNVDFTNIIREEAVLFLLDLPKGEEVTILAQKKKDVYRRIVESDVGDSFYIRTHFEYEKESPYGLSFNKGEVFRVVDTLYNGKLGSWLAIRIGKNHKEVERGIIPNKNRAEQLASVQYTLPKTAGGDRADFWRFRGLRSSKRNLRKSREDLSAQPVQTKFPAYERVVLREAGFLRPVTIFGPIADVAREKLAREEPDIYQIAKSEPRDAGTDQRSSGIIRLHTIKQIIDQDKHALLDVTPNAVDRLNYAQWYPIVVFLNPDSKQGVKTMRMRLCPESRKSARKLYERSHKLRKNNHHLFTTTINLNSMNDGWYGALKEAIQQQQNQLVWVSEGKADGATSDDLDLHDDRLSYLSAPGSEYSMYSTDSRHTSDYEDTDTEGGAYTDQELDETLNDEVGTPPESAITRSSEPVREDSSGMHHENQTYPPYSPQAQPQPIHRIDSPGFKPASQQKAEASSPVPYLSPETNPASSTSAVNHNVNLTNVRLEEPTPAPSTSYSPQADSLRTPSTEAAHIMLRDQEPSLSSHVDPTKVYRKDPYPEEMMRQNHVLKQPAVSHPGHRPDKEPNLTYEPQLPYVEKQASRDLEQPTYRYESSSYTDQFSRNYEHRLRYEDRVPMYEEQWSYYDDKQPYPSRPPFDNQHSQDLDSRQHPEESSERGYFPRFEEPAPLSYDSRPRYEQAPRASALRHEEQPAPGYDTHGRLRPEAQPHPSAGPKPAESKQYFEQYSRSYEQVPPQGFTSRAGHFEPLHGAAAVPPLIPSSQHKPEALPSNTKPLPPPPTQTEEEEDPAMKPQSVLTRVKMFENKRSASLETKKDVNDTGSFKPPEVASKPSGAPIIGPKPTSQNQFSEHDKTLYRIPEPQKPQLKPPEDIVRSNHYDPEEDEEYYRKQLSYFDRRSFENKPPAHIAASHLSEPAKPAHSQNQSNFSSYSSKGKPPEADGVDRSFGEKRYEPIQATPPPPPLPSQYAQPSQPVTSASLHIHSKGAHGEGNSVSLDFQNSLVSKPDPPPSQNKPATFRPPNREDTAQAAFYPQKSFPDKAPVNGTEQTQKTVTPAYNRFTPKPYTSSARPFERKFESPKFNHNLLPSETAHKPDLSSKTPTSPKTLVKSHSLAQPPEFDSGVETFSIHAEKPKYQINNISTVPKAIPVSPSAVEEDEDEDGHTVVATARGIFNSNGGVLSSIETGVSIIIPQGAIPEGVEQEIYFKVCRDNSILPPLDKEKGETLLSPLVMCGPHGLKFLKPVELRLPHCDPKTWQNKCLPGDPNYLVGANCVSVLIDHF

SEQ ID NO: 430 - protein, 1668 aa, Homo sapiens
MSARAAAAKSTAMEETAIWEQHTVTLHRAPGFGFGIAISGGRDNPHFQSGETSIVISDVLKGGPAEGQLQENDRVAMVNGVSMDNVEHAFAVQQLRKSGKNAKITIRRKKKVQIPVSRPDPEPVSDNEEDSYDEEIHDPRSGRSGVVNRRSEKIWPRDRSASRERSLSPRSDRRSVASSQPAKPTKVTLVKSRKNEEYGLRLASHIFVKEISQDSLAARDGNIQEGDVVLKINGTVTENMSLTDAKTLIERSKGKLKMVVQRDERATLLNVPDLSDSIHSANASERDDISEIQSLASDHSGRSHDRPPRRSRSRSPDQRSEPSDHSRHSPQQPSNGSLRSRDEERISKPGAVSTPVKHADDHTPKTVEEVTVERNEKQTPSLPEPKPVYAQVGQPDVDLPVSPSDGVLPNSTHEDGILRPSMKLVKFRKGDSVGLRLAGGNDVGIFVAGVLEDSPAAKEGLEEGDQILRVNNVDFTNIIREEAVLFLLDLPKGEEVTILAQKKKDVYRRIVESDVGDSFYIRTHFEYEKESPYGLSFNKGEVFRVVDTLYNGKLGSWLAIRIGKNHKEVERGIIPNKNRAEQLASVQYTLPKTAGGDRADFWRFRGLRSSKRNLRKSREDLSAQPVQTKFPAYERVVLREAGFLRPVTIFGPIADVAREKLAREEPDIYQIAKSEPRDAGTDQRSSGIIRLHTIKQIIDQDKHALLDVTPNAVDRLNYAQWYPIVVFLNPDSKQGVKTMRMRLCPESRKSARKLYERSHKLRKNNHHLFTTTINLNSMNDGWYGALKEAIQQQQNQLVWVSEGKADGATSDDLDLHDDRLSYLSAPGSEYSMYSTDSRHTSDYEDTDTEGGAYTDQELDETLNDEVGTPPESAITRSSEPVREDSSGMHHENQTYPPYSPQAQPQPIHRIDSPGFKPASQQVYRKDPYPEEMMRQNHVLKQPAVSHPGHRPDKEPNLTYEPQLPYVEKQASRDLEQPTYRYESSSYTDQFSRNYEHRLRYEDRVPMYEEQWSYYDDKQPYPSRPPFDNQHSQDLDSRQHPEESSERGYFPRFEEPAPLSYDSRPRYEQAPRASALRHEEQPAPGYDTHGRLRPEAQPHPSAGPKPAESKQYFEQYSRSYEQVPPQGFTSRAGHFEPLHGAAAVPPLIPSSQHKPEALPSNTKPLPPPPTQTEEEEDPAMKPQSVLTRVKMFENKRSASLETKKDVNDTGSFKPPEVASKPSGAPIIGPKPTSQNQFSEHDKTLYRIPEPQKPQLKPPEDIVRSNHYDPEEDEEYYRKQLSYFDRRSFENKPPAHIAASHLSEPAKPAHSQNQSNFSSYSSKGKPPEADGVDRSFGEKRYEPIQATPPPPPLPSQYAQPSQPVTSASLHIHSKGAHGEGNSVSLDFQNSLVSKPDPPPSQNKPATFRPPNREDTAQAAFYPQKSFPDKAPVNGTEQTQKTVTPAYNRFTPKPYTSSARPFERKFESPKFNHNLLPSETAHKPDLSSKTPTSPKTLVKSHSLAQPPEFDSGVETFSIHAEKPKYQINNISTVPKAIPVSPSAVEEDEDEDGHTVVATARGIFNSNGGVLSSIETGVSIIIPQGAIPEGVEQEIYFKVCRDNSILPPLDKEKGETLLSPLVMCGPHGLKFLKPVELRLPHCDPKTWQNKCLPGDPNYLVGANCVSVLIDHF

SEQ ID NO: 431 - protein, 611 aa, Homo sapiens
MASTWAIQAHMDQDEPLEVKIEEEKYTTRQDWDLRKNNTHSREVFRQYFRQFCYQETSGPREALSRLRELCHQWLRPETHTKEQILELLVLEQFLTILPEELQAWVQEQHPESGEEVVTVLEDLERELDEPGEQVSVHTGEQEMFLQETVRLRKEGEPSMSLQSMKAQPKYESPELESQQEQVLDVETGNEYGNLKQEVSEEMEPHGKTSSKFENDMSKSARCGETREPEEITEEPSACSREDKQPTCDENGVSLTENSDHTEHQRICPGEESYGCDDCGKAFSQHSHLIEHQRIHTGDRPYKCEECGKAFRGRTVLIRHKIIHTGEKPYKCNECGKAFGRWSALNQHQRLHTGEKHYHCNDCGKAFSQKAGLFHHIKIHTRDKPYQCTQCNKSFSRRSILTQHQGVHTGAKPYECNECGKAFVYNSSLVSHQEIHHKEKCYQCKECGKSFSQSGLIQHQRIHTGEKPYKCDVCEKAFIQRTSLTEHQRIHTGERPYKCDKCGKAFTQRSVLTEHQRIHTGERPYKCDECGNAFRGITSLIQHQRIHTGEKPYQCDECGKAFRQRSDLSKHQRIHNRRGTYVCKECGKSFRQNSALTQHQTIHKGEKSVSV

SEQ ID NO: 432 - protein, 604 aa, Homo sapiens
MASTWAIQAHMDQDEPLEVKIEEEKYTTRQDWDLRKNNTHSREVFRQYFRQFCYQETSGPREALSRLRELCHQWLRPETHTKEQILELLVLEQFLTILPEELQAWVQEQHPESGEEVVTVLEDLERELDEPGEQVSVHTGEQEMFLQETVRLRKEGEPSMSLQSMKAQPKYESPELESQQEQVLDVETGNEYGNLKQEVSEEMEPHGKTSSKFENDMSKSARCGETREPEEITEEPSACSREDKQPTCDENGVSLTENSDHTEHQRICPGEESYGCDDCGKAFSQHSHLIEHQRIHTGDRPYKCEECGKAFRGRTVLIRHKIIHTGEKPYKCNECGKAFGRWSALNQHQRLHTGEKHYHCNDCGKAFSQKAGLFHHIKIHTRDKPYQCTQCNKSFSRRSILTQHQGVHTGAKPYECNECGKAFVYNSSLVSHQEIHHKEKCYQCKECGKSFSQSGLIQHQRIHTGEKPYKCDVCEKAFIQRTSLTEHQRIHTGERPYKCDKCGKAFTQRSVLTEHQRIHTGERPYKCDECGNAFRGITSLIQHQRIHTGEKPYQCDECGKAFRQRKKTSYKEILLKNHSEPQAGVNLLLSSLIPEWQSCFRRDL

SEQ ID NO: 433 - protein, 544 aa, Homo sapiens
MLKEHPEMAEAPQQQLGIPVVKLEKELPWGRGREDPSPETFRLRFRQFRYQEAAGPQEALRELQELCRRWLRPELHTKEQILELLVLEQFLTILPREFYAWIREHGPESGKALAAMVEDLTERALEAKAVPCHRQGEQEETALCRGAWEPGIQLGPVEVKPEWGMPPGEGVQGPDPGTEEQLSQDPGDETRAFQEQALPVLQAGPGLPAVNPRDQEMAAGFFTAGSQGLGPFKDMALAFPEEEWRHVTPAQIDCFGEYVEPQDCRVSPGGGSKEKEAKPPQEDLKGALVALTSERFGEASLQGPGLGRVCEQEPGGPAGSAPGLPPPQHGAIPLPDEVKTHSSFWKPFQCPECGKGFSRSSNLVRHQRTHEEKSYGCVECGKGFTLREYLMKHQRTHLGKRPYVCSECWKTFSQRHHLEVHQRSHTGEKPYKCGDCWKSFSRRQHLQVHRRTHTGEKPYTCECGKSFSRNANLAVHRRAHTGEKPYGCQVCGKRFSKGERLVRHQRIHTGEKPYHCPACGRSFNQRSILNRHQKTQHRQEPLVQ

SEQ ID NO: 434 - protein, 472 aa, Homo sapiens
MLKEHPEMAEAPQQQLGIPVVKLEKELPWGRGREDPSPETFRLRFRQFRYQEAAGPQEALRELQELCRRWLRPELHTKEQILELLVLEQFLTILPREFYAWIREHGPESGKALAAMVEDLTERALEAKAVPCHRQGEQEETALCRGAWEPGIQLGPVEVKPEWGMPPGEGVQGPDPGTEEQLSQDPGDETRAFQEQGGGSKEKEAKPPQEDLKGALVALTSERFGEASLQGPGLGRVCEQEPGGPAGSAPGLPPPQHGAIPLPDEVKTHSSFWKPFQCPECGKGFSRSSNLVRHQRTHEEKSYGCVECGKGFTLREYLMKHQRTHLGKRPYVCSECWKTFSQRHHLEVHQRSHTGEKPYKCGDCWKSFSRRQHLQVHRRTHTGEKPYTCECGKSFSRNANLAVHRRAHTGEKPYGCQVCGKRFSKGERLVRHQRIHTGEKPYHCPACGRSFNQRSILNRHQKTQHRQEPLVQ

SEQ ID NO: 435 - protein, 328 aa, Homo sapiens [sequence omitted]

SEQ ID NO: 436 - protein, 162 aa, Homo sapiens
MLKEHPEMAEAPQQQLGIPVVKLEKELPWGRGREDPSPETFRLRFRQFRYQEAAGPQEALRELQELCRRWLRPELHTKEQILELLVLEQFLTILPREFYAWIREHGPESGKALAAMVEDLTERALEAKAVGSMPQAGRAGGNSTLQRRLGARHPAGASGGQA

SEQ ID NO: 437 - protein, 403 aa, Homo sapiens
MEPAGPCGFCPAGEVQPARYTCPRCNAPYCSLRCYRTHGTCAENFYRDQVLGELRGCSAPPSRLASALRRLRQQRETEDEPGEAGLSSGPAPGGLSGLWERLAPGEKAAFERLLSRGEAGRLLPPWRPWWWNRGAGPQLLEELDNAPGSDAAELELAPARTPPDSVKDASAAEPAAAERVLGDVPGACTPVVPTRIPAIVSLSRGPVSPLVRFQLPNVLFAYAHTLALYHGGDDALLSDFCATLLGVSGALGAQQVFASAEEALQAAAHVLEAGEHPPGPLGTRGAMHEVARILLGEGPTNQKGYTLAALGDLAQTLGRARKQAVAREERDHLYRARKKCQFLLAWTNENEAALTPLALDCARAHQAHAVVAEEVAALTGELERLWGGPVPPAPRTLIEELPS

SEQ ID NO: 438 - protein, 494 aa, Homo sapiens
MSGEATVLAYHAPEEQEGLLVVKVEEENYVLDQDFGLQENPWSQEVFRQKFRQFSYSDSTGPREALSRLRELCCQWLRPEVHSKEQILELLMLEQFLAILPEELQAWLREHRPENGEEAVTMLEELEKELEEPRQQDTTHGQEMFWQEMTSTGALKSLSLNSPVQPLENQCKTETQESQAFQERDGRMVAGKVLMAKQEIVECVASAAMISPGKLPGETHSQRIAEEALGGLDNSKKQKGNAAGNKISQLPSQDRHFSLATFNRRIPTEHSVLESHESEGSFSMNSNDITQQSVDTREKLYECFDCGKAFCQSSKLIRHQRIHTGERPYACKECGKAFSLSSDLVRHQRIHSGEKPYECCECGKAFRGSSELIRHRRIHTGEKPYECGECGKAFSRSSALIQHKKIHTGDKSYECIACGKAFGRSSILIEHQRIHTGEKPYECNECGKSFNQSSALTQHQRIHTGEKPYECSECRKTFRHRSGLMQHQRTHTRV

SEQ ID NO: 439 - protein, 221 aa, Homo sapiens
MSGEATVLAYHAPEEQEGLLVVKVEEENYVLDQDFGLQENPWSQEVFRQKFRQFSYSDSTGPREALSRLRELCCQWLRPEVHSKEQILELLMLEQFLAILPEELQAWLREHRPENGEEAVTMLEELEKELEEPRQQDTTHGQEMFWQEMTSTGALKSLSLNSPVQPLENQCKTETQESQAFQERDGVSLCHPGWSAVVQPQLTAVALNPWVKVILLPQPPE

SEQ ID NO: 440 - protein, 473 aa, Homo sapiens
MMTKVLGMAPVLGPRPPQEQVGPLMVKVEEKEEKGKYLPSLEMFRQRFRQFGYHDTPGPREALSQLRVLCCEWLRPEIHTKEQILELLVLEQFLTILPQELQAWVQEHCPESAEEAVTLLEDLERELDEPGHQVSTPPNEQKPVWEKISSSGTAKESPSSMQPQPLETSHKYESWGPLYIQESGEEQEFAQDPRKVRDCRLSTQHEESADEQKGSEAEGLKGDIISVIIANKPEASLERQCVNLENEKGTKPPLQEAGSKKGRESVPTKPTPGERRYICAECGKAFSNSSNLTKHRRTHTGEKPYVCTKCGKAFSHSSNLTLHYRTHLVDRPYDCKCGKAFGQSSDLLKHQRMHTEEAPYQCKDCGKAFSGKGSLIRHYRIHTGEKPYQCNECGKSFSQHAGLSSHQRLHTGEKPYKCKECGKAFNHSSNFNKHHRIHTGEKPYWCHHCGKTFCSKSNLSKHQRVHTGEGEAP

SEQ ID NO: 441 - protein, 1918 aa, Homo sapiens
MEERRPHLDARPRNSHTNHRGPVDGELPPRARNQANNPPANALRGGASHPGRHPRANNHPAAYWQREERFRAMGRNPHQGRRNQEGHASDEARDQRHDQENDTRWRNGNQDCRNRRPPWSNDNFQQWRTPHQKPTEQPQQAKKLGYKFLESLLQKDPSEVVITLATSLGLKELLSHSSMKSNFLELICQVLRKACSSKMDRQSVLHVLGILKNSKFLKVCLPAYVVGMITEPIPDIRNQYPEHISNIISLLQDLVSVFPASSVQETSMLVSLLPTSLNALRASGVDIEEETEKNLEKVQTIIEHLQEKRREGTLRVDTYTLVQPEAEDHVESYRTMPIYPTYNEVHLDERPFLRPNIISGKYDSTAIYLDTHFRLLREDFVRPLREGILELLQSFEDQGLRKRKFDDIRIYFDTRIITPMCSSSGIVYKVQFDTKPLKFVRWQNSKRLLYGSLVCMSKDNFETFLFATVSNREQEDLCRGIVQLCFNEQSQQLLAEVQPSDSFLMVETTAYFEAYRHVLEGLQEVQEEDVPFQRNIVECNSHVKEPRYLLMGGRYDFTPLIENPSATGEFLRNVEGLRHPRINVLDPGQWPSKEALKLDDSQMEALQFALTRELAIIQGPPGTGKTYVGLKIVQALLTNESVWQISLQKFPILVVCYTNHALDQFLEGIYNCQKTSIVRVGGRSNSEILKQFTLRELRNKREFRRNLPMHLRRAYMSIMTQMKESEQELHEGAKTLECTMRGVLREQYLQKYISPQHWESLMNGPVQDSEWICFQHWKHSMMLEWLGLGVGSFTQSVSPAGPENTAQAEGDEEEEGEEESSLIEIAEEADLIQADRVIEEEEVVRPQRRKKEESGADQELAKMLLAMRLDHCGTGTAAGQEQATGEWQTQRNQKKKMKKRVKDELRKLNTMTAAEANEIEDVWQLDLSSRWQLYRLWLQLYQADTRRKILSYERQYRTSAERMAELRLQEDLHILKDAQVVGMTTTGAAKYRQILQKVEPRIVIVEEAAEVLEAHTIATLSKACQHLILIGDHQQLRPSANVYDLAKNFNLEVSLFERLVKVNIPFVRLNYQHRMCPEIARLLTPHIYQDLENHPSVLKYEKIKGVSSNLFFVEHNFPEQEIQEGKSHQNQHEAHFVVELCKYFLCQEYLPSQITILTTYTGQLFCLRKLMPAKTFAGVRVHVVDKYQGEENDIILLSLVRSNQEGKVGFLQISNRICVALSRAKKGMYCIGNMQMLAKVPLWSKIIHTLRENNQIGPMLRLCCQNHPETHTLVSKASDFQKVPEGGCSLPCEFRLGCGHVCTRACHPYDSSHKEFQCMKPCQKVICQEGHRCPLVCFQECQPCQVKVPKTIPRCGHEQMVPCSVPESDFCCQEPCSKSLRCGHRCSHPCGEDCVQLCSEMVTIKLKCGHSQPVKCGHVEGLLYGGLLVKCTTKCGTILDCGHPCPGSCHSCFEGRFHERCQQPCKRLLICSHKCQEPCIGECPPCQRTCQNRCVHSQCKKKCGELCSPCVEPCVWRCQHYQCTKLCSEPCNRPPCYVPCTKLLVCGHPCIGLCGEPCPKKCRICHMDEVTQIFFGFEDEPDARFVQLEDCSHIFEVQALDRYMNEQKDDEVAIRLKVCPICQVPIRKNLRYGTSIKQRLEEIEIIKEKIQGSAGEIATSQERLKALLERKSLLHQLLPEDFLMLKEKLAQKNLSVKDLGLVENYISFYDHLASLWDSLKKMHVLEEKRVRTRLEQVHEWLAKKRLSFTSQELSDLRSEIQRLTYLVNLLTRYKIAEKKVKDSIAVEVYSVQNILEKTCKFTQEDEQLVQEKMEALKATLPCSGLGISEEERVQIVSAIGYPRGHWFKCRNGHIYVIGDCGGAMERGTCPDCKEVIGGTNHTLERSNQLASEMDGAQHAAWSDTANNLMNFEEIQGMM

SEQ ID NO: 442 - protein, 903 aa, Homo sapiens
MEERRPHLDARPRNSHTNHRGPVDGELPPRARNQANNPPANALRGGASHPGRHPRANNHPAAYWQREERFRAMGRNPHQGRRNQEGHASDEARDQRHDQENDTRWRNGNQDCRNRRPPWSNDNFQQWRTPHQKPTEQPQQAKKLGYKFLESLLQKDPSEVVITLATSLGLKELLSHSSMKSNFLELICQVLRKACSSKMDRQSVLHVLGILKNSKFLKVCLPAYVVGMITEPIPDIRNQYPEHISNIISLLQDLVSVFPASSVQETSMLVSLLPTSLNALRASGVDIEEETEKNLEKVQTIIEHLQEKRREGTLRVDTYTLVQPEAEDHVESYRTMPIYPTYNEVHLDERPFLRPNIISGKYDSTAIYLDTHFRLLREDFVRPLREGILELLQSFEDQGLRKRKFDDIRIYFDTRIITPMCSSSGIVYKVQFDTKPLKFVRWQNSKRLLYGSLVCMSKDNFETFLFATVSNREQEDLCRGIVQLCFNEQSQQLLAEVQPSDSFLMVETTAYFEAYRHVLEGLQEVQEEDVPFQRNIVECNSHVKEPRYLLMGGRYDFTPLIENPSATGEFLRNVEGLRHPRINVLDPGQWPSKEALKLDDSQMEALQFALTRELAIIQGPPGTGKTYVGLKIVQALLTNESVWQISLQKFPILVVCYTNHALDQFLEGIYNCQKTSIVRVGGRSNSEILKQFTLRELRNKREFRRNLPMHLRRAYMSIMTQMKESEQELHEGAKTLECTMRGVLREQYLQKYISPQHWESLMNGPVQDSEWICFQHWKHSMMLEWLGLGVGSFTQSVSPAGPENTAQAEGDEEEEGEEESSLIEIAEEADLIQADRVIEEEEVVRPQRRKKEESGADQELAKMLLAMRLDHCGTGTAAGQEQATGEWQTVPCLVLMSADPAQP

SEQ ID NO: 443 - protein, 63 aa, Homo sapiens
MRFRRLTPGYFRVLQMQVAGELKAEPRSLLAGVVATVLAVLGLGGSCYAVWKMVGQRRVPRAP

SEQ ID NO: 444 - protein, 429 aa, Homo sapiens
MAGSGAWKRLKSMLRKDDAPLFLNDTSAFDFSDEAGDEGLSRFNKLRVVVADDGSEAPERPVNGAHPTLQADDDSLLDQDLPLTNSQLSLKVDSCDNCSKQREILKQRKVKARLTIAAVLYLLFMIGELVGGYIANSLAIMTDALHMLTDLSAIILTLLALWLSSKSPTKRFTFGFHRLEVLSAMISVLLVYILMGFLLYEAVQRTIHMNYEINGDIMLITAAVGVAVNVIMGFLLNQSGHRHSHSHSLPSNSPTRGSGCERNHGQDSLAVRAAFVHALGDLVQSVGVLIAAYIIRFKPEYKIADPICTYVFSLLVAFTTFRIIWDTVVIILEGVPSHLNVDYIKEALMKIEDVYSVEDLNIWSLTSGKSTAIVHIQLIPGSSSKWEEVQSKANHLLLNTFGMYRCTIQLQSYRQEVDRTCANCQSSSP

SEQ ID NO: 445 - protein, 697 aa, Homo sapiens
MMAAVKSTEAHPSSNKDPTQGQKSALQGNSPDSEASRQRFRQFCYQEVTGPHEAFSKLWELCCQWLRPKTHSKEEILELLVLEQFLTILPEEIQTWVREQHPENGEEAVALVEDVQRAPGQQVLDSEKDLKVLMKEMAPLGATRESLRSQWKQEVQPEEPTFKGSQSSHQRPGEQSEAWLAPQAPRNLPQNTGLHDQETGAVVWTAGSQGPAMRDNRAVSLCQQEWMCPGPAQRALYRGATQRKDSHVSLATGVPWGYEETKTLLAILSSSQFYGKLQTCQQNSQIYRAMAEGLWEQGFLRTPEQCRTKFKSLQLSYRKVRRGRVPEPCIFYEEMNALSGSWASAPPMASDAVPGQEGSDIEAGELNHQNGEPTEVEDGTVDGADRDEKDFRNPGQEVRKLDLPVLFPNRLGFEFKNEIKKENLKWDDSEEVEINKALQRKSRGVYWHSELQKGLESEPTSRRQCRNSPGESEEKTPSQEKMSHQSFCARDKACTHILCGKNCSQSVHSPHKPALKLEKVSQCPECGKTFSRSSYLVRHQRIHTGEKPHKCSECGKGFSERSNLTAHLRTHTGERPYQCGQCGKSFNQSSSLIVHQRTHTGEKPYQCIVCGKRFNNSSQFSAHRRIHTGESPYKCAVCGKIFNNSSHFSAHRKTHTGEKPYRCSHCERGFTKNSALTRHQTVHMKAVLSSQEGRDAL

SEQ ID NO: 446 - protein, 485 aa, Homo sapiens
MRDNRAVSLCQQEWMCPGPAQRALYRGATQRKDSHVSLATGVPWGYEETKTLLAILSSSQFYGKLQTCQQNSQIYRAMAEGLWEQGFLRTPEQCRTKFKSLQLSYRKVRRGRVPEPCIFYEEMNALSGSWASAPPMASDAVPGQEGSDIEAGELNHQNGEPTEVEDGTVDGADRDEKDFRNPGQEVRKLDLPVLFPNRLGFEFKNEIKKENLKWDDSEEVEINKALQRKSRGVYWHSELQKGLESEPTSRRQCRNSPGESEEKTPSQEKMSHQSFCARDKACTHILCGKNCSQSVHSPHKPALKLEKVSQCPECGKTFSRSSYLVRHQRIHTGEKPHKCSECGKGFSERSNLTAHLRTHTGERPYQCGQCGKSFNQSSSLIVHQRTHTGEKPYQCIVCGKRFNNSSQFSAHRRIHTGESPYKCAVCGKIFNNSSHFSAHRKTHTGEKPYRCSHCERGFTKNSALTRHQTVHMKAVLSSQEGRDAL

SEQ ID NO: 447 - protein, 408 aa, Homo sapiens
MAEGLWEQGFLRTPEQCRTKFKSLQLSYRKVRRGRVPEPCIFYEEMNALSGSWASAPPMASDAVPGQEGSDIEAGELNHQNGEPTEVEDGTVDGADRDEKDFRNPGQEVRKLDLPVLFPNRLGFEFKNEIKKENLKWDDSEEVEINKALQRKSRGVYWHSELQKGLESEPTSRRQCRNSPGESEEKTPSQEKMSHQSFCARDKACTHILCGKNCSQSVHSPHKPALKLEKVSQCPECGKTFSRSSYLVRHQRIHTGEKPHKCSECGKGFSERSNLTAHLRTHTGERPYQCGQCGKSFNQSSSLIVHQRTHTGEKPYQCIVCGKRFNNSSQFSAHRRIHTGESPYKCAVCGKIFNNSSHFSAHRKTHTGEKPYRCSHCERGFTKNSALTRHQTVHMKAVLSSQEGRDAL

SEQ ID NO: 448 - protein, 568 aa, Homo sapiens
MLPGLAAAAAHRCSWSSLCRLRLRCRAAACNPSDRQEWQNLVTFGSFSNMVPCSHPYIGTLSQVKLYSTNVQKEGQGSQTLRVEKVPSFETAEGIGTELKAPLKQEPLQVRVKAVLKKREYGSKYTQNNFITGVRAINEFCLKSSDLEQLRKIRRRSPHEDTESFTVYLRSDVEAKSLEVWGSPEALAREKKLRKEAEIEYRERLFRNQKILREYRDFLGNTKPRSRTASVFFKGPGKVVMVAICINGLNCFFKFLAWIYTGSASMFSEAIHSLSDTCNQGLLALGISKSVQTPDPSHPYGFSNMRYISSLISGVGIFMMGAGLSWYHGVMGLLHPQPIESLLWAYCILAGSLVSEGATLLVAVNELRRNARAKGMSFYKYVMESRDPSTNVILLEDTAAVLGVIIAATCMGLTSITGNPLYDSLGSLGVGTLLGMVSAFLIYTNTEALLGRSIQPEQVQRLTELLENDPSVRAIHDVKATDLGLGKVRFKAEVDFDGRVVTRSYLEKQDFDQMLQEIQEVKTPEELETFMLKHGENIIDTLGAEVDRLEKELKKRNPEVRHVDLEIL

SEQ ID NO: 449 - protein, 497 aa, Homo sapiens
MGQCRNWKWGLESFDFSINRRSSAPGQLESASQMRESWRHKAGRRMFSCPEESDPIQALRKLTELCHLWLRPDLHTKEQILDMLVMEQFMISMPQELQVLVKVNGVQSCKDLEDLLRNNRRPKKWSVVNFLGKEYLMQESDVEMAEIPASVRDDPRGVSSQRASSVNEMRPGEGQASQELQTLPRVPALSRRQEEDFLLPETTVMKSAPKALRPKPTLEKDLNVDREENTGLTSPEPQLPNGPSVVGAKEGKEPKKRASVENVDADTPSACVVEREASTHSGSRGDALNLRCPKRSKPDATSISQEGPQGGATPVGNSESPGKPEINSVYSPGPAGAVSHPNGQEAKELLPFACGVCNKRFTCNSKLAIHMRSHTGERPFQCNFCERCFTQLSDLRVHQRIHTGEKPYTCDICHKRFNRMFSLKCHKRSHTGEKPYKCKDCNQVFTYRKNLNEHKLIHSGEKPYKCPKCLRAFRRPETLKYHQKTHQETTAPRECEG

SEQ ID NO: 450 - protein, 563 aa, Homo sapiens
MARRLLPAHVQESVTFRDVAVFFSQDEWLHLDSAQRALYREVMLENYSILVSLGILFSKPKVISQLEQGEDPWMVESGVPQGAHLGWESLFGTIVSKEENQEVMKKLIIDGTFDFKLEKTYINEDKLEKQQGKKNRLFSKVLVTIKKVYMKERSFKGVEFGKNLGLKSSLIRKPRIVSRGRRPRSQQYSVLFKQLGVNTVRKCYKCNICGKIFLHSSSLSKHQRIHTGEKLYKCKECRKAFSQSSSLTQHLRVHTGEKPYICSECGKAFSFTTSLIGHQRMHTGERPYKCKECGKTFKGSSSLNNHQRIHTGEKPYKCNECGRAFSQCSSLIQHHRIHTGEKPYECTQCGKAFTSISRLSRHHRIHTGEKPFHCNECGKVFSYHSALIIHQRIHTGEKPYACKECGKAFSQSSALIQHQRIHTGEKPYKCNECGKAFSWISRLNIHHRIHTGEKPYNCKECGKAFSSHSGVNTHRKIHTGEKPYKCNDCEKAFNQSSALIQHQRIHTGEKPYNCKVCGKAFRQSSSLMTHMRIHTGEKPYKCKECGKAFSQSSSLTNHQRTHN

SEQ ID NO: 451 - protein, 441 aa, Homo sapiens
MAPRAQIQGPLTFGDVAVAFTRIEWRHLDAAQRALYRDVMLENYGNLVSVGLLSSKPKLITQLEQGAEPWTEVREAPSGTHAVEDYWFETKMSALKQSTSEASVLGERTKSVMMEKGLDWEGRSSTEKNYKCKECGKVFKYNSSFISHQRNHTSEKPHKCKECGIAFMNSSSLLNHHKVHAGKQPYRCIECGKFLKKHSTFINHQRIHSREKPHKCIECGKTFRKNSILLSHQRIHTGQKPYKCNDCGKAFAQNAALTRHERIHSGEKPFKCNKCGRAFRDNSTVLEHQKIHTGEKPYQCNECGKAFRKSSTLISHQRMHTGEKPYHCSKCGKSFRYSSSFAGHQKTHSGNKPYQCRDCGKAFTKSSTLTGHQRIHTGEKPYHCKKCGKAFRHSSGLVEHQRLHTGEKPYKCNECGKAFPRSSALKQHKKIHNKERAMKCS

SEQ ID NO: 452 - protein, 350 aa, Homo sapiens
MSALKQSTSEASVLGERTKSVMMEKGLDWEGRSSTEKNYKCKECGKVFKYNSSFISHQRNHTSEKPHKCKECGIAFMNSSSLLNHHKVHAGKQPYRCIECGKFLKKHSTFINHQRIHSREKPHKCIECGKTFRKNSILLSHQRIHTGQKPYKCNDCGKAFAQNAALTRHERIHSGEKPFKCNKCGRAFRDNSTVLEHQKIHTGEKPYQCNECGKAFRKSSTLISHQRMHTGEKPYHCSKCGKSFRYSSSFAGHQKTHSGNKPYQCRDCGKAFTKSSTLTGHQRIHTGEKPYHCKKCGKAFRHSSGLVEHQRLHTGEKPYKCNECGKAFPRSSALKQHKKIHNKERAMKCS

SEQ ID NO: 453 - protein, 1284 aa, Homo sapiens
MHKKRVEEGEASDFSLAWDSSVTAAGGLEGEPECDQKTSRALEDRNSVTSQEERNEDDEDMEDESIYTCDHCQQDFESLADLTDHRAHRCPGDGDDDPQLSWVASSPSSKDVASPTQMIGDGCDLGLGEEEGGTGLPYPCQFCDKSFIRLSYLKRHEQIHSDKLPFKCTYCSRLFKHKRSRDRHIKLHTGDKKYHCHECEAAFSRSDHLKIHLKTHSSSKPFKCTVCKRGFSSTSSLQSHMQAHKKNKEHLAKSEKEAKKDDFMCDYCEDTFSQTEELEKHVLTRHPQLSEKADLQCIHCPEVFVDENTLLAHIHQAHANQKHKCPMCPEQFSSVEGVYCHLDSHRQPDSSNHSVSPDPVLGSVASMSSATPDSSASVERGSTPDSTLKPLRGQKKMRDDGQGWTKVVYSCPYCSKRDFNSLAVLEIHLKTIHADKPQQSHTCQICLDSMPTLYNLNEHVRKLHKNHAYPVMQFGNISAFHCNYCPEMFADINSLQEHIRVSHCGPNANPSDGNNAFFCNQCSMGFLTESSLTEHIQQAHCSVGSAKLESPVVQPTQSFMEVYSCPYCTNSPIFGSILKLTKHIKENHKNIPLAHSKKSKAEQSPVSSDVEVSSPKRQRLSASANSISNGEYPCNQCDLKFSNFESFQTHLKLHLELLLRKQACPQCKEDFDSQESLLQHLTVHYMTTSTHYVCESCDKQFSSVDDLQKHLLDMHTFVLYHCTLCQEVFDSKVSIQVHLAVKHSNEKKMYRCTACNWDFRKEADLQVHVKHSHLGNPAKAHKCIFCGETFSTEVELQCHITTHSKKYNCKFCSKAFHAIILLEKHLREKHCVFDAATENGTANGVPPMATKKAEPADLQGMLLKNPEAPNSHEASEDDVDASEPMYGCDICGAAYTMEVLLQNHRLRDHNIRPGEDDGSRKKAEFIKGSHKCNVCSRTFFSENGLREHLQTHRGPAKHYMCPICGERFPSLLTLTEHKVTHSKSLDTGTCRICKMPLQSEEEFIEHCQMHPDLRNSLTGFRCVVCMQTVTSTLELKIHGTFHMQKLAGSSAASSPNGQGLQKLYKCALCLKEFRSKQDLVKLDVNGLPYGLCAGCMARSANGQVGGLAPPEPADRPCAGLRCPECSVKFESAEDLESHMQVDHRDLTPETSGPRKGTQTSPVPRKKTYQCIKCQMTFENEREIQIHVANHMIEEGINHECKLCNQMFDSPAKLLCHLIEHSFEGMGGTFKCPVCFTVFVQANKLQQHIFAVHGQEDKIYDCSQCPQKFFFQTELQNHTMSQHAQ

SEQ ID NO: 454 - protein, 1224 aa, Homo sapiens
MEDESIYTCDHCQQDFESLADLTDHRAHRCPGDGDDDPQLSWVASSPSSKDVASPTQMIGDGCDLGLGEEEGGTGLPYPCQFCDKSFIRLSYLKRHEQIHSDKLPFKCTYCSRLFKHKRSRDRHIKLHTGDKKYHCHECEAAFSRSDHLKIHLKTHSSSKPFKCTVCKRGFSSTSSLQSHMQAHKKNKEHLAKSEKEAKKDDFMCDYCEDTFSQTEELEKHVLTRHPQLSEKADLQCIHCPEVFVDENTLLAHIHQAHANQKHKCPMCPEQFSSVEGVYCHLDSHRQPDSSNHSVSPDPVLGSVASMSSATPDSSASVERGSTPDSTLKPLRGQKKMRDDGQGWTKVVYSCPYCSKRDFNSLAVLEIHLKTIHADKPQQSHTCQICLDSMPTLYNLNEHVRKLHKNHAYPVMQFGNISAFHCNYCPEMFADINSLQEHIRVSHCGPNANPSDGNNAFFCNQCSMGFLTESSLTEHIQQAHCSVGSAKLESPVVQPTQSFMEVYSCPYCTNSPIFGSILKLTKHIKENHKNIPLAHSKKSKAEQSPVSSDVEVSSPKRQRLSASANSISNGEYPCNQCDLKFSNFESFQTHLKLHLELLLRKQACPQCKEDFDSQESLLQHLTVHYMTTSTHYVCESCDKQFSSVDDLQKHLLDMHTFVLYHCTLCQEVFDSKVSIQVHLAVKHSNEKKMYRCTACNWDFRKEADLQVHVKHSHLGNPAKAHKCIFCGETFSTEVELQCHITTHSKKYNCKFCSKAFHAIILLEKHLREKHCVFDAATENGTANGVPPMATKKAEPADLQGMLLKNPEAPNSHEASEDDVDASEPMYGCDICGAAYTMEVLLQNHRLRDHNIRPGEDDGSRKKAEFIKGSHKCNVCSRTFFSENGLREHLQTHRGPAKHYMCPICGERFPSLLTLTEHKVTHSKSLDTGTCRICKMPLQSEEEFIEHCQMHPDLRNSLTGFRCVVCMQTVTSTLELKIHGTFHMQKLAGSSAASSPNGQGLQKLYKCALCLKEFRSKQDLVKLDVNGLPYGLCAGCMARSANGQVGGLAPPEPADRPCAGLRCPECSVKFESAEDLESHMQVDHRDLTPETSGPRKGTQTSPVPRKKTYQCIKCQMTFENEREIQIHVANHMIEEGINHECKLCNQMFDSPAKLLCHLIEHSFEGMGGTFKCPVCFTVFVQANKLQQHIFAVHGQEDKIYDCSQCPQKFFFQTELQNHTMSQHAQ

SEQ ID NO: 455 - protein, 378 aa, Homo sapiens
MISFQESVTFQDVAVDFTAEEWQLLDCAERTLYWDVMLENYRNLISVGCPITKTKVILKVEQGQEPWMVEGANPHESSPESDYPLVDEPGKHRESKDNFLKSVLLTFNKILTMERIHHYNMSTSLNPMRKKSYKSFEKCLPPNLDLLKYNRSYTVENAYECSECGKAFKKKFHFIRHEKNHTRKKPFECNDCGKAYSRKAHLATHQKIHNGERPFVCNDCGKAFMHKAQLVVHQRLHTGEKPYECSQCGKTFTWNSSFNQHVKSHTLEKSFECKECGKTFRYSSSLYKHSRFHTGEKPYQCIICGKAFGNTSVLVTHQRIHTGEKPYSCIECGKAFIKKSHLLRHQITHTGEKPYECNRCGKAFSQKSNLIVHQKIHT

SEQ ID NO: 456 - protein, 238 aa, Homo sapiens
MKNVANTVTISHILPHIKIIHTEEKPDKCEECNKVFNWSSTHTKYKRIHTEDKFYKYEECDKSFKNISTLITHKIIYVVEKFYKCEECGKVFFFFLKWSLTLSPKLECNGAISVHCNLRLLGSSDSLASTSQAAGIAGACHHAQLIFVFLVETGFHHFDQAGFELLTSSDPPALASQSAPKCWDYKHEPLSPVECGKVFNKLSNHTGEKLYKPKRHDSALENTLNFSKHKRNHSVKKP

SEQ ID NO: 457 - protein, 489 aa, Homo sapiens
MKELDPKNDISEDKLSVVGEATGGPTRNGARGPGSEGVWEPGSWPERPRGDAGAEWEPLGIPQGNKLLGGSVPACHELKAFANQGCVLVPPRLDDPTEKGACPPVRRGKNFSSTSDLSKPPMPCEEKKTYDCSECGKAFSRSSSLIKHQRIHTGEKPFECDTCGKHFIERSSLTIHQRVHTGEKPYACGDCGKAFSQRMNLTVHQRTHTGEKPYVCDVCGKAFRKTSSLTQHERIHTGEKPYACGDCGKAFSQNMHLIVHQRTHTGEKPYVCPECGRAFSQNMHLTEHQRTHTGEKPYACKECGKAFNKSSSLTLHQRNHTGEKPYVCGECGKAFSQSSYLIQHQRFHIGVKPFECSECGKAFSKNSSLTQHQRIHTGEKPYECYICKKHFTGRSSLIVHQIVHTGEKPYVCGECGKAFSQSAYLIEHQRIHTGEKPYRCGQCGKSFIKNSSLTVHQRIHTGEKPYRCGECGKTFSRNTNLTRHLRIHT

SEQ ID NO: 458 - protein, 468 aa, Homo sapiens
MAAPDLSTNLQEEATCAICLDYFTDPVMTDCGHNFCRECIRRCWGQPEGPYACPECRELSPQRNLRPNRPLAKMAEMARRLHPPSPVPQGVCPAHREPLAAFCGDELRLLCAACERSGEHWAHRVRPLQDAAEDLKAKLEKSLEHLRKQMQDALLFQAQADETCVLWQKMVESQRQNVLGEFERLRRLLAEEEQQLLQRLEEEELEVLPRLREGAAHLGQQSAHLAELIAELEGRCQLPALGLLQDIKDALRRVQDVKLQPPEVVPMELRTVCRVPGLVETLRRFRGDVTLDPDTANPELILSEDRRSVQRGDLRQALPDSPERFDPGPCVLGQERFTSGRHYWEVEVGDRTSWALGVCRENVNRKEKGELSAGNGFWILVFLGSYYNSSERALAPLRDPPRRVGIFLDYEAGHLSFYSATDGSLLFIFPEIPFSGTLRPLFSPLSSSPTPMTICRPKGGSGDTLAPQ

SEQ ID NO: 459 - protein, 385 aa, Homo sapiens
MAAPDLSTNLQEEATCAICLDYFTDPVMTDCGHNFCRECIRRCWGQPEGPYACPECRELSPQRNLRPNRPLAKMAEMARRLHPPSPVPQGVCPAHREPLAAFCGDELRLLCAACERSGEHWAHRVRPLQDAAEDLKAKLEKSLEHLRKQMQDALLFQAQADETCVLWQKMVESQRQNVLGEFERLRRLLAEEEQQLLQRLEEEELEVLPRLREGAAHLGQQSAHLAELIAELEGRCQLPALGLLQDIKDALRRVQDVKLQPPEVVPMELRTVCRVPGLVETLRRFRGRCGGPRWGDDSRRGPAKDLGSQPRVLCPATASSKLTVSWWWVVGKTSSAHTSDISCVGIFTPNNSSTSGNELGIQGFHSALNRIASADTTGVSTDPTD

SEQ ID NO: 460 - protein, 467 aa, Homo sapiens
MAAPDLSTNLQEEATCAICLDYFTDPVMTDCGHNFCRECIRRCWGQPEGPYACPECRELSPQRNLRPNRPLAKMAEMARRLHPPSPVPQGVCPAHREPLAAFCGDELRLLCAACERSGEHWAHRVRPLQDAAEDLKAKLEKSLEHLRKQMQDALLFQAQADETCVLWQMVESQRQNVLGEFERLRRLLAEEEQQLLQRLEEEELEVLPRLREGAAHLGQQSAHLAELIAELEGRCQLPALGLLQDIKDALRRVQDVKLQPPEVVPMELRTVCRVPGLVETLRRFRGDVTLDPDTANPELILSEDRRSVQRGDLRQALPDSPERFDPGPCVLGQERFTSGRHYWEVEVGDRTSWALGVCRENVNRKEKGELSAGNGFWILVFLGSYYNSSERALAPLRDPPRRVGIFLDYEAGHLSFYSATDGSLLFIFPEIPFSGTLRPLFSPLSSSPTPMTICRPKGGSGDTLAPQ

SEQ ID NO: 461 - protein, 339 aa, Homo sapiens
MSSEMLPAFIETSNVDKKQGINEDQEESQKPRLGEGCEPISKRQMKKLIKQKQWEEQRELRKQKRKEKRKRKKLERQCQMEPNSDGHDRKRVRRDVVHSTLRLIIDCSFDHLMVLKDIKKLHKQIQRCYAENRRALHPVQFYLTSHGGQLKKNMDENDKGWVNWKDIHIKPEHYSELIKKEDLIYLTSDSPNILKELDESKAYVIGGLVDHNHHKGLTYKQASDYGINHAQLPLGNFVKMNSRKVLAVNHVFEIILEYLETRDWQEAFFTILPQRKGAVPTDKACESASHDNQSVRMEEGGSDSDSSEEEYSRNELDSPHEEKQDKENHTESTVNSLPH

SEQ ID NO: 462 - protein, 145 aa, Homo sapiens
MTVHNLYLFDRNGVCLHYSEWHRKKQAGIPKEEEYKLMYGMLFSIRSFVSKMSPLDMKDGFLAFQTSRYKLHYYETPTGIKVVMNTDLGVGPIRDVLHHIYSALYVELVVKNPLCPLGQTVQSELFRSRLDSYVRSLPFFSARAG

SEQ ID NO: 463 - protein, 423 aa, Homo sapiens
MMYRPDVVRARKRVCWEPWVIGLVIFISLIVLAVCIGLTVHYVRYNQKKTYNYYSTLSFTTDKLYAEFGREASNNFTEMSQRLESMVKNAFYKSPLREEFVKSQVIKFSQQKHGVLAHMLLICRFHSTEDPETVDKIVQLVLHEKLQDAVGPPKVDPHSVKIKKINKTETDSYLNHCCGTRRSKTLGQSLRIVGGTEVEEGEWPWQASLQWDGSHRCGATLINATWLVSAAHCFTTYKNPARWTASFGVTIKPSKMKRGLRRIIVHEKYKHPSHDYDISLAELSSPVPYTNAVHRVCLPDASYEFQPGDVMFVTGFGALKNDGYSQNHLRQAQVTLIDATTCNEPQAYNDAITPRMLCAGSLEGKTDACQGDSGGPLVSSDARDIWYLAGIVSWGDECAKPNKPGVYTRVTALRDWITSKTGI

SEQ ID NO: 464 - protein, 205 aa, Homo sapiens
MTPPERLFLPRVCGTTLHLLLLGLLLVLLPGAQGLPGVGLTPSAAQTARQHPKMHLAHSTLKPAAHLIGDPSKQNSLLWRANTDRAFLQDGFSLSNNSLLVPTSGIYFVYSQVVFSGKAYSPKATSSPLYLAHEVQLFSSQYPFHVPLLSSQKMVYPGLQEPWLHSMYHGAAFQLTQGDQLSTHTDGIPHLVLSPSTVFFGAFAL

SEQ ID NO: 465 - protein, 2627 aa, Homo sapiens
MEKLHGHVSAHPDILSLENRCLAMLPDLQPLEKLHQHVSTHSDILSLKNQCLATLPDLKTMEKPHGYVSAHPDILSLENQCLATLSDLKTMEKPHGHVSAHPDILSLENRCLATLSSLKSTVSASPLFQSLQISHMTQADLYRVNNSNCLLSEPPSWRAQHFSKGLDLSTCPIALKSISATETAQEATLGRWFDSEEKKGAETQMPSYSLSLGEEEEVEDLAVKLTSGDSESHPEPTDHVLQEKKMALLSLLCSTLVSEVNMNNTSDPTLAAIFEICRELALLEPEFILKASLYARQQLNVRNVANNILAIAAFLPACRPHLRRYFCAIVQLPSDWIQVAELYQSLAEGDKNKLVPLPACLRTAMTDKFAQFDEYQLAKYNPRKHRAKRHPRRPPRSPGMEPPFSHRCFPRYIGFLREEQRKFEKAGDTVSEKKNPPRFTLKKLVQRLHIHKPAQHVQALLGYRYPSNLQLFSRSRLPGPWDSSRAGKRMKLSRPETWERELSLRGNKASVWEELIENGKLPFMAMLRNLCNLLRVGISSRHHELILQRLQHAKSVIHSRQFPFRFLNAHDAIDALEAQLRNQALPFPSNITLMRRILTRNEKNRPRRRFLCHLSRQQLRMAMRIPVLYEQLKREKLRVHKARQWKYDGEMLNRYRQALETAVNLSVKHSLPLLPGRTVLVYLTDANADRLCPKSNPQGPPLNYALLLIGMMITRAEQVDVVLCGGDTLKTAVLKAEEGILKTAIKLQAQVQEFDENDGWSLNTFGKYLLSLAGQRVPVDRVILLGQSMDDGMINVAKQLYWQRVNSKCLFVGILLRRVQYLSTDLNPNDVTLSGCTDAILKFIAEHGASHLLEHVGQMDKIFKIPPPPGKTGVQSLRPLEEDTPSPLAPVSQQGWRSIRLFISSTFRDMHGERDLLLRSVLPALQARAAPHRISLHGIDLRWGVTEEETRRNRQLEVCLGEVENAQLFVGILGSRYGYIPPSYNLPDHPHFHWAQQYPSGRSVTEMEVMQFLNRNQRLQPSAQALIYFRDSSFLSSVPDAWKSDFVSESEEAARRISELKSYLSRQKGITCRRYPCEWGGVAAGRPYVGGLEEFGQLVLQDVWNMIQKLYLQPGALLEQPVSIPDDDLVQATFQQLQKPPSPARPRLLQDTVQRLMLPHGRLSLVTGQSGQGKTAFLASLVSALQAPDGAKVASLVFFHFSGARPDQGLALTLLRRLCTYLRGQLKEPGALPSTYRSLVWELQQRLLPKSAESLHPGQTQVLIIDGADRLVDQNGQLISDWIPKKLPRCVHLVLSVSSDAGLGETLEQSQGAHVLALGPLEASARARLVREELALYGKRLEESPFNNQMRLLLVKRESGRPLYLRLVTDHLRLFTLYEQVSERLRTLPATVPLLLQHILSTLEKEHGPDVLPQALTALEVTRSGLTVDQLHGVLSVWRTLPKGTKSWEEAVAAGNSGDPYPMGPFACLVQSLRSLLGEGPLERPGARLCLPDGPLRTAAKRCYGKRPGLEDTAHILIAAQLWKTCDADASGTFRSCPPEALGDLPYHLLQSGNRGLLSKFLTNLHVVAAHLELGLVSRLLEAHALYASSVPKEEQKLPEADVAVFRTFLRQQASILSQYPRLLPQQAANQPLDSPLCHQASLLSRRWHLQHTLRWLNKPRTMKNQQSSSLSLAVSSSPTAVAFSTNGQRAAVGTANGTVYLLDLRTWQEEKSVVSGCDGISACLFLSDDTLFLTAFDGLLELWDLQHGCRVLQTKAHQYQITGCCLSPDCRLLATVCLGGCLKLWDTVRGQLAFQHTYPKSLNCVAFHPEGQVIATGSWAGSISFFQVDGLKVTKDLGAPGASIRTLAFNVPGGVVAVGRLDSMVELWAWREGARLAAFPAHHGFVAAALFLHAGCQLLTAGEDGKVQVWSGSLGRPRGHLGSLSLSPALSVALSPDGDRVAVGYRADGIRIYKISSGSQGAQGQALDVAVSALAWLSPKVLVSGAEDGSLQGWALKECSLQSLWLLSRFQKPVLGLATSQELLASASEDFTVQLWPRQLLTRPHKAEDFPCGTELRGHEGPVSCCSFSTDGGSLATGGRDRSLLCWDVRTPKTPVLIHSFPACHRDWVTGCAWTKDNLLISCSSDGSVGLWDPESGQRLGQFLGHQSAVSAVAAVEEHVVSVSRDGTLKVWDHQGVELTSIPAHSGPISHCAAAMEPRAAGQPGSELLVVTVGLDGATRLWHPLLVCQTHTLLGHSGPVRAAAVSETSGLMLTASEDGSVRLWQVPKEADDTCIPRSSAAVTAVAWAPDGSMAVSGNQAGELILWQEAKAVATAQAPGHIGALIWSSAHTFFVLSADEKISEWQVKLRKGSAPGNLSLHLNRILQEDLGVLTSLDWAPDGHFLILAKADLKLLCMKPGDAPSEIWSSYTENPMILSTHKEYGIFVLQPKDPGVLSFLRQKESGEFEERLNFDINLENPSRTLISITQAKPESESSFLCASSDGILWNLAKCSPEGEWTTGNMWQKKANTPETQTPGTDPSTCRESDASMDSDASMDSEPTPHLKTRQRRKIHSGSVTALHVLPELLVTASKDRDVKLWERPSMQLLGLFRCEGSVSCLEPWLGANSTLQLAVGDVQGNVYFLNWE

SEQ ID NO: 466 - protein, 2620 aa, Homo sapiens
MEKLHGHVSAHPDILSLENRCLAMLPDLQPLEKLHQHVSTHSDILSLKNQCLATLPDLKTMEKPHGYVSAHPDILSLENQCLATLSDLKTMEKPHGHVSAHPDILSLENRCLATLSSLKSTVSASPLFQSLQISHMTQADLYRVNNSNCLLSEPPSWRAQHFSKGLDLSTCPIALKSISATETAQEATLGRWFDSEEKKGAETQMPSYSLSLGEEEEVEDLAVKLTSGDSESHPEPTDHVLQEKKMALLSLLCSTLVSEVNMNNTSDPTLAAIFEICRELALLEPEFILKASLYARQQLNVRNVANNILAIAAFLPACRPHLRRYFCAIVQLPSDWIQVAELYQSLAEGDKNKLVPLPACLRTAMTDKFAQFDEYQLAKYNPRKHRAKRHPRRPPRSPGMEPPFSHRCFPRYIGFLREEQRKFEKAGDTVSEKKNPPRFTLKKLVQRLHIHKPAQHVQALLGYRYPSNLQLFSRSRLPGPWDSSRAGKRMKLSRPETWERELSLRGNKASVWEELIENGKLPFMAMLRNLCNLLRVGISSRHHELILQRLQHAKSVIHSRQFPFRFLNAHDAIDALEAQLRNQALPFPSNITLMRRILTRNEKNRPRRRFLCHLSRQQLRMAMRIPVLYEQLKREKLRVHKARQWKYDGEMLNRYRQALETAVNLSVKHSLPLLPGRTVLVYLTDANADRLCPKSNPQGPPLNYALLLIGMMITRAEQVDVVLCGGDTLKTAVLKAEEGILKTAIKLQAQVQEFDENDGWSLNTFGKYLLSLAGQRVPVDRVILLGQSMDDGMINVAKQLYWQRVNSKCLFVGILLRRVQYLSTDLNPNDVTLSGCTDAILKFIAEHGASHLLEHVGQMDKIFKIPPPPGKTGVQSLRPLEEDTPSPLAPVSQQGWRSIRLFISSTFRDMHGERDLLLRSVLPALQARAAPHRISLHGIDLRWGVTEEETRRNRQLEVCLGEVENAQLFVGILGSRYGYIPPSYNLPDHPHFHWAQQYPSGRSVTEMEVMQFLNRNQRLQPSAQALIYFRDSSFLSSVPDAWKSDFVSESEEAARRISELKSYLSRQKGITCRRYPCEWGGVAAGRPYVGGLEEFGQLVLQDVWNMIQKLYLQPGALLEQPVSIPDDDLVQATFQQLQKPPSPARPRLLQDTVQRLMLPHGRLSLVTGQSGQGKTAFLASLVSALQAPDGAKVASLVFFHFSGARPDQGLALTLLRRLCTYLRGQLKEPGALPSTYRSLVWELQQRLLPKSAESLHPGQTQVLIIDGADRLVDQNGQLISDWIPKKLPRCVHLVLSVSSDAGLGETLEQSQGAHVLALGPLEASARARLVREELALYGKRLEESPFNNQMRLLLVKRESGRPLYLRLVTDHLRLFTLYEQVSERLRTLPATVPLLLQHILSTLEKEHGPDVLPQALTALEVTRSGLTVDQLHGVLSVWRTLPKGTKSWEEAVAAGNSGDPYPMGPFACLVQSLRSLLGEGPLERPGARLCLPDGPLRTAAKRCYGKRPGLEDTAHILIAAQLWKTCDADASGTFRSCPPEALGDLPYHLLQSGNRGLLSKFLTNLHVVAAHLELGLVSRLLEAHALYASSVPKEEQKLPEADVAVFRTFLRQQASILSQYPRLLPQQAANQPLDSPLCHQASLLSRRWHLQHTLRWLNKPRTMKNQQSSSLSLAVSSSPTAVAFSTNGQRAAVGTANGTVYLLDLRTWQEEKSVVSGCDGISACLFLSDDTLFLTAFDGLLELWDLQHGCRVLQTKAHQYQITGCCLSPDCRLLATVCLGGCLKLWDTVRGQLAFQHTYPKSLNCVAFHPEGQVIATGSWAGSISFFQVDGLKVTKDLGAPGASIRTLAFNVPGGVVAVGRLDSMVELWAWREGARLAAFPAHHGFVAAALFLHAGCQLLTAGEDGKVQVWSGSLGRPRGHLGSLSLSPALSVALSPDGDRVAVGYRADGIRIYKISSGSQGAQGQALDVAVSALAWLSPKVLVSGAEDGSLQGWALKECSLQSLWLLSRFQKPVLGLATSQELLASASEDFTVQLWPRQLLTRPHKAEDFPCGTELRGHEGPVSCCSFSTDGGSLATGGRDRSLLCWDVRTPKTPVLIHSFPACHRDWVTGCAWTKDNLLISCSSDGSVGLWDPESGQRLGQFLGHQSAVSAVAAVEEHVVSVSRDGTLKVWDHQGVELTSIPAHSGPISHCAAAMEPRAAGQPGSELLVVTVGLDGATRLWHPLLVCQTHTLLGHSGPVRAAAVSETSGLMLTASEDGSVRLWQVPKEADDTCIPRSSAAVTAVAWAPDGSMAVSGNQAGELILWQEAKAVATAQAPGHIGALIWSSAHTFFVLSADEKISEWQVKLRKGSAPGNLSLHLNRILQEDLGVLTSLDWAPDGHFLILAKADLKLLCMKPGDAPSEIWSSYTENPMILSTHKEYGIFVLQPKDPGVLSFLRQKESGEFEERLNFDINLENPSRTLISITQAKPESALMGSYGTWPNAAQKENGPQVTCGRKKANTPETQTPGTDPSTCRESDASMDSDASMDSEPTPHLKTRQRRKIHSGSVTALHVLPELLVTASKDRDVKLWERPSMQLLGLFRCEGSVSCLEPWLGANSTLQLAVGDVQGNVYFLNWE

SEQ ID NO: 467 - protein, 140 aa, Homo sapiens
MGRVSGLVPSRFLTLLAHLVVVITLFWSRDSNIQACLPLTFTPEEYDKQDIQLVAALSVTLGLFAVELAGFLSGVSMFNSTQSLISIGAHCSASVALSFFIFERWECTTYWYIFVFCSALPAVTEMALFVTVFGLKKKPF

SEQ ID NO: 468 - protein, 163 aa, Homo sapiens
MGRVSGLVPSRFLTLLAHLVVVITLFWSRVRPTAALNPSPFPSLSGPSPTLPPPSVLPSWVFLFPAAPRPALQPAPFSLLSAGWWPRSLSPWASLQWSWPVSSQESPCSTAPRASSVSFLPAHLSHTTHFYQDSLQPPDTIVSAVANPSSSKIFNDVLNPAVY

SEQ ID NO: 469 - protein, 139 aa, Homo sapiens
MGRVSGLVPSRFLTLLAHLVVVITLFWSRDSNIQACLPLTFTPEEYDKQDIHPLPLCRLVAALSVTLGLFAVELAGFLSGVSMFNSTQSLISIGAHCSASVALSFFIFERWECTTYCALPAVTEMALFVTVFGLKKKPF

SEQ ID NO: 470 - protein, 146 aa, Homo sapiens
MGRVSGLVPSRFLTLLAHLVVVITLFWSRDSNIQACLPLTFTPEEYDKQDIHPLPLCRLVAALSVTLGLFAVELAGFLSGVSMFNSTQSLISIGAHCSASVALSFFIFERWECTTYWYIFVFCSALPAVTEMALFVTVFGLKKKPF

SEQ ID NO: 471 - protein, 248 aa, Homo sapiens
MAGLNSLEAVKRKIQALQQQADEAEDRAQGLQRELDGERERREKAEGDVAALNRRIQLVEEELDRAQERLATALQKLEEAEKAADESERGMKVIENRAMKDEEKMEIQEMQLKEAKHIAEEADRKYEEVARKLVILEGELERAEERAEVSELKCGDLEEELKNVTNNLKSLEAASEKYSEKEDKYEEEIKLLSDKLKEAETRAEFAERTVAKLEKTIDDLEEKLAQAKEENVGLHQTLDQTLNELNCI

SEQ ID NO: 472 - protein, 284 aa, Homo sapiens
MEAIKKKMQMLKLDKENAIDRAEQAEADKKAAEDKCKQVEEELTHLQKKLKGTEDELDKYSEDLKDAQEKLELTEKKASDAEGDVAALNRRIQLVEEELDRAQERLATALQKLEEAEKAADESERGMKVIENRAMKDEEKMEIQEMQLKEAKHIAEEADRKYEEVARKLVILEGELERAEERAEVSELKCGDLEEELKNVTNNLKSLEAASEKYSEKEDKYEEEIKLLSDKLKEAETRAEFAERTVAKLEKTIDDLEEKLAQAKEENVGLHQTLDQTLNELNCI

SEQ ID NO: 473 - protein, 226 aa, Homo sapiens
MTVQRLVAAAVLVALVSLILNNVAAFTSNWVCQTLEDGRRRSVGLWRSCWLVDRTRGGPSPGARAGQVDAHDCEALGWGSEAAGFQESRGTVKLQFDMMRACNLVATAALTAGQLTFLLGLVGLPLLSPDAPCWEEAMAAAFQLASFVLVIGLVTFYRIGPYTNLSWSCYLNIGACLLATLAAAMLIWNILHKREDCMAPRVIVISRSLTARFRRGLDNDYVESPC

SEQ ID NO: 474 - protein, 403 aa, Homo sapiens
MAAFLKMSVSVNFFRPFTRFLVPFTLHRKRNNLTILQRYMSSKIPAVTYPKNESTPPSEELELDKWKTTMKSSVQEECVSTISSSKDEDPLAATREFIEMWRLLGREVPEHITEEELKTLMECVSNTAKKKYLKYLYTKEKVKKARQIKKEMKAAAREEAKNIKLLETTEEDKQKNFLFLRLWDRNMDIAMGWKGAQAMQFGQPLVFDMAYENYMKRKELQNTVSQLLESEGWNRRNVDPFHIYFCNLKIDGALHRELVKRYQEKWDKLLLTSTEKSHVDLFPKDSIIYLTADSPNVMTTFRHDKVYVIGSFVDKSMQPGTSLAKAKRLNLATECLPLDKYLQWEIGNKNLTLDQMIRILLCLKNNGNWQEALQFVPKRKHTGFLEISQHSQEFINRLKKAKT

SEQ ID NO: 475 - protein, 319 aa, Homo sapiens
MVLPPPDRRHVCLTTLVIMGSMAVMDAYLVEQNQGPRKIGVCIIVLVGDVCFLLVLRYVAVWVGAEVRTAKRGYAMILWFLYIFVLEIKLYFIFQNYKAARRGAADPVARKALTLLLSVCVPGLFLLLVALDRMEYVRTFRKREDLRGRLFWVALDLLDLLDMQASLWEPPRSGLPLWAEGLTFFYCYMLLLVLPCVALSEVSMQGEHIAPQKMMLYPVLSLATVNVVAVLARAANMALFRDSRVSAIFVGKNVVALATKACTFLEYRRQVRDFPPPALSLELQPPPPQRNSVPPPPPPLHGPPGRPHMSSPTRDPLDT

SEQ ID NO: 476 - protein, 211 aa, Homo sapiens
MSTAAVPELKQISRVEAMRLGPGWSHSCHAMLYAANPGQLFGRIPMRFSVLMQMRFDGLLGFPGGFVDRRFWSLEDGLNRVLGLGLGCLRLTEADYLSSHLTEGPHRVVAHLYARQLTLEQLHAVEISAVHSRDHGLEVLGLVRVPLYTQKDRVGGFPNFLSNAFVSTAKCQLLFALKVLNMMPEEKLVEALAAATEKQKKALEKLLPASS

SEQ ID NO: 477 - protein, 247 aa, Homo sapiens
MSTAAVPELKQISRVEAMRLGPGWSHSCHAMLYAANPGQLFGRIPMRFSVLMQMRFDGLLGFPGGFVDRRFWSLEDGLNRVLGLGLGCLRLTEADYLSSHLTEGPHRVVAHLYARQLTLEQLHAVEISAVHSRDHGLEVGPPPGPRPPPRGLALAPWKAPMGNTSPEGPLAGLGRVSLSPAMGWGEGSGAGRPGKEGRGWGPALGLPQGCVTSALLPAIANPGSGGVGSVGRKGWGRSGDCLGSWET

SEQ ID NO: 478 - protein, 220 aa, Homo sapiens
MGAAARTLRLALGLLLLATLLRPADACSCSPVHPQQAFCNADVVIRAKAVSEKEVDSGNDIYGNPIKRIQYEIKQIKMFKGPEKDIEFIYTAPSSAVCGVSLDVGGKKEYLIAGKAEGDGKMHITLCDFIVPWDTLSTTQKKSLNHRYQMGCECKITRCPMIPCYISSPDECLWMDWVTEKNINGHQAKFFACIKRSDGSCAWYRGAAPPKQEFLDIEDP

SEQ ID NO: 479 - protein, 764 aa, Homo sapiens
MTSPSSSPVFRLETLDGGQEDGSEADRGKLDFGSGLPPMESQFQGEDRKFAPQIRVNLNYRKGTGASQPDPNRFDRDRLFNAVSRGVPEDLAGLPEYLSKTSKYLTDSEYTEGSTGKTCLMKAVLNLKDGVNACILPLLQIDRDSGNPQPLVNAQCTDDYYRGHSALHIAIEKRSLQCVKLLVENGANVHARACGRFFQKGQGTCFYFGELPLSLAACTKQWDVVSYLLENPHQPASLQATDSQGNTVLHALVMISDNSAENIALVTSMYDGLLQAGARLCPTVQLEDIRNLQDLTPLKLAAKEGKIEIFRHILQREFSGLSHLSRKFTEWCYGPVRVSLYDLASVDSCEENSVLEIIAFHCKSPHRHRMVVLEPLNKLLQAKWDLLIPKFFLNFLCNLIYMFIFTAVAYHQPTLKKQAAPHLKAEVGNSMLLTGHILILLGGIYLLVGQLWYFWRRHVFIWISFIDSYFEILFLFQALLTVVSQVLCFLAIEWYLPLLVSALVLGWLNLLYYTRGFQHTGIYSVMIQKVILRDLLRFLLIYLVFLFGFAVALVSLSQEAWRPEAPTGPNATESVQPMEGQEDEGNGAQYRGILEASLELFKFTIGMGELAFQEQLHFRGMVLLLLLAYVLLTYILLLNMLIALMSETVNSVATDSWSIWKLQKAISVLEMENGYWWCRKKQRAGVMLTVGTKPDGSPDERWCFRVEEVNWASWEQTLPTLCEDPSGAGVPRTLENPVLASPPKEDEDGASEENYVPVQLLQSN

SEQ ID NO: 480 - protein, 118 aa, Homo sapiens
MLLALALLLAFLPPASQKSSNLEGRTKSVTRPTGSSAVITCDLPVENAVYTHWYLHQEGKAPQRLLYYDSYNSRVVLESGISREKYHTYASTGKSLKFILENLIERDSGVYYCATWDR

SEQ ID NO: 481 - protein, 226 aa, Homo sapiens
MFTLLVLLSQLPTVTLGFPHCARGPKASKHAGEEVFTSKEEANFFIHRRLLYNRFDLELFTPGNLERECNEELCNYEEAREIFVDEDKTIAFWQEYSAKGPTTKSDGNREKIDVMGLLTGLIAAGVFLVIFGLLGYYLCITKCNRLQHPCSSAVYERGRHTPSIIFRRPEEAALSPLPPSVEDAGLPSYEQAVALTRKHSVSPPPPYPGHTKGFRVFKKSMSLPSH

SEQ ID NO: 482 - protein, 1603 aa, Homo sapiens
MKDSNRCCCGQFTNQHIPPLPSATPSKNEEESKQVETQPEKWSVAKHTQSYPTDSYGVLEFQGGGYSNKAMYIRVSYDTKPDSLLHLMVKDWQLELPKLLISVHGGLQNFEMQPKLKQVFGKGLIKAAMTTGAWIFTGGVSTGVISHVGDALKDHSSKSRGRVCAIGIAPWGIVENKEDLVGKDVTRVYQTMSNPLSKLSVLNNSHTHFILADNGTLGKYGAEVKLRRLLEKHISLQKINTRLGQGVPLVGLVVEGGPNVVSIVLEYLQEEPPIPVVICDGSGRASDILSFAHKYCEEGGIINESLREQLLVTIQKTFNYNKAQSHQLFAIIMECMKKKELVTVFRMGSEGQQDIEMAILTALLKGTNVSAPDQLSLALAWNRVDIARSQIFVFGPHWPPLGSLAPPTDSKATEKEKKPPMATTKGGRGKGKGKKKGKVKEEVEEETDPRKIELLNWVNALEQAMLDALVLDRVDFVKLLIENGVNMQHFLTIPRLEELYNTRLGPPNTLHLLVRDVKKSNLPPDYHISLIDIGLVLEYLMGGAYRCNYTRKNFRTLYNNLFGPKRPKALKLLGMEDDEPPAKGKKKKKKKKEEEIDIDVDDPAVSRFQYPFHELMVWAVLMKRQKMAVFLWQRGEESMAKALVACKLYKAMAHESSESDLVDDISQDLDNNSKDFGQLALELLDQSYKHDEQIAMKLLTYELKNWSNSTCLKLAVAAKHRDFIAHTCSQMLLTDMWMGRLRMRKNPGLKVIMGILLPPTILFLEFRTYDDFSYQTSKENEDGKEKEEENTDANADAGSRKGDEENEHKKQRSIPIGTKICEFYNAPIVKFWFYTISYLGYLLLFNYVILVRMDGWPSLQEWIVISYIVSLALEKIREILMSEPGKLSQKIKVWLQEYWNITDLVAISTFMIGAILRLQNQPYMGYGRVIYCVDIIFWYIRVLDIFGVNKYLGPYVMMIGKMMIDMLYFVVIMLVVLMSFGVARQAILHPEEKPSWKLARNIFYMPYWMIYGEVFADQIDLYAMEINPPCGENLYDEEGKRLPPCIPGAWLTPALMACYLLVANILLVNLLIAVFNNTFFEVKSISNQVWKFQRYQLIMTFHDRPVLPPPMIILSHIYIIIMRLSGRCRKKREGDQEERDRGLKLFLSDEELKRLHEFEEQCVQEHFREKEDEQQSSSDERIRVTSERVENMSMRLEEINERETFMKTSLQTVDLRLAQLEELSNRMVNALENLAGIDRSDLIQARSRASSECEATYLLRQSSINSADGYSLYRYHFNGEELLFEDTSLSTSPGTGVRKKTCSFRIKEEKDVKTHLVPECQNSLHLSLGTSTSATPDGSHLAVDDLKNAEESKLGPDIGISKEDDERQTDSKKEETISPSLNKTDVIHGQDKSDVQNTQLTVETTNIEGTISYPLEETKITRYFPDETINACKTMKSRSFVYSRGRKLVGGVNQDVEYSSITDQQLTTEWQCQVQKITRSHSTDIPYIVSEAAVQAEHKEQFADMQDEHHVAEAIPRIPRLSLTITDRNGMENLLSVKPDQTLGFPSLRSKSLHGHPRNVKSIQGKLDRSGHASSVSSLVIVSGMTAEEKKVKKEKASTETEC

SEQ ID NO: 483 - protein, 1533 aa, Homo sapiens
MYIRVSYDTKPDSLLHLMVKDWQLELPKLLISVHGGLQNFEMQPKLKQVFGKGLIKAAMTTGAWIFTGGVSTGVISHVGDALKDHSSKSRGRVCAIGIAPWGIVENKEDLVGKDVTRVYQTMSNPLSKLSVLNNSHTHFILADNGTLGKYGAEVKLRRLLEKHISLQKINTRLGQGVPLVGLVVEGGPNVVSIVLEYLQEEPPIPVVICDGSGRASDILSFAHKYCEEGGIINESLREQLLVTIQKTFNYNKAQSHQLFAIIMECMKKKELVTVFRMGSEGQQDIEMAILTALLKGTNVSAPDQLSLALAWNRVDIARSQIFVFGPHWPPLGSLAPPTDSKATEKEKKPPMATTKGGRGKGKGKKKGKVKEEVEEETDPRKIELLNWVNALEQAMLDALVLDRVDFVKLLIENGVNMQHFLTIPRLEELYNTRLGPPNTLHLLVRDVKKSNLPPDYHISLIDIGLVLEYLMGGAYRCNYTRKNFRTLYNNLFGPKRPKALKLLGMEDDEPPAKGKKKKKKKKEEEIDIDVDDPAVSRFQYPFHELMVWAVLMKRQKMAVFLWQRGEESMAKALVACKLYKAMAHESSESDLVDDISQDLDNNSKDFGQLALELLDQSYKHDEQIAMKLLTYELKNWSNSTCLKLAVAAKHRDFIAHTCSQMLLTDMWMGRLRMRKNPGLKVIMGILLPPTILFLEFRTYDDFSYQTSKENEDGKEKEEENTDANADAGSRKGDEENEHKKQRSIPIGTKICEFYNAPIVKFWFYTISYLGYLLLFNYVILVRMDGWPSLQEWIVISYIVSLALEKIREILMSEPGKLSQKIKVWLQEYWNITDLVAISTFMIGAILRLQNQPYMGYGRVIYCVDIIFWYIRVLDIFGVNKYLGPYVMMIGKMMIDMLYFVVIMLVVLMSFGVARQAILHPEEKPSWKLARNIFYMPYWMIYGEVFADQIDLYAMEINPPCGENLYDEEGKRLPPCIPGAWLTPALMACYLLVANILLVNLLIAVFNNTFFEVKSISNQVWKFQRYQLIMTFHDRPVLPPPMIILSHIYIIIMRLSGRCRKKREGDQEERDRGLKLFLSDEELKRLHEFEEQCVQEHFREKEDEQQSSSDERIRVTSERVENMSMRLEEINERETFMKTSLQTVDLRLAQLEELSNRMVNALENLAGIDRSDLIQARSRASSECEATYLLRQSSINSADGYSLYRYHFNGEELLFEDTSLSTSPGTGVRKKTCSFRIKEEKDVKTHLVPECQNSLHLSLGTSTSATPDGSHLAVDDLKNAEESKLGPDIGISKEDDERQTDSKKEETISPSLNKTDVIHGQDKSDVQNTQLTVETTNIEGTISYPLEETKITRYFPDETINACKTMKSRSFVYSRGRKLVGGVNQDVEYSSITDQQLTTEWQCQVQKITRSHSTDIPYIVSEAAVQAEHKEQFADMQDEHHVAEAIPRIPRLSLTITDRNGMENLLSVKPDQTLGFPSLRSKSLHGHPRNVKSIQGKLDRSGHASSVSSLVIVSGMTAEEKKVKKEKASTETEC

SEQ ID NO: 484 - protein, 1597 aa, Homo sapiens
MKDSNRCCCGQFTNQHIPPLPSATPSKNEEESKQVETQPEKWSVAKHTQSYPTDSYGVLEFQGGGYSNKAMYIRVSYDTKPDSLLHLMVKDWQLELPKLLISVHGGLQNFEMQPKLKQVFGKGLIKAAMTTGAWIFTGGVSTGVISHVGDALKDHSSKSRGRVCAIGIAPWGIVENKEDLVGKDVTRVYQTMSNPLSKLSVLNNSHTHFILADNGTLGKYGAEVKLRRLLEKHISLQKINTRLGQGVPLVGLVVEGGPNVVSIVLEYLQEEPPIPVVICDGSGRASDILSFAHKIINESLREQLLVTIQKTFNYNKAQSHQLFAIIMECMKKKELVTVFRMGSEGQQDIEMAILTALLKGTNVSAPDQLSLALAWNRVDIARSQIFVFGPHWPPLGSLAPPTDSKATEKEKKPPMATTKGGRGKGKGKKKGKVKEEVEEETDPRKIELLNWVNALEQAMLDALVLDRVDFVKLLIENGVNMQHFLTIPRLEELYNTRLGPPNTLHLLVRDVKKSNLPPDYHISLIDIGLVLEYLMGGAYRCNYTRKNFRTLYNNLFGPKRPKALKLLGMEDDEPPAKGKKKKKKKKEEEIDIDVDDPAVSRFQYPFHELMVWAVLMKRQKMAVFLWQRGEESMAKALVACKLYKAMAHESSESDLVDDISQDLDNNSKDFGQLALELLDQSYKHDEQIAMKLLTYELKNWSNSTCLKLAVAAKHRDFIAHTCSQMLLTDMWMGRLRMRKNPGLKVIMGILLPPTILFLEFRTYDDFSYQTSKENEDGKEKEEENTDANADAGSRKGDEENEHKKQRSIPIGTKICEFYNAPIVKFWFYTISYLGYLLLFNYVILVRMDGWPSLQEWIVISYIVSLALEKIREILMSEPGKLSQKIKVWLQEYWNITDLVAISTFMIGAILRLQNQPYMGYGRVIYCVDIIFWYIRVLDIFGVNKYLGPYVMMIGKMMIDMLYFVVIMLVVLMSFGVARQAILHPEEKPSWKLARNIFYMPYWMIYGEVFADQIDLYAMEINPPCGENLYDEEGKRLPPCIPGAWLTPALMACYLLVANILLVNLLIAVFNNTFFEVKSISNQVWKFQRYQLIMTFHDRPVLPPPMIILSHIYIIIMRLSGRCRKKREGDQEERDRGLKLFLSDEELKRLHEFEEQCVQEHFREKEDEQQSSSDERIRVTSERVENMSMRLEEINERETFMKTSLQTVDLRLAQLEELSNRMVNALENLAGIDRSDLIQARSRASSECEATYLLRQSSINSADGYSLYRYHFNGEELLFEDTSLSTSPGTGVRKKTCSFRIKEEKDVKTHLVPECQNSLHLSLGTSTSATPDGSHLAVDDLKNAEESKLGPDIGISKEDDERQTDSKKEETISPSLNKTDVIHGQDKSDVQNTQLTVETTNIEGTISYPLEETKITRYFPDETINACKTMKSRSFVYSRGRKLVGGVNQDVEYSSITDQQLTTEWQCQVQKITRSHSTDIPYIVSEAAVQAEHKEQFADMQDEHHVAEAIPRIPRLSLTITDRNGMENLLSVKPDQTLGFPSLRSKSLHGHPRNVKSIQGKLDRSGHASSVSSLVIVSGMTAEEKKVKKEKASTETEC

SEQ ID NO: 485 - protein, 300 aa, Homo sapiens
MKDSNRCCCGQFTNQHIPPLPSATPSKNEEESKQVETQPEKWSVAKHTQSYPTDSYGVLEFQGGGYSNKAMYIRVSYDTKPDSLLHLMVKDWQLELPKLLISVHGGLQNFEMQPKLKQVFGKGLIKAAMTTGAWIFTGGVSTGVISHVGDALKDHSSKSRGRVCAIGIAPWGIVENKEDLVGKDVTRVYQTMSNPLSKLSVLNNSHTHFILADNGTLGKYGAEVKLRRLLEKHISLQKINTRLGQGVPLVGLVVEGGPNVVSIVLEYLQEEPPIPVVICDGSGRASDILSFAHKYCEEGG

SEQ ID NO: 486 - protein, 1642 aa, Homo sapiens
MSSFKRGSLKSSTSGSQKGQKSWIEKTFCKRECIFVIPSMKDSNRCCCGQFTNQHIPPLPSATPSKNEEESKQVETQPEKWSVAKHTQSYPTDSYGVLEFQGGGYSNKAMYIRVSYDTKPDSLLHLMVKDWQLELPKLLISVHGGLQNFEMQPKLKQVFGKGLIKAAMTTGAWIFTGGVSTGVISHVGDALKDHSSKSRGRVCAIGIAPWGIVENKEDLVGKDVTRVYQTMSNPLSKLSVLNNSHTHFILADNGTLGKYGAEVKLRRLLEKHISLQKINTRLGQGVPLVGLVVEGGPNVVSIVLEYLQEEPPIPVVICDGSGRASDILSFAHKYCEEGGIINESLREQLLVTIQKTFNYNKAQSHQLFAIIMECMKKKELVTVFRMGSEGQQDIEMAILTALLKGTNVSAPDQLSLALAWNRVDIARSQIFVFGPHWPPLGSLAPPTDSKATEKEKKPPMATTKGGRGKGKGKKKGKVKEEVEEETDPRKIELLNWVNALEQAMLDALVLDRVDFVKLLIENGVNMQHFLTIPRLEELYNTRLGPPNTLHLLVRDVKKSNLPPDYHISLIDIGLVLEYLMGGAYRCNYTRKNFRTLYNNLFGPKRPKALKLLGMEDDEPPAKGKKKKKKKKEEEIDIDVDDPAVSRFQYPFHELMVWAVLMKRQKMAVFLWQRGEESMAKALVACKLYKAMAHESSESDLVDDISQDLDNNSKDFGQLALELLDQSYKHDEQIAMKLLTYELKNWSNSTCLKLAVAAKHRDFIAHTCSQMLLTDMWMGRLRMRKNPGLKVIMGILLPPTILFLEFRTYDDFSYQTSKENEDGKEKEEENTDANADAGSRKGDEENEHKKQRSIPIGTKICEFYNAPIVKFWFYTISYLGYLLLFNYVILVRMDGWPSLQEWIVISYIVSLALEKIREILMSEPGKLSQKIKVWLQEYWNITDLVAISTFMIGAILRLQNQPYMGYGRVIYCVDIIFWYIRVLDIFGVNKYLGPYVMMIGKMMIDMLYFVVIMLVVLMSFGVARQAILHPEEKPSWKLARNIFYMPYWMIYGEVFADQIDLYAMEINPPCGENLYDEEGKRLPPCIPGAWLTPALMACYLLVANILLVNLLIAVFNNTFFEVKSISNQVWKFQRYQLIMTFHDRPVLPPPMIILSHIYIIIMRLSGRCRKKREGDQEERDRGLKLFLSDEELKRLHEFEEQCVQEHFREKEDEQQSSSDERIRVTSERVENMSMRLEEINERETFMKTSLQTVDLRLAQLEELSNRMVNALENLAGIDRSDLIQARSRASSECEATYLLRQSSINSADGYSLYRYHFNGEELLFEDTSLSTSPGTGVRKKTCSFRIKEEKDVKTHLVPECQNSLHLSLGTSTSATPDGSHLAVDDLKNAEESKLGPDIGISKEDDERQTDSKKEETISPSLNKTDVIHGQDKSDVQNTQLTVETTNIEGTISYPLEETKITRYFPDETINACKTMKSRSFVYSRGRKLVGGVNQDVEYSSITDQQLTTEWQCQVQKITRSHSTDIPYIVSEAAVQAEHKEQFADMQDEHHVAEAIPRIPRLSLTITDRNGMENLLSVKPDQTLGFPSLRSKSLHGHPRNVKSIQGKLDRSGHASSVSSLVIVSGMTAEEKKVKKEKASTETEC

SEQ ID NO: 487 - protein, 1625 aa, Homo sapiens
MGQKSWIEKTFCKRECIFVIPSMKDSNRCCCGQFTNQHIPPLPSATPSKNEEESKQVETQPEKWSVAKHTQSYPTDSYGVLEFQGGGYSNKAMYIRVSYDTKPDSLLHLMVKDWQLELPKLLISVHGGLQNFEMQPKLKQVFGKGLIKAAMTTGAWIFTGGVSTGVISHVGDALKDHSSKSRGRVCAIGIAPWGIVENKEDLVGKDVTRVYQTMSNPLSKLSVLNNSHTHFILADNGTLGKYGAEVKLRRLLEKHISLQKINTRLGQGVPLVGLVVEGGPNVVSIVLEYLQEEPPIPVVICDGSGRASDILSFAHKYCEEGGIINESLREQLLVTIQKTFNYNKAQSHQLFAIIMECMKKKELVTVFRMGSEGQQDIEMAILTALLKGTNVSAPDQLSLALAWNRVDIARSQIFVFGPHWPPLGSLAPPTDSKATEKEKKPPMATTKGGRGKGKGKKKGKVKEEVEEETDPRKIELLNWVNALEQAMLDALVLDRVDFVKLLIENGVNMQHFLTIPRLEELYNTRLGPPNTLHLLVRDVKKSNLPPDYHISLIDIGLVLEYLMGGAYRCNYTRKNFRTLYNNLFGPKRPKALKLLGMEDDEPPAKGKKKKKKKKEEEIDIDVDDPAVSRFQYPFHELMVWAVLMKRQKMAVFLWQRGEESMAKALVACKLYKAMAHESSESDLVDDISQDLDNNSKDFGQLALELLDQSYKHDEQIAMKLLTYELKNWSNSTCLKLAVAAKHRDFIAHTCSQMLLTDMWMGRLRMRKNPGLKVIMGILLPPTILFLEFRTYDDFSYQTSKENEDGKEKEEENTDANADAGSRKGDEENEHKKQRSIPIGTKICEFYNAPIVKFWFYTISYLGYLLLFNYVILVRMDGWPSLQEWIVISYIVSLALEKIREILMSEPGKLSQKIKVWLQEYWNITDLVAISTFMIGAILRLQNQPYMGYGRVIYCVDIIFWYIRVLDIFGVNKYLGPYVMMIGKMMIDMLYFVVIMLVVLMSFGVARQAILHPEEKPSWKLARNIFYMPYWMIYGEVFADQIDLYAMEINPPCGENLYDEEGKRLPPCIPGAWLTPALMACYLLVANILLVNLLIAVFNNTFFEVKSISNQVWKFQRYQLIMTFHDRPVLPPPMIILSHIYIIIMRLSGRCRKKREGDQEERDRGLKLFLSDEELKRLHEFEEQCVQEHFREKEDEQQSSSDERIRVTSERVENMSMRLEEINERETFMKTSLQTVDLRLAQLEELSNRMVNALENLAGIDRSDLIQARSRASSECEATYLLRQSSINSADGYSLYRYHFNGEELLFEDTSLSTSPGTGVRKKTCSFRIKEEKDVKTHLVPECQNSLHLSLGTSTSATPDGSHLAVDDLKNAEESKLGPDIGISKEDDERQTDSKKEETISPSLNKTDVIHGQDKSDVQNTQLTVETTNIEGTISYPLEETKITRYFPDETINACKTMKSRSFVYSRGRKLVGGVNQDVEYSSITDQQLTTEWQCQVQKITRSHSTDIPYIVSEAAVQAEHKEQFADMQDEHHVAEAIPRIPRLSLTITDRNGMENLLSVKPDQTLGFPSLRSKSLHGHPRNVKSIQGKLDRSGHASSVSSLVIVSGMTAEEKKVKKEKASTETEC

SEQ ID NO: 488 - protein, 136 aa, Homo sapiens
MKDSNRCCCGQFTNQHIPPLPSATPSKNEEESKQVETQPEKWSVAKHTQSYPTDSYGVLEFQGGGYSNKAMVRKAFRHGATRITAFIGGQSPSPKLQIPGLLHGCGSIFLDISLKNQEIYLCTWLLAMRLGNWTPL

SEQ ID NO: 489 - protein, 378 aa, Homo sapiens
MSKEPLILWLMIEFWWLYLTPVTSETVVTEVLGHRVTLPCLYSSWSHNSNSMCWGKDQCPYSGCKEALIRTDGMRVTSRKSAKYRLQGTIPRGDVSLTILNPSESDSGVYCCRIEVPGWFNDVKINVRLNLQRASTTTHRTATTTTRRTTTTSPTTTRQMTTTPAALPTTVVTTPDLTTGTPLQMTTIAVFTTANTCLSLTPSTLPEEATGLLTPEPSKEGPILTAESETVLPSDSWSSVESTSADTVLLTSKESKVWDLPSTSHVSMWKTSDSVSSPQPGASDTAVPEQNKTTKTGQMDGIPMSMKNEMPISQLLMIIAPSLGFVLFALFVAFLLRGKLMETYCSQKHTRLDYIGDSKNVLNDVQHGREDEDGLFTL

SEQ ID NO: 490 - protein, 350 aa, Homo sapiens
MSKEPLILWLMIEFWWLYLTPVTSETVVTEVLGHRVTLPCLYSSWSHNSNSMCWGKDQCPYSGCKEALIRTDGMRVTSRKSAKYRLQGTIPRGDVSLTILNPSESDSGVYCCRIEVPGWFNDVKINVRLNLQRASTTTHRTATTTTRRTTTTSPTTTRQMTTTPAALPTTVVTTPDLTTGTPLQMTTIAVFTTANTCLSLTPSTLPEEATGLLTPEPSKEGPILTAESETVLPSDSWSSVESTSADTVLLTSKASDTAVPEQNKTTKTGQMDGIPMSMKNEMPISQLLMIIAPSLGFVLFALFVAFLLRGKLMETYCSQKHTRLDYIGDSKNVLNDVQHGREDEDGLFTL

SEQ ID NO: 491 - protein, 1214 aa, Homo sapiens
MVVPEKEQSWIPKIFKKKTCTTFIVDSTDPGGTLCQCGRPRTAHPAVAMEDAFGAAVVTVWDSDAHTTEKPTDAYGELDFTGAGRKHSNFLRLSDRTDPAAVYSLVTRTWGFRAPNLVVSVLGGSGGPVLQTWLQDLLRRGLVRAAQSTGAWIVTGGLHTGIGRHVGVAVRDHQMASTGGTKVVAMGVAPWGVVRNRDTLINPKGSFPARYRWRGDPEDGVQFPLDYNYSAFFLVDDGTHGCLGGENRFRLRLESYISQQKTGVGGTGIDIPVLLLLIDGDEKMLTRIENATQAQLPCLLVAGSGGAADCLAETLEDTLAPGSGGARQGEARDRIRRFFPKGDLEVLQAQVERIMTRKELLTVYSSEDGSEEFETIVLKALVKACGSSEASAYLDELRLAVAWNRVDIAQSELFRGDIQWRSFHLEASLMDALLNDRPEFVRLLISHGLSLGHFLTPMRLAQLYSAAPSNSLIRNLLDQASHSAGTKAPALKGGAAELRPPDVGHVLRMLLGKMCAPRYPSGGAWDPHPGQGFGESMYLLSDKATSPLSLDAGLGQAPWSDLLLWALLLNRAQMAMYFWEMGSNAVSSALGACLLLRVMARLEPDAEEAARRKDLAFKFEGMGVDLFGECYRSSEVRAARLLLRRCPLWGDATCLQLAMQADARAFFAQDGVQSLLTQKWWGDMASTTPIWALVLAFFCPPLIYTRLITFRKSEEEPTREELEFDMDSVINGEGPVGTADPAEKTPLGVPRQSGRPGCCGGRCGGRRCLRRWFHFWGAPVTIFMGNVVSYLLFLLLFSRVLLVDFQPAPPGSLELLLYFWAFTLLCEELRQGLSGGGGSLASGGPGPGHASLSQRLRLYLADSWNQCDLVALTCFLLGVGCRLTPGLYHLGRTVLCIDFMVFTVRLLHIFTVNKQLGPKIVIVSKMMKDVFFFLFFLGVWLVAYGVATEGLLRPRDSDFPSILRRVFYRPYLQIFGQIPQEDMDVALMEHSNCSSEPGFWAHPPGAQAGTCVSQYANWLVVLLLVIFLLVANILLVNLLIAMFSYTFGKVQGNSDLYWKAQRYRLIREFHSRPALAPPFIVISHLRLLLRQLCRRPRSPQPSSPALEHFRVYLSKEAERKLLTWESVHKENFLLARARDKRESDSERLKRTSQKVDLALKQLGHIREYEQRLKVLEREVQQCSRVLGWVAEALSRSALLPPGGPPPPDLPGSKD

SEQ ID NO: 492 - protein, 1040 aa, Homo sapiens
MASTGGTKVVAMGVAPWGVVRNRDTLINPKGSFPARYRWRGDPEDGVQFPLDYNYSAFFLVDDGTHGCLGGENRFRLRLESYISQQKTGVGGTGIDIPVLLLLIDGDEKMLTRIENATQAQLPCLLVAGSGGAADCLAETLEDTLAPGSGGARQGEARDRIRRFFPKGDLEVLQAQVERIMTRKELLTVYSSEDGSEEFETIVLKALVKACGSSEASAYLDELRLAVAWNRVDIAQSELFRGDIQWRSFHLEASLMDALLNDRPEFVRLLISHGLSLGHFLTPMRLAQLYSAAPSNSLIRNLLDQASHSAGTKAPALKGGAAELRPPDVGHVLRMLLGKMCAPRYPSGGAWDPHPGQGFGESMYLLSDKATSPLSLDAGLGQAPWSDLLLWALLLNRAQMAMYFWEMGSNAVSSALGACLLLRVMARLEPDAEEAARRKDLAFKFEGMGVDLFGECYRSSEVRAARLLLRRCPLWGDATCLQLAMQADARAFFAQDGVQSLLTQKWWGDMASTTPIWALVLAFFCPPLIYTRLITFRKSEEEPTREELEFDMDSVINGEGPVGTADPAEKTPLGVPRQSGRPGCCGGRCGGRRCLRRWFHFWGAPVTIFMGNVVSYLLFLLLFSRVLLVDFQPAPPGSLELLLYFWAFTLLCEELRQGLSGGGGSLASGGPGPGHASLSQRLRLYLADSWNQCDLVALTCFLLGVGCRLTPGLYHLGRTVLCIDFMVFTVRLLHIFTVNKQLGPKIVIVSKMMKDVFFFLFFLGVWLVAYGVATEGLLRPRDSDFPSILRRVFYRPYLQIFGQIPQEDMDVALMEHSNCSSEPGFWAHPPGAQAGTCVSQYANWLVVLLLVIFLLVANILLVNLLIAMFSYTFGKVQGNSDLYWKAQRYRLIREFHSRPALAPPFIVISHLRLLLRQLCRRPRSPQPSSPALEHFRVYLSKEAERKLLTWESVHKENFLLARARDKRESDSERLKRTSQKVDLALKQLGHIREYEQRLKVLEREVQQCSRVLGWVAEALSRSALLPPGGPPPPDLPGSKD

SEQ ID NO: 493 - protein, 1069 aa, Homo sapiens
MVVPEKEQSWIPKIFKKKTCTTFIVDSTDPGGTLCQCGRPRTAHPAVAMEDAFGAAVVTVWDSDAHTTEKPTDAYGELDFTGAGRKHSNFLRLSDRTDPAAVYSLVTRTWGFRAPNLVVSVLGGSGGPVLQTWLQDLLRRGLVRAAQSTGAWIVTGGLHTGIGRHVGVAVRDHQMASTGGTKVVAMGVAPWGVVRNRDTLINPKGSFPARYRWRGDPEDGVQFPLDYNYSAFFLVDDGTHGCLGGENRFRLRLESYISQQKTGVGGTGIDIPVLLLLIDGDEKMLTRIENATQAQLPCLLVAGSGGAADCLAETLEDTLAPGSGGARQGEARDRIRRFFPKGDLEVLQAQVERIMTRKELLTVYSSEDGSEEFETIVLKALVKACGSSEASAYLDELRLAVAWNRVDIAQSELFRGDIQWRSFHLEASLMDALLNDRPEFVRLLISHGLSLGHFLTPMRLAQLYSAAPSNSLIRNLLDQASHSAGTKAPALKGGAAELRPPDVGHVLRMLLGKMCAPRYPSGGAWDPHPGQGFGESMYLLSDKATSPLSLDAGLGQAPWSDLLLWALLLNRAQMAMYFWEMGSNAVSSALGACLLLRVMARLEPDAEEAARRKDLAFKFEGMGVDLFGECYRSSEVRAARLLLRRCPLWGDATCLQLAMQADARAFFAQDGVQSLLTQKWWGDMASTTPIWALVLAFFCPPLIYTRLITFRKSEEEPTREELEFDMDSVINGEGPVGLTPGLYHLGRTVLCIDFMVFTVRLLHIFTVNKQLGPKIVIVSKMMKDVFFFLFFLGVWLVAYGVATEGLLRPRDSDFPSILRRVFYRPYLQIFGQIPQEDMDVALMEHSNCSSEPGFWAHPPGAQAGTCVSQYANWLVVLLLVIFLLVANILLVNLLIAMFSYTFGKVQGNSDLYWKAQRYRLIREFHSRPALAPPFIVISHLRLLLRQLCRRPRSPQPSSPALEHFRVYLSKEAERKLLTWESVHKENFLLARARDKRESDSERLKRTSQKVDLALKQLGHIREYEQRLKVLEREVQQCSRVLGWVAEALSRSALLPPGGPPPPDLPGSKD

SEQ ID NO: 494 - protein, 977 aa, Homo sapiens
MAQFYYKRNVNAPYRDRIPLRIVRAESELSPSEKAYLNAVEKGDYASVKKSLEEAEIYFKININCIDPLGRTALLIAIENENLELIELLLSFNVYVGDALLHAIRKEVVGAVELLLNHKKPSGEKQVPPILLDKQFSEFTPDITPIILAAHTNNYEIIKLLVQKGVSVPRPHEVRCNCVECVSSSDVDSLRHSRSRLNIYKALASPSLIALSSEDPFLTAFQLSWELQELSKVENEFKSEYEELSRQCKQFAKDLLDQTRSSRELEIILNYRDDNSLIEEQSGNDLARLKLAIKYRQKEFVAQPNCQQLLASRWYDEFPGWRRRHWAVKMVTCFIIGLLFPVFSVCYLIAPKSPLGLFIRKPFIKFICHTASYLTFLFLLLLASQHIDRSDLNRQGPPPTIVEWMILPWVLGFIWGEIKQMWDGGLQDYIHDWWNLMDFVMNSLYLATISLKIVAFVKYSALNPRESWDMWHPTLVAEALFAIANIFSSLRLISLFTANSHLGPLQISLGRMLLDILKFLFIYCLVLLAFANGLNQLYFYYEETKGLTCKGIRCEKQNNAFSTLFETLQSLFWSIFGLINLYVTNVKAQHEFTEFVGATMFGTYNVISLVVLLNMLIAMMNNSYQLIADHADIEWKFARTKLWMSYFEEGGTLPTPFNVIPSPKSLWYLIKWIWTHLCKKKMRRKPESFGTIGRRAADNLRRHHQYQEVMRNLVKRYVAAMIRDAKTEEGLTEENFKELKQDISSFRFEVLGLLRGSKLSTIQSANASKESSNSADSDEKSDSEGNSKDKKKNFSLFDLTTLIHPRSAAIASERHNISNGSALVVQEPPREKQRKVNFVTDIKNFGLFHRRSKQNAAEQNANQIFSVSEEVARQQAAGPLERNIQLESRGLASRGDLSIPGLSEQCVLVDHRERNTDTLGLQVGKRVCPFKSEKVVVEDTVPIIPKEKHAKEEDSSIDYDLNLPDTVTHEDYVTTRL

SEQ ID NO: 495 - protein, 893 aa, Homo sapiens
MAQFYYKRNVNAPYRDRIPLRIVRAESELSPSEKAYLNAVEKGDYASVKKSLEEAEIYFKININCIDPLGRTALLIAIENENLELIELLLSFNVYVGDALLHAIRKEVVGAVELLLNHKKPSGEKQVPPILLDKQFSEFTPDITPIILAAHTNNYEIIKLLVQKGVSVPRPHEVRCNCVECVSSSDVDSLRHSRSRLNIYKALASPSLIALSSEDPFLTAFQLSWELQELSKVENEFKSEYEELSRQCKQFAKDLLDQTRSSRELEIILNYRDDNSLIEEQSGNDLARLKLAIKYRQKEFVAQPNCQQLLASRWYDEFPGWRRRHWAVKMVTCFIIGLLFPVFSVCYLIAPKSPLGLFIRKPFIKFICHTASYLTFLFLLLLASQHIDRSDLNRQGPPPTIVEWMILPWVLGFIWGEIKQMWDGGLQDYIHDWWNLMDFVMNSLYLATISLKIVAFVKYSALNPRESWDMWHPTLVAEALFAIANIFSSLRLISLFTANSHLGPLQISLGRMLLDILKFLFIYCLVLLAFANGLNQLYFYYEETKGLTCKGIRCEKQNNAFSTLFETLQSLFWSIFGLINLYVTNVKAQHEFTEFVGATMFGTYNVISLVVLLNMLIAMMNNSYQLIADHADIEWKFARTKLWMSYFEEGGTLPTPFNVIPSPKSLWYLIKWIWTHLCKKKMRRKPESFGTIGRRAADNLRRHHQYQEVMRNLVKRYVAAMIRDAKTEEGLTEENFKELKQDISSFRFEVLGLLRGSKLSTIQSANASKESSNSADSDEKSDSEEEVARQQAAGPLERNIQLESRGLASRGDLSIPGLSEQCVLVDHRERNTDTLGLQVGKRVCPFKSEKVVVEDTVPIIPKEKHAKEEDSSIDYDLNLPDTVTHEDYVTTRL

SEQ ID NO: 496 - protein, 836 aa, Homo sapiens
MAQFYYKRNVNAPYRDRIPLRIVRAESELSPSEKAYLNAVEKGDYASVKKSLEEAEIYFKININCIDPLGRTALLIAIENENLELIELLLSFNVYVGDALLHAIRKEVVGAVELLLNHKKPSGEKQVPPILLDKQFSEFTPDITPIILAAHTNNYEIIKLLVQKGVSVPRPHEVRCNCVECVSSSDVDSLRHSRSRLNIYKALASPSLIALSSEDPFLTAFQLSWELQELSKVENEFKSEYEELSRQCKQFAKDLLDQTRSSRELEIILNYRDDNSLIEEQSGNDLARLKLAIKYRQKEFVAQPNCQQLLASRWYDEFPGWRRRHWAVKMVTCFIIGLLFPVFSVCYLIAPKSPLGLFIRKPFIKFICHTASYLTFLFLLLLASQHIDRSDLNRQGPPPTIVEWMILPWVLGFIWGEIKQMWDGGLQDYIHDWWNLMDFVMNSLYLATISLKIVAFVKYSALNPRESWDMWHPTLVAEALFAIANIFSSLRLISLFTANSHLGPLQISLGRMLLDILKFLFIYCLVLLAFANGLNQLYFYYEETKGLTCKGIRCEKQNNAFSTLFETLQSLFWSIFGLINLYVTNVKAQHEFTEFVGATMFGTYNVISLVVLLNMLIAMMNNSYQLIADHADIEWKFARTKLWMSYFEEGGTLPTPFNVIPSPKSLWYLIKWIWTHLCKKKMRRKPESFGTIGRRAADNLRRHHQYQEVMRNLVKRYVAAMIRDAKTEEVARQQAAGPLERNIQLESRGLASRGDLSIPGLSEQCVLVDHRERNTDTLGLQVGKRVCPFKSEKVVVEDTVPIIPKEKHAKEEDSSIDYDLNLPDTVTHEDYVTTRL

SEQ ID NO: 497 - protein, 828 aa, Homo sapiens
MAQFYYKRNVNAPYRDRIPLRIVRAESELSPSEKAYLNAVEKGDYASVKKSLEEAEIYFKININCIDPLGRTALLIAIENENLELIELLLSFNVYVGDALLHAIRKEVVGAVELLLNHKKPSGEKQVPPILLDKQFSEFTPDITPIILAAHTNNYEIIKLLVQKGVSVPRPHEVRCNCVECVSSSDVDSLRHSRSRLNIYKALASPSLIALSSEDPFLTAFQLSWELQELSKVENEFKSEYEELSRQCKQFAKDLLDQTRSSRELEIILNYRDDNSLIEEQSGNDLARLKLAIKYRQKEFVAQPNCQQLLASRWYDEFPGWRRRHWAVKMVTCFIIGLLFPVFSVCYLIAPKSPLGLFIRKPFIKFICHTASYLTFLFLLLLASQHIDRSDLNRQGPPPTIVEWMILPWVLGFIWGEIKQMWDGGLQDYIHDWWNLMDFVMNSLYLATISLKIVAFVKYSALNPRESWDMWHPTLVAEALFAIANIFSSLRLISLFTANSHLGPLQISLGRMLLDILKFLFIYCLVLLAFANGLNQLYFYYEETKGLTCKGIRCEKQNNAFSTLFETLQSLFWSIFGLINLYVTNVKAQHEFTEFVGATMFGTYNVISLVVLLNMLIAMMNNSYQLIARRAADNLRRHHQYQEVMRNLVKRYVAAMIRDAKTEEGLTEENFKELKQDISSFRFEVLGLLRGSKLSTIQSANASKESSNSADSDEKSDSEEEVARQQAAGPLERNIQLESRGLASRGDLSIPGLSEQCVLVDHRERNTDTLGLQVGKRVCPFKSEKVVVEDTVPIIPKEKHAKEEDSSIDYDLNLPDTVTHEDYVTTRL

SEQ ID NO: 498 - protein, 982 aa, Homo sapiens
MAQFYYKRNVNAPYRDRIPLRIVRAESELSPSEKAYLNAVEKGDYASVKKSLEEAEIYFKININCIDPLGRTALLIAIENENLELIELLLSFNVYVGDALLHAIRKEVVGAVELLLNHKKPSGEKQVPPILLDKQFSEFTPDITPIILAAHTNNYEIIKLLVQKGVSVPRPHEVRCNCVECVSSSDVDSLRHSRSRLNIYKALASPSLIALSSEDPFLTAFQLSWELQELSKVENEFKSEYEELSRQCKQFAKDLLDQTRSSRELEIILNYRDDNSLIEEQSGNDLARLKLAIKYRQKEFVAQPNCQQLLASRWYDEFPGWRRRHWAVKMVTCFIIGLLFPVFSVCYLIAPKSPLGLFIRKPFIKFICHTASYLTFLFLLLLASQHIDRSDLNRQGPPPTIVEWMILPWVLGFIWGEIKQMWDGGLQDYIHDWWNLMDFVMNSLYLATISLKIVAFVKYSALNPRESWDMWHPTLVAEALFAIANIFSSLRLISLFTANSHLGPLQISLGRMLLDILKFLFIYCLVLLAFANGLNQLYFYYEETKGLTCKGIRCEKQNNAFSTLFETLQSLFWSIFGLINLYVTNVKAQHEFTEFVGATMFGTYNVISLVVLLNMLIAMMNNSYQLIADHADIEWKFARTKLWMSYFEEGGTLPTPFNVIPSPKSLWYLIKWIWTHLCKKKMRRKPESFGTIGVRTQHRRAADNLRRHHQYQEVMRNLVKRYVAAMIRDAKTEEGLTEENFKELKQDISSFRFEVLGLLRGSKLSTIQSANASKESSNSADSDEKSDSEGNSKDKKKNFSLFDLTTLIHPRSAAIASERHNISNGSALVVQEPPREKQRKVNFVTDIKNFGLFHRRSKQNAAEQNANQIFSVSEEVARQQAAGPLERNIQLESRGLASRGDLSIPGLSEQCVLVDHRERNTDTLGLQVGKRVCPFKSEKVVVEDTVPIIPKEKHAKEEDSSIDYDLNLPDTVTHEDYVTTRL

SEQ ID NO: 499 - protein, 804 aa, Homo sapiens
MAQFYYKRNVNAPYRDRIPLRIVRAESELSPSEKAYLNAVEKGDYASVKKSLEEAEIYFKININCIDPLGRTALLIAIENENLELIELLLSFNVYVGDALLHAIRKEVVGAVELLLNHKKPSGEKQFVAQPNCQQLLASRWYDEFPGWRRRHWAVKMVTCFIIGLLFPVFSVCYLIAPKSPLGLFIRKPFIKFICHTASYLTFLFLLLLASQHIDRSDLNRQGPPPTIVEWMILPWVLGFIWGEIKQMWDGGLQDYIHDWWNLMDFVMNSLYLATISLKIVAFVKYSALNPRESWDMWHPTLVAEALFAIANIFSSLRLISLFTANSHLGPLQISLGRMLLDILKFLFIYCLVLLAFANGLNQLYFYYEETKGLTCKGIRCEKQNNAFSTLFETLQSLFWSIFGLINLYVTNVKAQHEFTEFVGATMFGTYNVISLVVLLNMLIAMMNNSYQLIADHADIEWKFARTKLWMSYFEEGGTLPTPFNVIPSPKSLWYLIKWIWTHLCKKKMRRKPESFGTIGRRAADNLRRHHQYQEVMRNLVKRYVAAMIRDAKTEEGLTEENFKELKQDISSFRFEVLGLLRGSKLSTIQSANASKESSNSADSDEKSDSEGNSKDKKKNFSLFDLTTLIHPRSAAIASERHNISNGSALVVQEPPREKQRKVNFVTDIKNFGLFHRRSKQNAAEQNANQIFSVSEEVARQQAAGPLERNIQLESRGLASRGDLSIPGLSEQCVLVDHRERNTDTLGLQVGKRVCPFKSEKVVVEDTVPIIPKEKHAKEEDSSIDYDLNLPDTVTHEDYVTTRL

SEQ ID NO: 500 - protein, 323 aa, Homo sapiens
MAQFYYKRNVNAPYRDRIPLRIVRAESELSPSEKAYLNAVEKGDYASVKKSLEEAEIYFKININCIDPLGRTALLIAIENENLELIELLLSFNVYVGDALLHAIRKEVVGAVELLLNHKKPSGEKQVPPILLDKQFSEFTPDITPIILAAHTNNYEIIKLLVQKGVSVPRPHEVRCNCVECVSSSDVDSLRHSRSRLNIYKALASPSLIALSSEDPFLTAFQLSWELQELSKVENEFKSEYEELSRQCKQFAKDLLDQTRSSRELEIILNYRDDNSLIEEQSGNDLARLKLAIKYRQKEASYGEKLNRCGMADFRTTSMIGGI

SEQ ID NO: 501 - protein, 862 aa, Homo sapiens
MLRNSTFKNMQRRHTTLREKGRRQAIRGPAYMFNEKGTSLTPEEERFLDSAEYGNIPVVRKMLEESKTLNFNCVDYMGQNALQLAVGNEHLEVTELLLKKENLARVGDALLLAISKGYVRIVEAILNHPAFAQGQRLTLSPLEQELRDDDFYAYDEDGTRFSHDITPIILAAHCQEYEIVHILLLKGARIERPHDYFCKCNECTEKQRKDSFSHSRSRMNAYKGLASAAYLSLSSEDPVLTALELSNELARLANIETEFKNDYRKLSMQCKDFVVGVLDLCRDTEEVEAILNGDVNFQVWSDHHRPSLSRIKLAIKYEVKKFVAHPNCQQQLLTMWYENLSGLRQQSIAVKFLAVFGVSIGLPFLAIAYWIAPCSKLGRTLRSPFMKFVAHAVSFTIFLGLLVVNASDRFEGVKTLPNETFTDYPKQIFRVKTTQFSWTEMLIMKWVLGMIWSECKEIWEEGPREYVLHLWNLLDFGMLSIFVASFTARFMAFLKATEAQLYVDQHVQDDTLHNVSLPPEVAYFTYARDKWWPSDPQIISEGLYAIAVVLSFSRIAYILPANESFGPLQISLGRTVKDIFKFMVIFIMVFVAFMIGMFNLYSYYRGAKYNPAFTTVEESFKTLFWSIFGLSEVISVVLKYDHKFIENIGYVLYGVYNVTMVVVLLNMLIAMINNSYQEIEEDADVEWKFARAKLWLSYFDEGRTLPAPFNLVPSPKSFYYLIMRIKMCLIKLCKSKAKSCENDLEMGMLNSKFKKTRYQAGMRNSENLTANNTLSKPTRYQKIMKRLIKRYVLKAQVDRENDEVNEGELKEIKQDISSLRYELLEEKSQATGELADLIQQLSEKFGKNLNKDHLRVNKGKDI

SEQ ID NO: 502 - protein, 746 aa, Homo sapiens
MLRNSTFKNMQRRHTTLREKGRRQAIRGPAYMFNEKGTSLTPEEERFLDSAEYGNIPVVRKMLEESKTLNFNCVDYMGQNALQLAVGNEHLEVTELLLKKENLARVGDALLLAISKGYVRIVEAILNHPAFAQGQRLTLSPLEQELRDDDFYAYDEDGTRFSHDITPIILAAHCQEYEIVHILLLKGARIERPHDYFCKCNECTEKQRKDSFSHSRSRMNAYKGLASAAYLSLSSEDPVLTALELSNELARLANIETEFKLGRTLRSPFMKFVAHAVSFTIFLGLLVVNASDRFEGVKTLPNETFTDYPKQIFRVKTTQFSWTEMLIMKWVLGMIWSECKEIWEEGPREYVLHLWNLLDFGMLSIFVASFTARFMAFLKATEAQLYVDQHVQDDTLHNVSLPPEVAYFTYARDKWWPSDPQIISEGLYAIAVVLSFSRIAYILPANESFGPLQISLGRTVKDIFKFMVIFIMVFVAFMIGMFNLYSYYRGAKYNPAFTTVEESFKTLFWSIFGLSEVISVVLKYDHKFIENIGYVLYGVYNVTMVVVLLNMLIAMINNSYQEIEEDADVEWKFARAKLWLSYFDEGRTLPAPFNLVPSPKSFYYLIMRIKMCLIKLCKSKAKSCENDLEMGMLNSKFKKTRYQAGMRNSENLTANNTLSKPTRYQKIMKRLIKRYVLKAQVDRENDEVNEGELKEIKQDISSLRYELLEEKSQATGELADLIQQLSEKFGKNLNKDHLRVNKGKDI

SEQ ID NO: 503 - protein, 801 aa, Homo sapiens
MLRNSTFKNMQRRHTTLREKGRRQAIRGPAYMFNEKGTSLTPEEERFLDSAEYGNIPVVRKMLEESKTLNFNCVDYMGQNALQLAVGNEHLEVTELLLKKENLARVGDALLLAISKGYVRIVEAILNHPAFAQGQRLTLSPLEQELRDDDFYAYDEDGTRFSHDITPIILAAHCQEYEIVHILLLKGARIERPHDYFCKCNECTEKQRKDSFSHSRSRMNAYKGLASAAYLSLSSEDPVLTALELSNELARLANIETEFKFVAHPNCQQQLLTMWYENLSGLRQQSIAVKFLAVFGVSIGLPFLAIAYWIAPCSKLGRTLRSPFMKFVAHAVSFTIFLGLLVVNASDRFEGVKTLPNETFTDYPKQIFRVKTTQFSWTEMLIMKWVLGMIWSECKEIWEEGPREYVLHLWNLLDFGMLSIFVASFTARFMAFLKATEAQLYVDQHVQDDTLHNVSLPPEVAYFTYARDKWWPSDPQIISEGLYAIAVVLSFSRIAYILPANESFGPLQISLGRTVKDIFKFMVIFIMVFVAFMIGMFNLYSYYRGAKYNPAFTTVEESFKTLFWSIFGLSEVISVVLKYDHKFIENIGYVLYGVYNVTMVVVLLNMLIAMINNSYQEIEEDADVEWKFARAKLWLSYFDEGRTLPAPFNLVPSPKSFYYLIMRIKMCLIKLCKSKAKSCENDLEMGMLNSKFKKTRYQAGMRNSENLTANNTLSKPTRYQKIMKRLIKRYVLKAQVDRENDEVNEGELKEIKQDISSLRYELLEEKSQATGELADLIQQLSEKFGKNLNKDHLRVNKGKDI

SEQ ID NO: 504 - protein, 310 aa, Homo sapiens
MAATGANAEKAESHNDCPVRLLNPNIAKMKEDILYHFNLTTSRHNFPALFGDVKFVCVGGSPSRMKAFIRCVGAELGLDCPGRDYPNICAGTDRYAMYKVGPVLSVSHGMGIPSISIMLHELIKLLYYARCSNVTIIRIGTSGGIGLEPGTVVITEQAVDTCFKAEFEQIVLGKRVIRKTDLNKKLVQELLLCSAELSEFTTVVGNTMCTLDFYEGQGRLDGALCSYTEKDKQAYLEAAYAAGVRNIEMESSVFAAMCSACGLQAAVVCVTLLNRLEGDQISSPRNVLSEYQQRPQRLVSYFIKKKLSKA

SEQ ID NO: 505 - protein, 36 aa, Homo sapiens
MAATGANAEKAESHKSGARHCGHNRAGSGYLLQGRV

SEQ ID NO: 506 - protein, 380 aa, Homo sapiens
MFRLLSWSLGRGFLRAAGRRCRGCSARLLPGLAGGPGPEVQVPPSRVAPHGRGPGLLPLLAALAWFSRPAAAEEEEQQGADGAAAEDGADEAEAEIIQLLKRAKLSIMKDEPEEAELILHDALRLAYQTDNKKAITYTYDLMANLAFIRGQLENAEQLFKATMSYLLGGGMKQEDNAIIEISLKLASIYAAQNRQEFAVAGYEFCISTLEEKIEREKELAEDIMSVEEKANTHLLLGMCLDACARYLLFSKQPSQAQRMYEKALQISEEIQGERHPQTIVLMSDLATTLDAQGRFDEAYIYMQRASDLARQINHPELHMVLSNLAAVLMHRERYTQAKEIYQEALKQAKLKKDEISVQHIREELAELSKKSRPLTNSVKL

SEQ ID NO: 507 - protein, 513 aa, Homo sapiens
MSYGSIARGGGLGSRGPFGGPSRQGCQPLECARCWTEYGIRHFPCPSPESKLQNRCVGKDGEGDLGPAGTPIVPRARKRGPGVAPEGSRMPEPTSSPTIGPRKDSAAGPHGRMAGPSTTRAKKRKPNFCPQETEVLVSKVSKHHQLLFGTGLLKAEPTRRYRVWSRILQAVNALGYCRRDVVDLKHKWRDLRAVVRRKLGDLRKAAHGPSPGSGKPQALALTPVEQVVAKTFSCQALPSEGFSLEPPRATQVDPCNLQELFQEMSANVFRINSSVTSLERSLQSLGTPSDTQELRDSLHTAQQETNKTIAASASSVKQMAELLRSSCPQERLQQERPQLDRLKTQLSDAIQCYGVVQKKIAEKSRALLPMAQRGSKQSPQAPFAELADDEKVFNGSDNMWQGQEQALLPDITEEDLEAIRLREEAILQMESNLLDVNQIIKDLASMVSEQGEAVDSIEASLEAASSHAEAARQLLAGASRHQLQRHKIKCCFLSAGVTALLVIIIIIATSVRK

SEQ ID NO: 508 - protein, 512 aa, Homo sapiens
MSYGSIARGGGLGSRGPFGGPSRQGCQPLECARCWTEYGIRHFPCPSPESKLQNRCVGKDGEGDLGPAGTPIVPRARKRGPGVAPEGSRMPEPTSSPTIGPRKDSAAGPHGRMAGPSTTRAKKRKPNFCPQETEVLVSKVSKHHQLLFGTGLLKAEPTRRYRVWSRILQAVNALGYCRRDVVDLKHKWRDLRAVVRRKLGDLRKAAHGPSPGSGKPQALALTPVEQVVAKTFSCQALPSEGFSLEPPRATQVDPCNLQELFQEMSANVFRINSSVTSLERSLQSLGTPSDTQELRDSLHTAQQETNKTIAASASSVKQMAELLRSSCPERLQQERPQLDRLKTQLSDAIQCYGVVQKKIAEKSRALLPMAQRGSKQSPQAPFAELADDEKVFNGSDNMWQGQEQALLPDITEEDLEAIRLREEAILQMESNLLDVNQIIKDLASMVSEQGEAVDSIEASLEAASSHAEAARQLLAGASRHQLQRHKIKCCFLSAGVTALLVIIIIIATSVRK

SEQ ID NO: 509 - protein, 419 aa, Homo sapiens
MAGSGCAWGAEPPRFLEAFGRLWQVQSRLGSGSSASVYRVRCCGNPGSPPGALKQFLPPGTTGAAASAAEYGFRKERAALEQLQGHRNIVTLYGVFTIHFSPNVPSRCLLLELLDVSVSELLLYSSHQGCSMWMIQHCARDVLEALAFLHHEGYVHADLKPRNILWSAENECFKLIDFGLSFKEGNQDVKYIQTDGYRAPEAELQNCLAQAGLQSDTECTSAVDLWSLGIILLEMFSGMKLKHTVRSQEWKANSSAIIDHIFASKAVVNAAIPAYHLRDLIKSMLHDDPSRRIPAEMALCSPFFSIPFAPHIEDLVMLPTPVLRLLNVLDDDYLENEEEYEDVVEDVKEECQKYGPVVSLLVPKENPGRGQVFVEYANAGDSKAAQKLLTGRMFDGKFVVATFYPLSAYKRGYLYQTLL

SEQ ID NO: 510 - protein, 344 aa, Homo sapiens
MAGSGCAWGAEPPRFLEAFGRLWQVQSRLGSGSSASVYRVRCCGNPGSPPGALKQFLPPGTTGAAASAAEYGFRKERAALEQLQGHRNIVTLYGVFTIHFSPNVPSRCLLLELLDVSVSELLLYSSHQGCSMWMIQHCARDVLEALAFLHHEGYVHADLKPRNILWSAENECFKLIDFGLSFKEGNQDVKYIQTDGYRAPEAELQNCLAQAGLQSDTECTSAVDLWSLGIILLEMFSGMKLKHTVRSQEWKANSSAIIDHIFASKAVVNAAIPAYHLRDLIKSMLHDDPSRRIPAEMALCSPFFSIPFAPHIEDLVMLPTPVLRLLNVLDDDYLENEEEYEGLC

SEQ ID NO: 511 - protein, 345 aa, Homo sapiens
MFLTRPKVCVDLNRRVTLYGVFTIHFSPNVPSRCLLLELLDVSVSELLLYSSHQGCSMWMIQHCARDVLEALAFLHHEGYVHADLKPRNILWSAENECFKLIDFGLSFKEGNQDVKYIQTDGYRAPEAELQNCLAQAGLQSDTECTSAVDLWSLGIILLEMFSGMKLKHTVRSQEWKANSSAIIDHIFASKAVVNAAIPAYHLRDLIKSMLHDDPSRRIPAEMALCSPFFSIPFAPHIEDLVMLPTPVLRLLNVLDDDYLENEEEYEDVVEDVKEECQKYGPVVSLLVPKENPGRGQVFVEYANAGDSKAAQKLLTGRMFDGKFVVATFYPLSAYKRGYLYQTLL

SEQ ID NO: 512 - protein, 312 aa, Homo sapiens
MGRRRAARGPGAEGGRPRHLPTRSLEAFAEEVGAALQASVEPGAADGEGGPGPAALPCTLAMWELGHCDPRRCTGRKLARLGLVRCLRLGHRFGGLVLSPVGKQYASPADRQLVAQSGVAVIDCSWARLDETPFGKMRGSHLRLLPYLVAANPVNYGRPYRLSCVEAFAATFCIVGFPDLAVILLRKFKWGKGFLDLNRQLLDKYAACGSPEEVLQAEQEFLANAKESPQEEEIDPFDVDSGREFGNPNRPVASTRLPSDTDDSDASEDPGPGAERGGASSSCCEEEQTQGRGAEARAPAEVWKGIKKRQRD

SEQ ID NO: 513 - protein, 261 aa, Homo sapiens
MAGDSEQTLQNHQQPNGGEPFLIGVSGGTASGKSSVCAKIVQLLGQNEVDYRQKQVVILSQDSFYRVLTSEQKAKALKGQFNFDHPDAFDNELILKTLKEITEGKTVQIPVYDFVSHSRKEETVTVYPADVVLFEGILAFYSQEVRDLFQMKLFVDTDADTRLSRRVLRDISERGRDLEQILSQYITFVKPAFEEFCLPTKKYADVIIPRGADNLVAINLIVQHIQDILNGGPSKRQTNGCLNGYTPSRKRQASESSSRPH

SEQ ID NO: 514 - protein, 111 aa, Homo sapiens
MKLFVDTDADTRLSRRVLRDISERGRDLEQILSQYITFVKPAFEEFCLPTKKYADVIIPRGADNLVAINLIVQHIQDILNGGPSKRQTNGCLNGYTPSRKRQASESSSRPH

SEQ ID NO: 515 - protein, 137 aa, Homo sapiens
MFHFFRKPPESKKPSVPETEADGFVLLGDTTDEQRMTARGKTSDIEANQPLETNKENSSSVTVSDPEMENKAGQTLENSSLMAELLSDVPFTLAPHVLAVQGTITDLPDHLLSYDGSENLSRFWYDFTLENSVLCDS

SEQ ID NO: 516 - protein, 985 aa, Homo sapiens
MSECGGRGGGSSSSEDAEDEGGGGGGPAGSDCLSSSPTLATASSAGRLRRGLRGAFLMARQRPELLCGAVALGCALLLALKFTCSRAKDVIIPAKPPVSFFSLRSPVLDLFQGQLDYAEYVRRDSEVVLLFFYAPWCGQSIAARAEIEQAASRLSDQVLFVAINCWWNQGKCRKQKHFFYFPVIYLYHRSFGPIEYKGPMSAVYIEKFVRRVMKPLLYIPSQSELLDFLSNYEPGVLGYFEFSGSPQPPGYLTFFTSALHSLKKALESTSSPRALVSFTGEWHLETKIYVLDYLGTVRFGVITNKHLAKLVSLVHSGSVYLHRHFNTSLVFPREVLNYTAENICKWALENQETLFRWLRPHGGKSLLLNNELKKGPALFLFIPFNPLAESHPLIDEITEVALEYNNCHGDQVVERLLQHLRRVDAPVLESLALEVPAQLPDPPTITASPCCNTVVLPQWHSFSRTHNVCELCVNQTSGGMKPSSVSVPQCSFFEMAAALDSFYLKEQTFYHVASDSIECSNFLTSYSPFSYYTACCRTISRGVSGFIDSEQGVFEAPTVAFSSLEKKCEVDAPSSVPHIEENRYLFPEVDMTSTNFTGLSCRTNKTLNIYLLDSNLFWLYAERLGAPSSTQVKEFAAIVDVKEESHYILDPKQALMKLTLESFIQNFSVLYSPLKRHLIGSGSAQFPSQHLITEVTTDTFWEVVLQKQDVLLLYYAPWCGFCPSLNHIFIQLARNLPMDTFTVARIDVSQNDLPWEFMVDRLPTVLFFPCNRKDLSVKYPEDVPITLPNLLRFILHHSDPASSPQNVANSPTKECLQSEAVLQRGHISHLEREIQKLRAEISSLQRAQVQVESQLSSARRDEHRLRQQQRALEEQHSLLHAHSEQLQALYEQKTRELQELARKLQELADASENLLTENTWLKILVATMERKLEGRDGAESLAAQREVHPKQPEPSATPQLPGSSPPPANVSATLVSERNKENRTD

SEQ ID NO: 517 - protein, 958 aa, Homo sapiens
MSECGGRGGGSSSSEDAEDEGGGGGGPAGSDCLSSSPTLATASSAGRLRRGLRGAFLMARQRPELLCGAVALGCALLLALKFTCSRAKDVIIPAKPPVSFFSLRSPVLDLFQGQLDYAEYVRRDSEVVLLFFYAPWCGQSIAARAEIEQAASRLSDQVLFVAINCWWNQGKCRKQKHFFYFPVIYLYHRSFGPIEYKGPMSAVYIEKFVRRVMKPLLYIPSQSELLDFLSNYEPGVLGYFEFSGSPQPPGYLTFFTSALHSLKKDYLGTVRFGVITNKHLAKLVSLVHSGSVYLHRHFNTSLVFPREVLNYTAENICKWALENQETLFRWLRPHGGKSLLLNNELKKGPALFLFIPFNPLAESHPLIDEITEVALEYNNCHGDQVVERLLQHLRRVDAPVLESLALEVPAQLPDPPTITASPCCNTVVLPQWHSFSRTHNVCELCVNQTSGGMKPSSVSVPQCSFFEMAAALDSFYLKEQTFYHVASDSIECSNFLTSYSPFSYYTACCRTISRGVSGFIDSEQGVFEAPTVAFSSLEKKCEVDAPSSVPHIEENRYLFPEVDMTSTNFTGLSCRTNKTLNIYLLDSNLFWLYAERLGAPSSTQVKEFAAIVDVKEESHYILDPKQALMKLTLESFIQNFSVLYSPLKRHLIGSGSAQFPSQHLITEVTTDTFWEVVLQKQDVLLLYYAPWCGFCPSLNHIFIQLARNLPMDTFTVARIDVSQNDLPWEFMVDRLPTVLFFPCNRKDLSVKYPEDVPITLPNLLRFILHHSDPASSPQNVANSPTKECLQSEAVLQRGHISHLEREIQKLRAEISSLQRAQVQVESQLSSARRDEHRLRQQQRALEEQHSLLHAHSEQLQALYEQKTRELQELARKLQELADASENLLTENTWLKILVATMERKLEGRDGAESLAAQREVHPKQPEPSATPQLPGSSPPPANVSATLVSERNKENRTD

SEQ ID NO: 518 - protein, 278 aa, Homo sapiens
MSECGGRGGGSSSSEDAEDEGGGGGGPAGSDCLSSSPTLATASSAGRLRRGLRGAFLMARQRPELLCGAVALGCALLLALKFTCSRAKDVIIPAKPPVSFFSLRSPVLDLFQGQLDYAEYVRRDSEVVLLFFYAPWCGQSIAARAEIEQAASRLSDQVLFVAINCWWNQGKCRKQKHFFYFPVIYLYHRSFGPIEYKGPMSAVYIEKFVRRVMKPLLYIPSQSELLDFLSNYEPGVLGYFEFSGSPQPPGYLTFFTSALHSLKKDGVSPCRPGWSAVA

SEQ ID NO: 519 - protein, 260 aa, Homo sapiens
MAKDNSTVRCFQGLLIFGNVIIGCCGIALTAECIFFVSDQHSLYPLLEATDNDDIYGAAWIGIFVGICLFCLSVLGIVGIMKSSRKILLAYFILMFIVYAFEVASCITAATQQDFFTPNLFLKQMLERYQNNSPPNNDDQWKNNGVTKTWDRLMLQDNCCGVNGPSDWQKYTSAFRTENNDADYPWPRQCCVMNNLKEPLNLEACKLGVPGFYHNQGCYELISGPMNRHAWGVAWFGFAILCWTFWVLLGTMFYWSRIEY

SEQ ID NO: 520 - protein, 422 aa, Homo sapiens
MQQPQPQGQQQPGPGQQLGGQGAAPGAGGGPGGGPGPGPCLRRELKLLESIFHRGHERFRIASACLDELSCEFLLAGAGGAGAGAAPGPHLPPRGSVPGDPVRIHCNITESYPAVPPIWSVESDDPNLAAVLERLVDIKKGNTLLLQHLKRIISDLCKLYNLPQHPDVEMLDQPLPAEQCTQEDVSSEDEDEEMPEDTEDLDHYEMKEEEPAEGKKSEDDGIGKENLAILEKIKKNQRQDYLNGAVSGSVQATDRLMKELRDIYRSQSFKGGNYAVELVNDSLYDWNVKLLKVDQDSALHNDLQILKEKEGADFILLNFSFKDNFPFDPPFVRVVSPVLSGGYVLGGGAICMELLTKQGWSSAYSIESVIMQISATLVKGKARVQFGANKSQYSLTRAQQSYKSLVQIHEKNGWYTPPKEDG

SEQ ID NO: 521 - protein, 253 aa, Homo sapiens
MLDQPLPAEQCTQEDVSSEDEDEEMPEDTEDLDHYEMKEEEPAEGKKSEDDGIGKENLAILEKIKKNQRQDYLNGAVSGSVQATDRLMKELRDIYRSQSFKGGNYAVELVNDSLYDWNVKLLKVDQDSALHNDLQILKEKEGADFILLNFSFKDNFPFDPPFVRVVSPVLSGGYVLGGGAICMELLTKQGWSSAYSIESVIMQISATLVKGKARVQFGANKSQYSLTRAQQSYKSLVQIHEKNGWYTPPKEDG

SEQ ID NO: 522 - protein, 1352 aa, Homo sapiens
MSKVTAPGSGPPAAASGKEKRSFSKRLFRSGRAGGGGAGGPGASGPAAPSSPSSPSSARSVGSFMSRVLKTLSTLSHLSSEGAAPDRGGLRSCFPPGPAAAPTPPPCPPPPASPAPPACAAEPVPGVAGLRNHGNTCFMNATLQCLSNTELFAEYLALGQYRAGRPEPSPDPEQPAGRGAQGQGEVTEQLAHLVRALWTLEYTPQHSRDFKTIVSKNALQYRGNSQHDAQEFLLWLLDRVHEDLNHSVKQSGQPPLKPPSETDMMPEGPSFPVCSTFVQELFQAQYRSSLTCPHCQKQSNTFDPFLCISLPIPLPHTRPLYVTVVYQGKCSHCMRIGVAVPLSGTVARLREAVSMETKIPTDQIVLTEMYYDGFHRSFCDTDDLETVHESDCIFAFETPEIFRPEGILSQRGIHLNNNLNHLKFGLDYHRLSSPTQTAAKQGKMDSPTSRAGSDKIVLLVCNRACTGQQGKRFGLPFVLHLEKTIAWDLLQKEILEKMKYFLRPTVCIQVCPFSLRVVSVVGITYLLPQEEQPLCHPIVERALKSCGPGGTAHVKLVVEWDKETRDFLFVNTEDEYIPDAESVRLQRERHHQPQTCTLSQCFQLYTKEERLAPDDAWRCPHCKQLQQGSITLSLWTLPDVLIIHLKRFRQEGDRRMKLQNMVKFPLTGLDMTPHVVKRSQSSWSLPSHWSPWRRPYGLGRDPEDYIYDLYAVCNHHGTMQGGHYTAYCKNSVDGLWYCFDDSDVQQLSEDEVCTQTAYILFYQRRTAIPSWSANSSVAGSTSSSLCEHWVSRLPGSKPASVTSAASSRRTSLASLSESVEMTGERSEDDGGFSTRPFVRSVQRQSLSSRSSVTSPLAVNENCMRPSWSLSAKLQMRSNSPSRFSGDSPIHSSASTLEKIGEAADDKVSISCFGSLRNLSSSYQEPSDSHSRREHKAVGRAPLAVMEGVFKDESDTRRLNSSVVDTQSKHSAQGDRLPPLSGPFDNNNQIAYVDQSDSVDSSPVKEVKAPSHPGSLAKKPESTTKRSPSSKGTSEPEKSLRKGRPALASQESSLSSTSPSSPLPVKVSLKPSRSRSKADSSSRGSGRHSSPAPAQPKKESSPKSQDSVSSPSPQKQKSASALTYTASSTSAKKASGPATRSPFPPGKSRTSDHSLSREGSRQSLGSDRASATSTSKPNSPRVSQARAGEGRGAGKHVRSSSMASLRSPSTSIKSGLKRDSKSEDKGLSFFKSALRQKETRRSTDLGKTALLSKKAGGSSVKSVCKNTGDDEAERGHQPPASQQPNANTTGKEQLVTKDPASAKHSLLSARKSKSSQLDSGVPSSPGGRQSAEKSSKKLSSSMQTSARPSQKPQ

SEQ ID NO: 523 - protein, 443 aa, Homo sapiens
MSQRDGVCGSHEVAGAASPGADGGLSLAAYCKNSVDGLWYCFDDSDVQQLSEDEVCTQTAYILFYQRRTAIPSWSANSSVAGSTSSSLCEHWVSRLPGSKPASVTSAASSRRTSLASLSESVEMTGERSEDDGGFSTRPFVRSVQRQSLSSRSSVTSPLAVNENCMRPSWSLSAKLQMRSNSPSRFSGDSPIHSSASTLEKIGEAADDKVSISCFGSLRNLSSSYQEPSDSHSRREHKAVGRAPLAVMEGVFKDESDTRRLNSSVVDTQSKHSAQGDRLPPLSGPFDNNNQIAYVDQSDSVDSSPVKEVKAPSHPGSLAKKPESTTKRSPSSKGTSEPEKSLRKGRPALASQESSLSSTSPSSPLPVKVSLKPSRSRSKADSSSRGSGRHSSPAPAQTQFPSGEPGPSRGGQGGREARAELLHGQPALPQHKHQVWFEEGQQV

SEQ ID NO: 524 - protein, 323 aa, Homo sapiens
MSVPEEEERLLPLTQRWPRASKFLLSGCAATVAELATFPLDLTKTRLQMQGEAALARLGDGARESAPYRGMVRTALGIIEEEGFLKLWQGVTPAIYRHVVYSGGRMVTYEHLREVVFGKSEDEHYPLWKSVIGGMMAGVIGQFLANPTDLVKVQMQMEGKRKLEGKPLRFRGVHHAFAKILAEGGIRGLWAGWVPNIQRAALVNMGDLTTYDTVKHYLVLNTPLEDNIMTHGLSSLCSGLVASILGTPADVIKSRIMNQPRDKQGRGLLYKSSTDCLIQAVQGEGFMSLYKGFLPSWLRMTPWSMVFWLTYEKIREMSGVSPF

SEQ ID NO: 525 - protein, 245 aa, Homo sapiens
MSVPEEEERLLPLTQRWPRASKFLLSGCAATVAELATFPLDLTKTRLQMQGEAALARLGDGARESAPYRGMVRTALGIIEEEGFLKLWQGVTPAIYRHVVYSGGRMVTYEHLREVVFGKSEDEHYPLWKSVIGGMMAGVIGQFLANPTDLVKVQMQMEGKRKLEGKPLRFRGVHHAFAKILAEGGIRGLWAGWVPNIQRAALVNMGDLTTYDTVKHYLVLNTPLEDNIMTHGLSSDLVGSHKAIQ

SEQ ID NO: 526 - protein, 1018 aa, Homo sapiens
MDKILEAVVTSSYPVSVKQGLVRRVLEAARQPLEREQCLALLALGARLYVGGAEELPRRVGCQLLHVAGRHHPDVFAEFFSARRVLRLLQGGAGPPGPRALACVQLGLQLLPEGPAADEVFALLRREVLRTVCERPGPAACAQVARLLARHPRCVPDGPHRLLFCQQLVRCLGRFRCPAEGEEGAVEFLEQAQQVSGLLAQLWRAQPAAILPCLKELFAVISCAEEEPPSSALASVVQHLPLELMDGVVRNLSNDDSVTDSQMLTAISRMIDWVSWPLGKNIDKWIIALLKGLAAVKKFSILIEVSLTKIEKVFSKLLYPIVRGAALSVLKYMLLTFQHSHEAFHLLLPHIPPMVASLVKEDSNSGTSCLEQLAELVHCMVFRFPGFPDLYEPVMEAIKDLHVPNEDRIKQLLGQDAWTSQKSELAGFYPRLMAKSDTGKIGLINLGNTCYVNSILQALFMASDFRHCVLRLTENNSQPLMTKLQWLFGFLEHSQRPAISPENFLSASWTPWFSPGTQQDCSEYLKYLLDRLHEEEKTGTRICQKLKQSSSPSPPEEPPAPSSTSVEKMFGGKIVTRICCLCCLNVSSREEAFTDLSLAFPPPERCRRRRLGSVMRPTEDITARELPPPTSAQGPGRVGPRRQRKHCITEDTPPTSLYIEGLDSKEAGGQSSQEERIEREEEGKEERTEKEEVGEEEESTRGEGEREKEEEVEEEEEKVEKETEKEAEQEKEEDSLGAGTHPDAAIPSGERTCGSEGSRSVLDLVNYFLSPEKLTAENRYYCESCASLQDAEKVVELSQGPCYLILTLLRFSFDLRTMRRRKILDDVSIPLLLRLPLAGGRGQAYDLCSVVVHSGVSSESGHYYCYAREGAARPAASLGTADRPEPENQWYLFNDTRVSFSSFESVSNVTSFFPKDTAYVLFYRQRPREGPEAELGSSRVRTEPTLHKDLMEAISKDNILYLQEQEKEARSRAAYISALPTSPHWGRGFDEDKDEDEGSPGGCNPAGGNGGDFHRLVF

SEQ ID NO: 527 - protein, 749 aa, Homo sapiens
MIDWVSWPLGKNIDKWIIALLKGLAAVKKFSILIEVSLTKIEKVFSKLLYPIVRGAALSVLKYMLLTFQHSHEAFHLLLPHIPPMVASLVKEDSNSGTSCLEQLAELVHCMVFRFPGFPDLYEPVMEAIKDLHVPNEDRIKQLLGQDAWTSQKSELAGFYPRLMAKSDTGKIGLINLGNTCYVNSILQALFMASDFRHCVLRLTENNSQPLMTKLQWLFGFLEHSQRPAISPENFLSASWTPWFSPGTQQDCSEYLKYLLDRLHEEEKTGTRICQKLKQSSSPSPPEEPPAPSSTSVEKMFGGKIVTRICCLCCLNVSSREEAFTDLSLAFPPPERCRRRRLGSVMRPTEDITARELPPPTSAQGPGRVGPRRQRKHCITEDTPPTSLYIEGLDSKEAGGQSSQEERIEREEEGKEERTEKEEVGEEEESTRGEGEREKEEEVEEEEEKVEKETEKEAEQEKEEDSLGAGTHPDAAIPSGERTCGSEGSRSVLDLVNYFLSPEKLTAENRYYCESCASLQDAEKVVELSQGPCYLILTLLRFSFDLRTMRRRKILDDVSIPLLLRLPLAGGRGQAYDLCSVVVHSGVSSESGHYYCYAREGAARPAASLGTADRPEPENQWYLFNDTRVSFSSFESVSNVTSFFPKDTAYVLFYRQRPREGPEAELGSSRVRTEPTLHKDLMEAISKDNILYLQEQEKEARSRAAYISALPTSPHWGRGFDEDKDEDEGSPGGCNPAGGNGGDFHRLVF

SEQ ID NO: 528 - protein, 963 aa, Homo sapiens
MAEGGGCRERPDAETQKSELGPLMRTTLQRGAQWYLIDSRWFKQWKKYVGFDSWDMYNVGEHNLFPGPIDNSGLFSDPESQTLKEHLIDELDYVLVPTEAWNKLLNWYGCVEGQQPIVRKVVEHGLFVKHCKVEVYLLELKLCENSDPTNVLSCHFSKADTIATIEKEMRKLFNIPAERETRLWNKYMSNTYEQLSKLDNTVQDAGLYQGQVLVIEPQNEDGTWPRQTLQSKSSTAPSRNFTTSPKSSASPYSSVSASLIANGDSTSTCGMHSSGVSRGGSGFSASYNCQEPPSSHIQPGLCGLGNLGNTCFMNSALQCLSNTAPLTDYFLKDEYEAEINRDNPLGMKGEIAEAYAELIKQMWSGRDAHVAPRMFKTQVGRFAPQFSGYQQQDSQELLAFLLDGLHEDLNRVKKKPYLELKDANGRPDAVVAKEAWENHRLRNDSVIVDTFHGLFKSTLVCPECAKVSVTFDPFCYLTLPLPLKKDRVMEVFLVPADPHCRPTQYRVTVPLMGAVSDLCEALSRLSGIAAENMVVADVYNHRFHKIFQMDEGLNHIMPRDDIFVYEVCSTSVDGSECVTLPVYFRERKSRPSSTSSASALYGQPLLLSVPKHKLTLESLYQAVCDRISRYVKQPLPDEFGSSPLEPGACNGSRNSCEGEDEEEMEHQEEGKEQLSETEGSGEDEPGNDPSETTQKKIKGQPCPKRLFTFSLVNSYGTADINSLAADGKLLKLNSRSTLAMDWDSETRRLYYDEQESEAYEKHVSMLQPQKKKKTTVALRDCIELFTTMETLGEHDPWYCPNCKKHQQATKKFDLWSLPKILVVHLKRFSYNRYWRDKLDTVVEFPIRGLNMSEFVCNLSARPYVYDLIAVSNHYGAMGVGHYTAYAKNKLNGKWYYFDDSNVSLASEDQIVTKAAYVLFYQRRDDEFYKTPSLSSSGSSDGGTRPSSSQQGFGDDEACSMDTN

SEQ ID NO: 529 - protein, 916 aa, Homo sapiens
MAEGGGCRERPDAETQKSELGPLMRTTLQRGAQWYLIDSRWFKQWKKYVGFDSWDMYNVGEHNLFPGPIDNSGLFSDPESQTLKEHLIDELDYVLVPTEAWNKLLNWYGCVEGQQPIVRKVVEHGLFVKHCKVEVYLLELKLCENSDPTNVLSCHFSKADTIATIEKEMRKLFNIPAERETRLWNKYMSNTYEQLSKLDNTVQDAGLYQGQVLVIEPQNEDGTWPRQTLQSNGSGFSASYNCQEPPSSHIQPGLCGLGNLGNTCFMNSALQCLSNTAPLTDYFLKDEYEAEINRDNPLGMKGEIAEAYAELIKQMWSGRDAHVAPRMFKTQVGRFAPQFSGYQQQDSQELLAFLLDGLHEDLNRVKKKPYLELKDANGRPDAVVAKEAWENHRLRNDSVIVDTFHGLFKSTLVCPECAKVSVTFDPFCYLTLPLPLKKDRVMEVFLVPADPHCRPTQYRVTVPLMGAVSDLCEALSRLSGIAAENMVVADVYNHRFHKIFQMDEGLNHIMPRDDIFVYEVCSTSVDGSECVTLPVYFRERKSRPSSTSSASALYGQPLLLSVPKHKLTLESLYQAVCDRISRYVKQPLPDEFGSSPLEPGACNGSRNSCEGEDEEEMEHQEEGKEQLSETEGSGEDEPGNDPSETTQKKIKGQPCPKRLFTFSLVNSYGTADINSLAADGKLLKLNSRSTLAMDWDSETRRLYYDEQESEAYEKHVSMLQPQKKKKTTVALRDCIELFTTMETLGEHDPWYCPNCKKHQQATKKFDLWSLPKILVVHLKRFSYNRYWRDKLDTVVEFPIRGLNMSEFVCNLSARPYVYDLIAVSNHYGAMGVGHYTAYAKNKLNGKWYYFDDSNVSLASEDQIVTKAAYVLFYQRRDDEFYKTPSLSSSGSSDGGTRPSSSQQGFGDDEACSMDTN

SEQ ID NO: 530 - protein, 313 aa, Homo sapiens
MAEGGGCRERPDAETQKSELGPLMRTTLQRGAQWYLIDSRWFKQWKKYVGFDSWDMYNVGEHNLFPGPIDNSGLFSDPESQTLKEHLIDELDYVLVPTEAWNKLLNWYGCVEGQQPIVRKVVEHGLFVKHCKVEVYLLELKLCENSDPTNVLSCHFSKADTIATIEKEMRKLFNIPAERETRLWNKYMSNTYEQLSKLDNTVQDAGLYQGQVLVIEPQNEDGTWPRQTLQSKVSFFLPRLECNGAILAHCNFCLPGSSNSPASASRVAPSHLANFFFFEMESHSVTKLECGGAVSAYSRVQVMLLPQPPEWLG

SEQ ID NO: 531 - protein, 814 aa, Homo sapiens
MRVKDPTKALPEKAKRSKRPTVPHDEDSSDDIAVGLTCQHVSHAISVNHVKRAIAENLWSVCSECLKERRFYDGQLVLTSDIWLCLKCGFQGCGKNSESQHSLKHFKSSRTEPHCIIINLSTWIIWCYECDEKLSTHCNKKVLAQIVDFLQKHASKTQTSAFSRIMKLCEEKCETDEIQKGGKCRNLSVRGITNLGNTCFFNAVMQNLAQTYTLTDLMNEIKESSTKLKIFPSSDSQLDPLVVELSRPGPLTSALFLFLHSMKETEKGPLSPKVLFNQLCQKAPRFKDFQQQDSQELLHYLLDAVRTEETKRIQASILKAFNNPTTKTADDETRKKVKAYGKEGVKMNFIDRIFIGELTSTVMCEECANISTVKDPFIDISLPIIEERVSKPLLWGRMNKYRSLRETDHDRYSGNVTIENIHQPRAAKKHSSSKDKSQLIHDRKCIRKLSSGETVTYQKNENLEMNGDSLMFASLMNSESRLNESPTDDSEKEASHSESNVDADSEPSESESASKQTGLFRSSSGSGVQPDGPLYPLSAGKLLYTKETDSGDKEMAEAISELRLSSTVTGDQDFDRENQPLNISNNLCFLEGKHLRSYSPQNAFQTLSQSYITTSKECSIQSCLYQFTSMELLMGNNKLLCENCTKNKQKYQEETSFAEKKVEGVYTNARKQLLISAVPAVLILHLKRFHQAGLSLRKVNRHVDFPLMLDLAPFCSATCKNASVGDKVLYGLYGIVEHSGSMREGHYTAYVKVRTPSRKLSEHNTKKKNVPGLKAADNESAGQWVHVSDTYLQVVPESRALSAQAYLLFYERVL

SEQ ID NO: 532 - protein, 289 aa, Homo sapiens
MRVKDPTKALPEKAKRSKRPTVPHDEDSSDDIAVGLTCQHVSHAISVNHVKRAIAENLWSVCSECLKERRFYDGQLVLTSDIWLCLKCGFQGCGKNSESQHSLKHFKSSRTEPHCIIINLSTWIIWCYECDEKLSTHCNKKVLAQIVDFLQKHASKTQTSAFSRIMKLCEEKCETDEIQKGGKCRNLSVRGITNLGNTCFFNAVMQNLAQTYTLTDLMNEIKESSTKLKIFPSSDSQLDPLVVELSRPGPLTSALFLFLHSMKETEKGPLSPKVLFNQLCQKRVHLHLI

SEQ ID NO: 533 - protein, 494 aa, Homo sapiens
MRSKKVVQNSRFFLPQTLSWAPRFKDFQQQDSQELLHYLLDAVRTEETKISTVKDPFIDISLPIIEERVSKPLLWGRMNKYRSLRETDHDRYSGNVTIENIHQPRAAKKHSSSKDKSQLIHDRKCIRKLSSGETVTYQKNENLEMNGDSLMFASLMNSESRLNESPTDDSEKEASHSESNVDADSEPSESESASKQTGLFRSSSGSGVQPDGPLYPLSAGKLLYTKETDSGDKEMAEAISELRLSSTVTGDQDFDRENQPLNISNNLCFLEGKHLRSYSPQNAFQTLSQSYITTSKECSIQSCLYQFTSMELLMGNNKLLCENCTKNKQKYQEETSFAEKKVEGVYTNARKQLLISAVPAVLILHLKRFHQAGLSLRKVNRHVDFPLMLDLAPFCSATCKNASVGDKVLYGLYGIVEHSGSMREGHYTAYVKVRTPSRKLSEHNTKKKNVPGLKAADNESAGQWVHVSDTYLQVVPESRALSAQAYLLFYERVL

SEQ ID NO: 534 - protein, 418 aa, Homo sapiens
MRLSAGPDAGPSGNSSPWWPLATGAGNTSREAEALGEGNGPPRDVRNEELAKLEIAVLAVTFAVAVLGNSSVLLALHRTPRKTSRMHLFIRHLSLADLAVAFFQVLPQMCWDITYRFRGPDWLCRVVKHLQVFGMFASAYMLVVMTADRYIAVCHPLKTLQQPARRSRLMIAAAWVLSFVLSTPQYFVFSMIEVNNVTKARDCWATFIQPWGSRAYVTWMTGGIFVAPVVILGTCYGFICYNIWCNVRGKTASRQSKGAEQAGVAFQKGFLLAPCVSSVKSISRAKIRTVKMTFVIVTAYIVCWAPFFIIQMWSVWDPMSVWTESENPTITITALLGSLNSCCNPWIYMFFSGHLLQDCVQSFPCCQNMKEKFNKEDTDSMSRRQTFYSNNRSPTNSTGMWKDSPKSSKSIKFIPVST

SEQ ID NO: 535 - protein, 176 aa, Homo sapiens
MAAPVLLRVSVPRWERVARYAVCAAGILLSIYAYHVEREKERDPEHRALCDLGPWVKCSAALASRWGRGFGLLGSIFGKDGVLNQPNSVFGLIFYILQLLLGMTASAVAALILMTSSIMSVVGSLYLAYILYFVLKEFCIICIVTYVLNFLLLIINYKRLVYLNEAWKRQLQPKQD

SEQ ID NO: 536 - protein, 177 aa, Homo sapiens
MAAPVLLRVSVPRWERVARYAVCAAGILLSIYAYHVEREKERDPEHRALCDLGPWVKCSAALASRHDSKRCGGFDPHDVLHHVGRGVPVPGLHSVLCAEGVLHHLHRHVRAELPSSHYQLQTTSLLERGLEAAAATQAGLTPDRLHPNSLKPLSIQFILQQVFIIIIIIIIHNRHFP

SEQ ID NO: 537 - protein, 971 aa, Homo sapiens
MELSDANLQTLTEYLKKTLDPDPAIRRPAEKFLESVEGNQNYPLLLLTLLEKSQDNVIKVCASVTFKNYIKRNWRIVEDEPNKICEADRVAIKANIVHLMLSSPEQIQKQLSDAISIIGREDFPQKWPDLLTEMVNRFQSGDFHVINGVLRTAHSLFKRYRHEFKSNELWTEIKLVLDAFALPLTNLFKATIELCSTHANDASALRILFSSLILISKLFYSLNFQDLPEFFEDNMETWMNNFHTLLTLDNKLLQTDDEEEAGLLELLKSQICDNAALYAQKYDEEFQRYLPRFVTAIWNLLVTTGQEVKYDLLVSNAIQFLASVCERPHYKNLFEDQNTLTSICEKVIVPNMEFRAADEEAFEDNSEEYIRRDLEGSDIDTRRRAACDLVRGLCKFFEGPVTGIFSGYVNSMLQEYAKNPSVNWKHKDAAIYLVTSLASKAQTQKHGITQANELVNLTEFFVNHILPDLKSANVNEFPVLKADGIKYIMIFRNQVPKEHLLVSIPLLINHLQAESIVVHTYAAHALERLFTMRGPNNATLFTAAEIAPFVEILLTNLFKALTLPGSSENEYIMKAIMRSFSLLQEAIIPYIPTLITQLTQKLLAVSKNPSKPHFNHYMFEAICLSIRITCKANPAAVVNFEEALFLVFTEILQNDVQEFIPYVFQVMSLLLETHKNDIPSSYMALFPHLLQPVLWERTGNIPALVRLLQAFLERGSNTIASAAADKIPGLLGVFQKLIASKANDHQGFYLLNSIIEHMPPESVDQYRKQIFILLFQRLQNSKTTKFIKSFLVFINLYCIKYGALALQEIFDGIQPKMFGMVLEKIIIPEIQKVSGNVEKKICAVGITKLLTECPPMMDTEYTKLWTPLLQSLIGLFELPEDDTIPDEEHFIDIEDTPGYQTAFSQLAFAGKKEHDPVGQMVNNPKIHLAQSLHKLSTACPGRVPSMVSTSLNAEALQYLQGYLQAASVTLL

SEQ ID NO: 538 - protein, 195 aa, Homo sapiens
MELSDANLQTLTEYLKKTLDPDPAIRRPAEKFLESVEGNQNYPLLLLTLLEKSQDNVIKVCASVTFKNYIKRNWRIVEDEPNKICEADRVAIKANIVHLMLSSPEQIQKQLSDAISIIGREDFPQKWPDLLTEMVNRFQSGDFHVINGVLRTAHSLFKRYRHEFKSNELWTEIKLVLDAFALPLTNLFKVWNASW

SEQ ID NO: 539 - protein, 945 aa, Homo sapiens
MELSDANLQTLTEYLKKTLDPDPAIRRPAEKFLESVEGNQNYPLLLLTLLEKSQDNVIKVCASVTFKNYIKRNWRIVEDEPNKICEADRVAIKANIVHLMLSSPEQIQKQLSDAISIIGREDFPQKWPDLLTEMVNRFQSGDFHVINGVLRTAHSLFKRYRHEFKSNELWTEIKLVLDAFALPLTNLFKATIELCSTHANDASALRILFSSLILISKLFYSLNFQDLPEFFEDNMETWMNNFHTLLTLDNKLLQTDDEEEAGLLELLKSQICDNAALYAQKYDEEFQRYLPRFVTAIWNLLVTTGQEVKYDLLVSNAIQFLASVCERPHYKNLFEDQNTLTSICEKVIVPNMEFRAADEEAFEDNSEEYIRRDLEGSDIDTRRRAACDLVRGLCKFFEGPVTGIFSGYVNSMLQEYAKNPSVNWKHKDAAIYLVTSLASKAQTQKHGITQANELVNLTEFFVNHILPDLKSANVNEFPVLKADGIKYIMIFRNQVPKEHLLVSIPLLINHLQAESIVVHTYAAHALERLFTMRGPNNATLFTAAEIAPFVEILLTNLFKALTLPGSSENEYIMKAIMRSFSLLQEAIIPYIPTLITQLTQKLLAVSKNPSKPHFNHYMFEAICLSIRITCKANPAAVVNFEEALFLVFTEILQNDVQEFIPYVFQVMSLLLETHKNDIPSSYMALFPHLLQPVLWERTGNIPALVRLLQAFLERGSNTIASAAADKIPGLLGVFQKLIASKANDHQGFYLLNSIIEHMPPESVDQYRKQIFILLFQRLQNSKTTKFIKSFLVFINLYCIKYGALALQEIFDGIQPKMFGMVLEKIIIPEIQKVSGNVEKKICAVGITKLLTECPPMMDTEYTKLWTPLLQSLIGLFELPEDDTIPDEEHFIDIEDTPGYQTAFSQLAFAGKKEHDPVGQMVNNPKIHLAQSLHKLSTACPGRTYF

SEQ ID NO: 540 - protein, 915 aa, Homo sapiens
MELSDANLQTLTEYLKKTLDPDPAIRRPAEKFLESVEGNQNYPLLLLTLLEKSQDNVIKVCASVTFKNYIKRNWRIVEDEPNKICEADRVAIKANIVHLMLSSPEQIQKQLSDAISIIGREDFPQKWPDLLTEMVNRFQSGDFHVINGVLRTAHSLFKRYRHEFKSNELWTEIKLVLDAFALPLTNLFKATIELCSTHANDASALRILFSSLILISKLFYSLNFQDLPEFFEDNMETWMNNFHTLLTLDNKLLQTDLVSNAIQFLASVCERPHYKNLFEDQNTLTSICEKVIVPNMEFRAADEEAFEDNSEEYIRRDLEGSDIDTRRRAACDLVRGLCKFFEGPVTGIFSGYVNSMLQEYAKNPSVNWKHKDAAIYLVTSLASKAQTQKHGITQANELVNLTEFFVNHILPDLKSANVNEFPVLKADGIKYIMIFRNQVPKEHLLVSIPLLINHLQAESIVVHTYAAHALERLFTMRGPNNATLFTAAEIAPFVEILLTNLFKALTLPGSSENEYIMKAIMRSFSLLQEAIIPYIPTLITQLTQKLLAVSKNPSKPHFNHYMFEAICLSIRITCKANPAAVVNFEEALFLVFTEILQNDVQEFIPYVFQVMSLLLETHKNDIPSSYMALFPHLLQPVLWERTGNIPALVRLLQAFLERGSNTIASAAADKIPGLLGVFQKLIASKANDHQGFYLLNSIIEHMPPESVDQYRKQIFILLFQRLQNSKTTKFIKSFLVFINLYCIKYGALALQEIFDGIQPKMFGMVLEKIIIPEIQKVSGNVEKKICAVGITKLLTECPPMMDTEYTKLWTPLLQSLIGLFELPEDDTIPDEEHFIDIEDTPGYQTAFSQLAFAGKKEHDPVGQMVNNPKIHLAQSLHKLSTACPGRVPSMVSTSLNAEALQYLQGYLQAASVTLL

SEQ ID NO: 541 - protein, 505 aa, Homo sapiens
MSSVQQQPPPPRRVTNVGSLLLTPQENESLFTFLGKKCVTMSSAVVQLYAADRNCMWSKKCSGVACLVKDNPQRSYFLRIFDIKDGKLLWEQELYNNFVYNSPRGYFHTFAGDTCQVALNFANEEEAKKFRKAVTDLLGRRQRKSEKRRDPPNGPNLPMATVDIKNPEITTNRFYGPQVNNISHTKEKKKGKAKKKRLTKADIGTPSNFQHIGHVGWDPNTGFDLNNLDPELKNLFDMCGISEAQLKDRETSKVIYDFIEKTGGVEAVKNELRRQAPPPPPPSRGGPPPPPPPPHNSGPPPPPARGRGAPPPPPSRAPTAAPPPPPPSRPSVAVPPPPPNRMYPPPPPALPSSAPSGPPPPPPSVLGVGPVAPPPPPPPPPPPGPPPPPGLPSDGDHQVPTTAGNKAALLDQIREGAQLKKVEQNSRPVSCSGRDALLDQIRQGIQLKSVADGQESTPPTPAPTSGIVGALMEVMQKRSKAIHSSDEDEDEDDEEDFEDDDEWED

SEQ ID NO: 542 - protein, 43 aa, Homo sapiens
MLTALGQVNNIQKEFTIKKTKQADHNLVARIDEIQYVQGTINL

SEQ ID NO: 543 - protein, 579 aa, Homo sapiens
MSASSLLEQRPKGQGNKVQNGSVHQKDGLNDDDFEPYLSPQARPNNAYTAMSDSYLPSYYSPSIGFSYSLGEAAWSTGGDTAMPYLTSYGQLSNGEPHFLPDAMFGQPGALGSTPFLGQHGFNFFPSGIDFSAWGNNSSQGQSTQSSGYSSNYAYAPSSLGGAMIDGQSAFANETLNKAPGMNTIDQGMAALKLGSTEVASNVPKVVGSAVGSGSITSNIVASNSLPPATIAPPKPASWADIASKPAKQQPKLKTKNGIAGSSLPPPPIKHNMDIGTWDNKGPVAKAPSQALVQNIGQPTQGSPQPVGQQANNSPPVAQASVGQQTQPLPPPPPQPAQLSVQQQAAQPTRWVAPRNRGSGFGHNGVDGNGVGQSQAGSGSTPSEPHPVLEKLRSINNYNPKDFDWNLKHGRVFIIKSYSEDDIHRSIKYNIWCSTEHGNKRLDAAYRSMNGKGPVYLLFSVNGSGHFCGVAEMKSAVDYNTCAGVWSQDKWKGRFDVRWIFVKDVPNSQLRHIRLENNENKPVTNSRDTQEVPLEKAKQVLKIIASYKHTTSIFDDFSHYEKRQEEEESVKKERQGRGK

SEQ ID NO: 544 - protein, 529 aa, Homo sapiens
MSDSYLPSYYSPSIGFSYSLGEAAWSTGGDTAMPYLTSYGQLSNGEPHFLPDAMFGQPGALGSTPFLGQHGFNFFPSGIDFSAWGNNSSQGQSTQSSGYSSNYAYAPSSLGGAMIDGQSAFANETLNKAPGMNTIDQGMAALKLGSTEVASNVPKVVGSAVGSGSITSNIVASNSLPPATIAPPKPASWADIASKPAKQQPKLKTKNGIAGSSLPPPPIKHNMDIGTWDNKGPVAKAPSQALVQNIGQPTQGSPQPVGQQANNSPPVAQASVGQQTQPLPPPPPQPAQLSVQQQAAQPTRWVAPRNRGSGFGHNGVDGNGVGQSQAGSGSTPSEPHPVLEKLRSINNYNPKDFDWNLKHGRVFIIKSYSEDDIHRSIKYNIWCSTEHGNKRLDAAYRSMNGKGPVYLLFSVNGSGHFCGVAEMKSAVDYNTCAGVWSQDKWKGRFDVRWIFVKDVPNSQLRHIRLENNENKPVTNSRDTQEVPLEKAKQVLKIIASYKHTTSIFDDFSHYEKRQEEEESVKKERQGRGK

SEQ ID NO: 545 - protein, 309 aa, Homo sapiens
MTLLTDATPLVKEPHPLPLVPRPWFLPSLFAAFNVVLLVFFSGLFFAFPCRWLAQNGEWAFPVITGSLFVLTFFSLVSLNFSDPGILHQGSAEQGPLTVHVVWVNHGAFRLQWCPKCCFHRPPRTYHCPWCNICVEDFDHHCKWVNNCIGHRNFRFFMLLVLSLCLYSGAMLVTCLIFLVRTTHLPFSTDKAIAIVVAVSAAGLLVPLSLLLLIQALSVSSADRTYKGKCRHLQGYNPFDQGCASNWYLTICAPLGPKYMAEAVQLQRVVGPDWTSMPNLHPPMSPSALNPPAPTSGSLQSREGTPGAW

SEQ ID NO: 546 - protein, 229 aa, Homo sapiens
MTLLTDATPLVKEPHPLPLVPRPWFLPSLFAAFNVVLLVFFSGLFFAFPCRWLAQNGEWAFPVITGSLFVLTFFSLVSLNFSDPGILHQGSAEQGPLTVHVVWVNHGAFRLQWCPKCCFHRPPRTYHCPWCNICVEDFDHHCKWVNNCIGHRNFRFFMLLVLSLCLYSGAMLVTCLIFLVRTTHLPFSTDKAIAIVVAVSAAGLLVPLSLLLLIQALSVSSADRTYKGK

SEQ ID NO: 547 - protein, 282 aa, Homo sapiens
MTLLTDATPLVKEPHPLPLVPRPWFLPSLFAAFNVVLLVFFSGLFFAFPCRWLAQNGEWAFPVITGSLFVLTFFSLVSLNFSDPGILHQGSAEQGPLTVHVVWVNHGAFRLQWCPKCCFHRPPRTYHCPWCNICVEDFDHHCKWVNNCIGHRNFRFFMLLVLSLCLYSGAMLVTCLIFLVRTTHLPFSTDKAIAIVVAVSAAGLLVPLSLLLLIQALSVSSADRTYKGKCRHLQGYNPFDQGCASNWYLTICAPLGPKAAASWMRLASASCRAKPWAVCFPS

SEQ ID NO: 548 - protein, 426 aa, Homo sapiens
MIMRELKADACLNSHMGAMWETNRSVKENSSQSKKYSTQIECLSPGSACRHFRSFHYHEATEPLEAINQLQKLCHQWLRPEIHSKKHILEMLVLEHFLTILPKGTQNWVQKHHPQLAKQALVLVERLQREPGGTKNEVTAHELGEEAVLLRGTTVAPGFKWKPAELEPMERILEHIQILALSEHKSTKDWKMAPKLIWPESQSLLTFEDMAVYFSEEEWQLLGPLEKTLYNDVMQDIYETAISLGKQRTGKIMGIEMASSFSKEEKKLTTCKQELPKLMDLHGKGHTGEKPFKCQDCGKIFRVSSDLIKHQRIHTEEKLYKCQQCDRRFRWSSGLNKHFMTHQGINPYRCSWYGKSISYDTNLQTHQRIHTGEKPFKCHECGKIFIHKSNLIKYQRTHTGEQPYTCSICRRNFSRQLSLLRHQKLH

SEQ ID NO: 549 - protein, 1074 aa, Homo sapiens
MKDIGQQLYTTHLNGGHNSLTMSPKQPDANGAPRPNRQEAQTLLYQGSEAEAAMMTIATCAKCKSVHKISLQDLQKGTGKDGMYVCFQCSLGAAPPNFHFVSNNSSATHVGNKTENFSSSVNSKFKVRNFKPGKYYCDKCRFSTKDPLQYKKHTLQHEEIKFICSHCSYISYTKGEFQRHLVKHTGIFPYQCEYCDYGAIRNDYIVKHTKRVHERAGAKRPVKAVAKLEPKRTGTSKQNPELLKASNPRTTFQNKWSDQLSGFSLHANKDKMHNIMLLPEPKEYQKDVVCIPNKMTLSEPNEVNLFENKNVEVEVLSPAKEPVQPGMPLTVVAPAELVVPANCLAQLIDVKVVNGTQQLVLKLFPLEENNCLEAGRDNGGNSERMVKEKGSNEQEKVLSAEKTKSLTVDGNVGKLVGIDSFQPSVQKQLKNVKWVRSYDFIMPNSSVHNNGKSFINSETIEDFQKKNNLYPHRTAFPSVALKGHSLASVFKNSVLRSLGAASNPFPYKAAVCFAESGRNLHSSSQQLLPFAASPATCSFSGEKGLLPVSENDLESTSKVNIPVKVVSSNRKQEDNQTEEHKAVSTVGQISSQHKSEYLHINITGEDRSQQPGDKPLELKNSERTNNTNDGPVISSVFSLSSGSENVPEGIKWNSSTSKIKSIELLRRKIAQLIESCGKPSSLASNSAHRRSVGQASKGTSKATSEGIQEINVSLTGLGHSTGTLQKPPNDGGITGNRQLTHQQIYPHFADGSNRKTKSRVARKAHVATPVLIPKGAVLRVLNSSENAHIIEATCEAPVSIPCSERQLIKPVPFCPVRQADSDLQPLRSERGPIDMSPNIETPLRPKLRKESAVCSTIHRKTGLLYGQQGSSELNKQGRLLSRSLSISRNKTKQVHLSRKKNKIQAEPSRCLKDPSIFQVARQLRLIAAKPDQLIKCPRRNQPVIVLNHPDVDSPEVTNVMKVINKYKGNVLKVVLSERTRCQLGIRRHHVRLTYQNAEEASQIKRQMMLKMKLKKVHKNNYQVVDSLPDDSSQCVFKCWFCGRLYEDQEEWMSHGQRHLIEATRDWDVLSSKGK

SEQ ID NO: 550 - protein, 1059 aa, Homo sapiens
MEANPAGSGAGGGGSSGIGGEDGVHFQSYPFDFLEFLNHQRFEPMELYGEHAKAVAALPCAPGPPPQPPPQPPPPQYDYPPQSTFKPKAEVPSSSSSSSSSSSSSSSSSSSSSSSSSQAKKPDPPLPPAFGAPPPPLFDAAFPTPQWGIVDLSGHQHLFGNLKRGGPASGPGVTPGLGAPAGAPGPLPAPSQTPPGPPAAAACDPTKDDKGYFRRLKYLMERRFPCGVCQKSFKQSSHLVQHMLVHSGERPYECGVCGRTYNHVSSLIRHRRCHKDVPPAAGGPPQPGPHLPPLGLPAPAASAATAAAPSTVSSGPPATPVAPAPSADGSAAPAGVGVPPPATGGGDGPFACPLCWKVFKKPSHLHQHQIIHTGEKPFSCSVCSKSFNRRESLKRHVKTHSADLLRLPCGICGKAFRDASYLLKHQAAHAGAGAGGPRPVYPCDLCGKSYSAPQSLLRHKAAHAPPAAAAEAPKDGAASAPQPPPTFPPGPYLLPPDPPTTDSEKAAAAAAAVVYGAVPVPLLGAHPLLLGGAGTSGAGGSGASVPGKTFCCGICGRGFGRRETLKRHERIHTGEKPHQCPVCGKRFRESFHLSKHHVVHTRERPYKCELCGKVFGYPQSLTRHRQVHRLQLPCALAGAAGLPSTQGTPGACGPGASGTSAGPTDGLSYACSDCGEHFPDLFHVMSHKEVHMAEKPYGCDACGKTFGFIENLMWHKLVHQAAPERLLPPAPGGLQPPDGSSGTDAASVLDNGLAGEVGAAVAALAGVSGGEDAGGAAVAGAGGGASSGPERFSCATCGQSFKHFLGLVTHKYVHLVRRTLGCGLCGQSFAGAYDLLLHRRSHRQKRGFRCPVCGKRFWEAALLMRHQRCHTEQRPYRCGVCGRGFLRSWYLRQHRVVHTGERAFKCGVCAKRFAQSSSLAEHRRLHAVARPQRCSACGKTFRYRSNLLEHQRLHLGERAYRCEHCGKGFFYLSSVLRHQRAHEPPRPELRCPACLKAFKDPGYFRKHLAAHQGGRPFRCSSCGEGFANTYGLKKHRLAHKAENLGGPGAGAGTLAGKDA

SEQ ID NO: 551 - protein, 796 aa, Homo sapiens
MEEEASRSAAATNPGSRLTRWPPPDKREGSAVDPGKRRSLAATPSSSLPCTLIALGLRHEKEANELMEDLFETFQDEMGFSNMEDDGPEEEERVAEPQANFNTPQALRFEELLANLLNEQHQIAKELFEQLKMKKPSAKQQKEVEKVKPQCKEVHQTLILDPAQRKRLQQQMQQHVQLLTQIHLLATCNPNLNPEASSTRICLKELGTFAQSSIALHHQYNPKFQTLFQPCNLMGAMQLIEDFSTHVSIDCSPHKTVKKTANEFPCLPKQVAWILATSKVFMYPELLPVCSLKAKNPQDKILFTKAEDNKYLLTCKTARQLTVRIKNLNMNRAPDNIIKFYKKTKQLPVLGKCCEEIQPHQWKPPIEREEHRLPFWLKASLPSIQEELRHMADGAREVGNMTGTTEINSDQGLEKDNSELGSETRYPLLLPKGVVLKLKPVADRFPKKAWRQKRSSVLKPLLIQPSPSLQPSFNPGKTPAQSTHSEAPPSKMVLRIPHPIQPATVLQTVPGVPPLGVSGGESFESPAALPAMPPEARTSFPLSESQTLLSSAPVPKVMMPSPASSMFRKPYVRRRPSKRRGARAFRCIKPAPVIHPASVIFTVPATTVKIVSLGGGCNMIQPVNAAVAQSPQTIPIATLLVNPTSFPCPLNQPLVASSVSPLIVSGNSVNLPIPSTPEDKAHMNVDIACAVADGENAFQGLEPKLEPQELSPLSATVFPKVEHSPGPPPVDKQCQEGLSENSAYRWTVVKTEEGRQALEPLPQGIQESLNNSSPGDLEEVVKMEPEDATEEISGFL

SEQ ID NO: 552 - protein, 750 aa, Homo sapiens
MEDLFETFQDEMGFSNMEDDGPEEEERVAEPQANFNTPQALRFEELLANLLNEQHQIAKELFEQLKMKKPSAKQQKEVEKVKPQCKEVHQTLILDPAQRKRLQQQMQQHVQLLTQIHLLATCNPNLNPEASSTRICLKELGTFAQSSIALHHQYNPKFQTLFQPCNLMGAMQLIEDFSTHVSIDCSPHKTVKKTANEFPCLPKQVAWILATSKVFMYPELLPVCSLKAKNPQDKILFTKAEDNLLALGLKHFEGTEFLNPLISKYLLTCKTARQLTVRIKNLNMNRAPDNIIKFYKKTKQLPVLGKCCEEIQPHQWKPPIEREEHRLPFWLKASLPSIQEELRHMADGAREVGNMTGTTEINSDQGLEKDNSELGSETRYPLLLPKGVVLKLKPVADRFPKKAWRQKRSSVLKPLLIQPSPSLQPSFNPGKTPAQSTHSEAPPSKMVLRIPHPIQPATVLQTVPGVPPLGVSGGESFESPAALPAMPPEARTSFPLSESQTLLSSAPVPKVMMPSPASSMFRKPYVRRRPSKRRGARAFRCIKPAPVIHPASVIFTVPATTVKIVSLGGGCNMIQPVNAAVAQSPQTIPIATLLVNPTSFPCPLNQPLVASSVSPLIVSGNSVNLPIPSTPEDKAHMNVDIACAVADGENAFQGLEPKLEPQELSPLSATVFPKVEHSPGPPPVDKQCQEGLSENSAYRWTVVKTEEGRQALEPLPQGIQESLNNSSPGDLEEVVKMEPEDATEEISGFL

SEQ ID NO: 553 - protein, 739 aa, Homo sapiens
MGFSNMEDDGPEEEERVAEPQANFNTPQALRFEELLANLLNEQHQIAKELFEQLKMKKPSAKQQKEVEKVKPQCKEVHQTLILDPAQRKRLQQQMQQHVQLLTQIHLLATCNPNLNPEASSTRICLKELGTFAQSSIALHHQYNPKFQTLFQPCNLMGAMQLIEDFSTHVSIDCSPHKTVKKTANEFPCLPKQVAWILATSKVFMYPELLPVCSLKAKNPQDKILFTKAEDNLLALGLKHFEGTEFLNPLISKYLLTCKTARQLTVRIKNLNMNRAPDNIIKFYKKTKQLPVLGKCCEEIQPHQWKPPIEREEHRLPFWLKASLPSIQEELRHMADGAREVGNMTGTTEINSDQGLEKDNSELGSETRYPLLLPKGVVLKLKPVADRFPKKAWRQKRSSVLKPLLIQPSPSLQPSFNPGKTPAQSTHSEAPPSKMVLRIPHPIQPATVLQTVPGVPPLGVSGGESFESPAALPAMPPEARTSFPLSESQTLLSSAPVPKVMMPSPASSMFRKPYVRRRPSKRRGARAFRCIKPAPVIHPASVIFTVPATTVKIVSLGGGCNMIQPVNAAVAQSPQTIPIATLLVNPTSFPCPLNQPLVASSVSPLIVSGNSVNLPIPSTPEDKAHMNVDIACAVADGENAFQGLEPKLEPQELSPLSATVFPKVEHSPGPPPVDKQCQEGLSENSAYRWTVVKTEEGRQALEPLPQGIQESLNNSSPGDLEEVVKMEPEDATEEISGFL

SEQ ID NO: 554 - protein, 730 aa, Homo sapiens
MEDLFETFQDEMGFSNMEDDGPEEEERVAEPQANFNTPQALRFEELLANLLNEQHQIAKELFEQLKMKKPSAKQQKEVEKVKPQCKEVHQTLILDPAQRKRLQQQMQQHVQLLTQIHLLATCNPNLNPEASSTRICLKELGTFAQSSIALHHQYNPKFQTLFQPCNLMGAMQLIEDFSTHVSIDCSPHKTVKKTANEFPCLPKQVAWILATSKVFMYPELLPVCSLKAKNPQDKILFTKAEDNKYLLTCKTARQLTVRIKNLNMNRAPDNIIKFYKKTKQLPVLGKCCEEIQPHQWKPPIEREEHRLPFWLKASLPSIQEELRHMADGAREVGNMTGTTEINSDQGLEKDNSELGSETRYPLLLPKGVVLKLKPVADRFPKKAWRQKRSSVLKPLLIQPSPSLQPSFNPGKTPAQSTHSEAPPSKMVLRIPHPIQPATVLQTVPGVPPLGVSGGESFESPAALPAMPPEARTSFPLSESQTLLSSAPVPKVMMPSPASSMFRKPYVRRRPSKRRGARAFRCIKPAPVIHPASVIFTVPATTVKIVSLGGGCNMIQPVNAAVAQSPQTIPIATLLVNPTSFPCPLNQPLVASSVSPLIVSGNSVNLPIPSTPEDKAHMNVDIACAVADGENAFQGLEPKLEPQELSPLSATVFPKVEHSPGPPPVDKQCQEGLSENSAYRWTVVKTEEGRQALEPLPQGIQESLNNSSPGDLEEVVKMEPEDATEEISGFL

SEQ ID NO: 555 - protein, 684 aa, Homo sapiens
MKKPSAKQQKEVEKVKPQCKEVHQTLILDPAQRKRLQQQMQQHVQLLTQIHLLATCNPNLNPEASSTRICLKELGTFAQSSIALHHQYNPKFQTLFQPCNLMGAMQLIEDFSTHVSIDCSPHKTVKKTANEFPCLPKQVAWILATSKVFMYPELLPVCSLKAKNPQDKILFTKAEDNLLALGLKHFEGTEFLNPLISKYLLTCKTARQLTVRIKNLNMNRAPDNIIKFYKKTKQLPVLGKCCEEIQPHQWKPPIEREEHRLPFWLKASLPSIQEELRHMADGAREVGNMTGTTEINSDQGLEKDNSELGSETRYPLLLPKGVVLKLKPVADRFPKKAWRQKRSSVLKPLLIQPSPSLQPSFNPGKTPAQSTHSEAPPSKMVLRIPHPIQPATVLQTVPGVPPLGVSGGESFESPAALPAMPPEARTSFPLSESQTLLSSAPVPKVMMPSPASSMFRKPYVRRRPSKRRGARAFRCIKPAPVIHPASVIFTVPATTVKIVSLGGGCNMIQPVNAAVAQSPQTIPIATLLVNPTSFPCPLNQPLVASSVSPLIVSGNSVNLPIPSTPEDKAHMNVDIACAVADGENAFQGLEPKLEPQELSPLSATVFPKVEHSPGPPPVDKQCQEGLSENSAYRWTVVKTEEGRQALEPLPQGIQESLNNSSPGDLEEVVKMEPEDATEEISGFL

SEQ ID NO: 556 - protein, 719 aa, Homo sapiens
MGFSNMEDDGPEEEERVAEPQANFNTPQALRFEELLANLLNEQHQIAKELFEQLKMKKPSAKQQKEVEKVKPQCKEVHQTLILDPAQRKRLQQQMQQHVQLLTQIHLLATCNPNLNPEASSTRICLKELGTFAQSSIALHHQYNPKFQTLFQPCNLMGAMQLIEDFSTHVSIDCSPHKTVKKTANEFPCLPKQVAWILATSKVFMYPELLPVCSLKAKNPQDKILFTKAEDNKYLLTCKTARQLTVRIKNLNMNRAPDNIIKFYKKTKQLPVLGKCCEEIQPHQWKPPIEREEHRLPFWLKASLPSIQEELRHMADGAREVGNMTGTTEINSDQGLEKDNSELGSETRYPLLLPKGVVLKLKPVADRFPKKAWRQKRSSVLKPLLIQPSPSLQPSFNPGKTPAQSTHSEAPPSKMVLRIPHPIQPATVLQTVPGVPPLGVSGGESFESPAALPAMPPEARTSFPLSESQTLLSSAPVPKVMMPSPASSMFRKPYVRRRPSKRRGARAFRCIKPAPVIHPASVIFTVPATTVKIVSLGGGCNMIQPVNAAVAQSPQTIPIATLLVNPTSFPCPLNQPLVASSVSPLIVSGNSVNLPIPSTPEDKAHMNVDIACAVADGENAFQGLEPKLEPQELSPLSATVFPKVEHSPGPPPVDKQCQEGLSENSAYRWTVVKTEEGRQALEPLPQGIQESLNNSSPGDLEEVVKMEPEDATEEISGFL

SEQ ID NO: 557 - protein, 467 aa, Homo sapiens
MNRAPDNIIKFYKKTKQLPVLGKCCEEIQPHQWKPPIEREEHRLPFWLKASLPSIQEELRHMADGAREVGNMTGTTEINSDQGLEKDNSELGSETRYPLLLPKGVVLKLKPVADRFPKKAWRQKRSSVLKPLLIQPSPSLQPSFNPGKTPAQSTHSEAPPSKMVLRIPHPIQPATVLQTVPGVPPLGVSGGESFESPAALPAMPPEARTSFPLSESQTLLSSAPVPKVMMPSPASSMFRKPYVRRRPSKRRGARAFRCIKPAPVIHPASVIFTVPATTVKIVSLGGGCNMIQPVNAAVAQSPQTIPIATLLVNPTSFPCPLNQPLVASSVSPLIVSGNSVNLPIPSTPEDKAHMNVDIACAVADGENAFQGLEPKLEPQELSPLSATVFPKVEHSPGPPPVDKQCQEGLSENSAYRWTVVKTEEGRQALEPLPQGIQESLNNSSPGDLEEVVKMEPEDATEEISGFL

SEQ ID NO: 558 - protein, 868 aa, Homo sapiens
MAGVGRSGGPWGRTRGGRSGRLGVSLGALSSLPLEELPRPLCCRRCRRHFGFALRGETIPVSVAGSASSQFAPLALHLSLLLSRISASRLTRWPPPDKREGSAVDPGKRRSLAATPSSSLPCTLIALGLRHEKEANELMEDLFETFQDEMGFSNMEDDGPEEEERVAEPQANFNTPQALRFEELLANLLNEQHQIAKELFEQLKMKKPSAKQQKEVEKVKPQCKEVHQTLILDPAQRKRLQQQMQQHVQLLTQIHLLATCNPNLNPEASSTRICLKELGTFAQSSIALHHQYNPKFQTLFQPCNLMGAMQLIEDFSTHVSIDCSPHKTVKKTANEFPCLPKQVAWILATSKVFMYPELLPVCSLKAKNPQDKILFTKAEDNKYLLTCKTARQLTVRIKNLNMNRAPDNIIKFYKKTKQLPVLGKCCEEIQPHQWKPPIEREEHRLPFWLKASLPSIQEELRHMADGAREVGNMTGTTEINSDQGLEKDNSELGSETRYPLLLPKGVVLKLKPVADRFPKKAWRQKRSSVLKPLLIQPSPSLQPSFNPGKTPAQSTHSEAPPSKMVLRIPHPIQPATVLQTVPGVPPLGVSGGESFESPAALPAMPPEARTSFPLSESQTLLSSAPVPKVMMPSPASSMFRKPYVRRRPSKRRGARAFRCIKPAPVIHPASVIFTVPATTVKIVSLGGGCNMIQPVNAAVAQSPQTIPIATLLVNPTSFPCPLNQPLVASSVSPLIVSGNSVNLPIPSTPEDKAHMNVDIACAVADGENAFQGLEPKLEPQELSPLSATVFPKVEHSPGPPPVDKQCQEGLSENSAYRWTVVKTEEGRQALEPLPQGIQESLNNSSPGDLEEVVKMEPEDATEEISGFL

SEQ ID NO: 559 - protein, 888 aa, Homo sapiens
MAGVGRSGGPWGRTRGGRSGRLGVSLGALSSLPLEELPRPLCCRRCRRHFGFALRGETIPVSVAGSASSQFAPLALHLSLLLSRISASRLTRWPPPDKREGSAVDPGKRRSLAATPSSSLPCTLIALGLRHEKEANELMEDLFETFQDEMGFSNMEDDGPEEEERVAEPQANFNTPQALRFEELLANLLNEQHQIAKELFEQLKMKKPSAKQQKEVEKVKPQCKEVHQTLILDPAQRKRLQQQMQQHVQLLTQIHLLATCNPNLNPEASSTRICLKELGTFAQSSIALHHQYNPKFQTLFQPCNLMGAMQLIEDFSTHVSIDCSPHKTVKKTANEFPCLPKQVAWILATSKVFMYPELLPVCSLKAKNPQDKILFTKAEDNLLALGLKHFEGTEFLNPLISKYLLTCKTARQLTVRIKNLNMNRAPDNIIKFYKKTKQLPVLGKCCEEIQPHQWKPPIEREEHRLPFWLKASLPSIQEELRHMADGAREVGNMTGTTEINSDQGLEKDNSELGSETRYPLLLPKGVVLKLKPVADRFPKKAWRQKRSSVLKPLLIQPSPSLQPSFNPGKTPAQSTHSEAPPSKMVLRIPHPIQPATVLQTVPGVPPLGVSGGESFESPAALPAMPPEARTSFPLSESQTLLSSAPVPKVMMPSPASSMFRKPYVRRRPSKRRGARAFRCIKPAPVIHPASVIFTVPATTVKIVSLGGGCNMIQPVNAAVAQSPQTIPIATLLVNPTSFPCPLNQPLVASSVSPLIVSGNSVNLPIPSTPEDKAHMNVDIACAVADGENAFQGLEPKLEPQELSPLSATVFPKVEHSPGPPPVDKQCQEGLSENSAYRWTVVKTEEGRQALEPLPQGIQESLNNSSPGDLEEVVKMEPEDATEEISGFL

SEQ ID NO: 560 - protein, 438 aa, Homo sapiens
MQAEDRSQFGSAAEMLSEQTAALGTGWESMNVQLDGAEPQVERGSQEERPWRTVPGPLEHLCCDLEEEPQSLQEKAQSAPWVPAIPQEGNTGDWEMAAALLAAGSQGLVTIKDVSLCFSQEEWRSLDPSQTDFYGEYVMQENCGIVVSLRFPIPKLDMLSQLEGGEEQWVPDPQDLEERDILRVTYTGDGSEHEGDTPELEAEPPRMLSSVSEDTVLWNPEHDESWDSMPSSSRGMLLGPPFLQEDSFSNLLCSTEMDSLLRPHTCPQCGKQFVWGSHLARHQQTHTGERPYSCLKCEKTFGRRHHLIRHQKTHLHDKTSRCSECGKNFRCNSHLASHQRVHAEGKSCKGQEVGESPGTRKRQRAPPVPKCHVCTECGKSFGRRHHLVRHWLTHTGEKPFQCPRCEKSFGRKHHLDRHLLTHQGQSPRNSWDRGTSVF

SEQ ID NO: 561 - protein, 383 aa, Homo sapiens
MLSEQTAALGTGWESMNVQLDGAEPQVERGSQEERPWRTVPGPLEHLCCDLEEEPQSLQEKAQSAPWVPAIPQEGNTGDWEMAAALLAAGSQGLVTIKDVSLCFSQEEWRSLDPSQTDFYGEYVMQENCGIVVSLRFPIPKLDMLSQLEGGEEQWVPDPQDLEERDILRVTYTGDGSEHEGDTPELEAEPPRMLSSVSEDTVLWNPEHDESWDSMPSSSRGMLLGPPFLQEDSFSNLLCSTEMDSLLRPHTCPQCGKQFVWGSHLARHQQTHTGERPYSCLKCEKTFGRRHHLIRHQKTHLHDKTSRCSECGKNFRCNSHLASHQRVHAEGKSCKGQEVGESPGTRKRQRAPPVPKCHVCTECGKSFGRRHHLVRHWLTHTGE

SEQ ID NO: 562 - protein, 415 aa, Homo sapiens
MLSEQTAALGTGWESMNVQLDGAEPQVERGSQEERPWRTVPGPLEHLCCDLEEEPQSLQEKAQSAPWVPAIPQEGNTGDWEMAAALLAAGSQVSSASLGVSCGPITAAFVLLSHQPIDELAHMIINGFPIPKLDMLSQLEGGEEQWVPDPQDLEERDILRVTYTGDGSEHEGDTPELEAEPPRMLSSVSEDTVLWNPEHDESWDSMPSSSRGMLLGPPFLQEDSFSNLLCSTEMDSLLRPHTCPQCGKQFVWGSHLARHQQTHTGERPYSCLKCEKTFGRRHHLIRHQKTHLHDKTSRCSECGKNFRCNSHLASHQRVHAEGKSCKGQEVGESPGTRKRQRAPPVPKCHVCTECGKSFGRRHHLVRHWLTHTGEKPFQCPRCEKSFGRKHHLDRHLLTHQGQSPRNSWDRGTSVF

SEQ ID NO: 563 - protein, 424 aa, Homo sapiens
MLSEQTAALGTGWESMNVQLDGAEPQVERGSQEERPWRTVPGPLEHLCCDLEEEPQSLQEKAQSAPWVPAIPQEGNTGDWEMAAALLAAGSQGLVTIKDVSLCFSQEEWRSLDPSQTDFYGEYVMQENCGIVVSLRFPIPKLDMLSQLEGGEEQWVPDPQDLEERDILRVTYTGDGSEHEGDTPELEAEPPRMLSSVSEDTVLWNPEHDESWDSMPSSSRGMLLGPPFLQEDSFSNLLCSTEMDSLLRPHTCPQCGKQFVWGSHLARHQQTHTGERPYSCLKCEKTFGRRHHLIRHQKTHLHDKTSRCSECGKNFRCNSHLASHQRVHAEGKSCKGQEVGESPGTRKRQRAPPVPKCHVCTECGKSFGRRHHLVRHWLTHTGEKPFQCPRCEKSFGRKHHLDRHLLTHQGQSPRNSWDRGTSVF

SEQ ID NO: 564 - protein, 1363 aa, Homo sapiens
MQRGAALCLRLWLCLGLLDGLVSGYSMTPPTLNITEESHVIDTGDSLSISCRGQHPLEWAWPGAQEAPATGDKDSEDTGVVRDCEGTDARPYCKVLLLHEVHANDTGSYVCYYKYIKARIEGTTAASSYVFVRDFEQPFINKPDTLLVNRKDAMWVPCLVSIPGLNVTLRSQSSVLWPDGQEVVWDDRRGMLVSTPLLHDALYLQCETTWGDQDFLSNPFLVHITGNELYDIQLLPRKSLELLVGEKLVLNCTVWAEFNSGVTFDWDYPGKQAERGKWVPERRSQQTHTELSSILTIHNVSQHDLGSYVCKANNGIQRFRESTEVIVHENPFISVEWLKGPILEATAGDELVKLPVKLAAYPPPEFQWYKDGKALSGRHSPHALVLKEVTEASTGTYTLALWNSAAGLRRNISLELVVNVPPQIHEKEASSPSIYSRHSRQALTCTAYGVPLPLSIQWHWRPWTPCKMFAQRSLRRRQQQDLMPQCRDWRAVTTQDAVNPIESLDTWTEFVEGKNKTVSKLVIQNANVSAMYKCVVSNKVGQDERLIYFYVTTIPDGFTIESKPSEELLEGQPVLLSCQADSYKYEHLRWYRLNLSTLHDAHGNPLLLDCKNVHLFATPLAASLEEVAPGARHATLSLSIPRVAPEHEGHYVCEVQDRRSHDKHCHKKYLSVQALEAPRLTQNLTDLLVNVSDSLEMQCLVAGAHAPSIVWYKDERLLEEKSGVDLADSNQKLSIQRVREEDAGRYLCSVCNAKGCVNSSASVAVEGSEDKGSMEIVILVGTGVIAVFFWVLLLLIFCNMRRPAHADIKTGYLSIIMDPGEVPLEEQCEYLSYDASQWEFPRERLHLGRVLGYGAFGKVVEASAFGIHKGSSCDTVAVKMLKEGATASEHRALMSELKILIHIGNHLNVVNLLGACTKPQGPLMVIVEFCKYGNLSNFLRAKRDAFSPCAEKSPEQRGRFRAMVELARLDRRRPGSSDRVLFARFSKTEGGARRASPDQEAEDLWLSPLTMEDLVCYSFQVARGMEFLASRKCIHRDLAARNILLSESDVVKICDFGLARDIYKDPDYVRKGSARLPLKWMAPESIFDKVYTTQSDVWSFGVLLWEIFSLGASPYPGVQINEEFCQRLRDGTRMRAPELATPAIRRIMLNCWSGDPKARPAFSELVEILGDLLQGRGLQEEEEVCMAPRSSQSSEEGSFSQVSTMALHIAQADAEDSPPSLQRHSLAARYYNWVSFPGCLARGAETRGSSRMKTFEEFPMTPTTYKGSVDNQTDSGMVLASEEFEQIESRHRQESGFSCKGPGQNVAVTRAHPDSQGRRRRPERGARGGQVFYNSEYGELSEPSEEDHCSPSARVTFFTDNSY

SEQ ID NO: 565 - protein, 1298 aa, Homo sapiens
MQRGAALCLRLWLCLGLLDGLVSGYSMTPPTLNITEESHVIDTGDSLSISCRGQHPLEWAWPGAQEAPATGDKDSEDTGVVRDCEGTDARPYCKVLLLHEVHANDTGSYVCYYKYIKARIEGTTAASSYVFVRDFEQPFINKPDTLLVNRKDAMWVPCLVSIPGLNVTLRSQSSVLWPDGQEVVWDDRRGMLVSTPLLHDALYLQCETTWGDQDFLSNPFLVHITGNELYDIQLLPRKSLELLVGEKLVLNCTVWAEFNSGVTFDWDYPGKQAERGKWVPERRSQQTHTELSSILTIHNVSQHDLGSYVCKANNGIQRFRESTEVIVHENPFISVEWLKGPILEATAGDELVKLPVKLAAYPPPEFQWYKDGKALSGRHSPHALVLKEVTEASTGTYTLALWNSAAGLRRNISLELVVNVPPQIHEKEASSPSIYSRHSRQALTCTAYGVPLPLSIQWHWRPWTPCKMFAQRSLRRRQQQDLMPQCRDWRAVTTQDAVNPIESLDTWTEFVEGKNKTVSKLVIQNANVSAMYKCVVSNKVGQDERLIYFYVTTIPDGFTIESKPSEELLEGQPVLLSCQADSYKYEHLRWYRLNLSTLHDAHGNPLLLDCKNVHLFATPLAASLEEVAPGARHATLSLSIPRVAPEHEGHYVCEVQDRRSHDKHCHKKYLSVQALEAPRLTQNLTDLLVNVSDSLEMQCLVAGAHAPSIVWYKDERLLEEKSGVDLADSNQKLSIQRVREEDAGRYLCSVCNAKGCVNSSASVAVEGSEDKGSMEIVILVGTGVIAVFFWVLLLLIFCNMRRPAHADIKTGYLSIIMDPGEVPLEEQCEYLSYDASQWEFPRERLHLGRVLGYGAFGKVVEASAFGIHKGSSCDTVAVKMLKEGATASEHRALMSELKILIHIGNHLNVVNLLGACTKPQGPLMVIVEFCKYGNLSNFLRAKRDAFSPCAEKSPEQRGRFRAMVELARLDRRRPGSSDRVLFARFSKTEGGARRASPDQEAEDLWLSPLTMEDLVCYSFQVARGMEFLASRKCIHRDLAARNILLSESDVVKICDFGLARDIYKDPDYVRKGSARLPLKWMAPESIFDKVYTTQSDVWSFGVLLWEIFSLGASPYPGVQINEEFCQRLRDGTRMRAPELATPAIRRIMLNCWSGDPKARPAFSELVEILGDLLQGRGLQEEEEVCMAPRSSQSSEEGSFSQVSTMALHIAQADAEDSPPSLQRHSLAARYYNWVSFPGCLARGAETRGSSRMKTFEEFPMTPTTYKGSVDNQTDSGMVLASEEFEQIESRHRQESGFR

SEQ ID NO: 566 - protein, 830 aa, Homo sapiens
MQRGAALCLRLWLCLGLLDGLVSGYSMTPPTLNITEESHVIDTGDSLSISCRGQHPLEWAWPGAQEAPATGDKDSEDTGVVRDCEGTDARPYCKVLLLHEVHANDTGSYVCYYKYIKARIEGTTAASSYVFVRDFEQPFINKPDTLLVNRKDAMWVPCLVSIPGLNVTLRSQSSVLWPDGQEVVWDDRRGMLVSTPLLHDALYLQCETTWGDQDFLSNPFLVHITGNELYDIQLLPRKSLELLVGEKLVLNCTVWAEFNSGVTFDWDYPGKQAERGKWVPERRSQQTHTELSSILTIHNVSQHDLGSYVCKANNGIQRFRESTEVIVHENPFISVEWLKGPILEATAGDELVKLPVKLAAYPPPEFQWYKDGKALSGRHSPHALVLKEVTEASTGTYTLALWNSAAGLRRNISLELVVNVPPQIHEKEASSPSIYSRHSRQALTCTAYGVPLPLSIQWHWRPWTPCKMFAQRSLRRRQQQDLMPQCRDWRAVTTQDAVNPIESLDTWTEFVEGKNKTVSKLVIQNANVSAMYKCVVSNKVGQDERLIYFYVTTIPDGFTIESKPSEELLEGQPVLLSCQADSYKYEHLRWYRLNLSTLHDAHGNPLLLDCKNVHLFATPLAASLEEVAPGARHATLSLSIPRVAPEHEGHYVCEVQDRRSHDKHCHKKYLSVQALEAPRLTQNLTDLLVNVSDSLEMQCLVAGAHAPSIVWYKDERLLEEKSGREGGPGEGQVRRPARPTIPNPGGPAPPPHPLQESTWRTPTRSCKGPGQNVAVTRAHPDSQGRRRRPERGARGGQVFYNSEYGELSEPSEEDHCSPSARVTFFTDNSY

SEQ ID NO: 567 - protein, 81 aa, Homo sapiens
MTAHSFALPVIIFTTFWGLVGIAGPWFVPKGPNRGVIITMLVATAVCCYLFWLIAILAQLNPLFGPQLKNETIWYVRFLWE

SEQ ID NO: 568 - protein, 164 aa, Homo sapiens
MTAHSFALPVIIFTTFWGLVGIAGPWFVPKGPNRGVIITMLVATAVCCYLLCPALGMTVAPLSLTTPSSGPSPTQLCLVTSSLLLAPRDPDPQGLPGSWKSSQSSQPARALGSPGHSSGRGDVLLQYPHCSGVCPLSQGDAAGELVWVGSFPLQTGQMPGLSPS

SEQ ID NO: 569 - protein, 187 aa, Homo sapiens
MTAHSFALPVIIFTTFWGLVGIAGPWFVPKGPNRGVIITMLVATAVCCYLFWLIAILAQLNPLFGPQLKNETIWCPALGMTVAPLSLTTPSSGPSPTQLCLVTSSLLLAPRDPDPQGLPGSWKSSQSSQPARALGSPGHSSGRGDVLLQYPHCSGVCPLSQGDAAGELVWVGSFPLQTGQMPGLSPS

SEQ ID NO: 570 - protein, 130 aa, Homo sapiens
MRVRGPARLIASGARLLLRMLSALPGWGPAHLQRPLLGPASCLGILRPAMTAHSFALPVIIFTTFWGLVGIAGPWFVPKGPNRGVIITMLVATAVCCYLFWLIAILAQLNPLFGPQLKNETIWYVRFLWE

SEQ ID NO: 571 - protein, 258 aa, Homo sapiens
MRLSSSPPRGPQQLSSFGSVDWLSQSSCSGPTHTPRPADFSLGSLPGPGQTSGAREPPQAVSIKEAAGSSNLPAPERTMAGLSKEPNTLRAPRVRTAFTMEQVRTLEGVFQHHQYLSPLERKRLAREMQLSEVQIKTWFQNRRMKHKRQMQDPQLHSPFSGSLHAPPAFYSTSSGLANGLQLLCPWAPLSGPQALMLPPGSFWGLCQVAQEALASAGASCCGQPLASHPPTPGRPSLGPALSTGPRGLCAMPQTGDAF

SEQ ID NO: 572 - protein, 805 aa, Homo sapiens
MPNQGEDCYFFFYSTCTKGDSCPFRHCEAALGNETVCTLWQEGRCFRRVCRFRHMEIDKKRSEIPCYWENQPTGCQKLNCVFHHNRGRYVDGLFLPPSKSVLPTVPESPEEEVKASQLSVQQNKLSVQSNTSPQLRSVMKVESSENVPSPKHPPVVINAADDDEDDDDQFSEEGDETKTPTLQPTPEVHNGLRVTSVRKPAVNIKQGECLHFGIKTLEEIKSKKMKEKSEEQGEGSSGVSSLLLHPEPVPGPEKENVRTVVRTVTLSTKQGEEPLVRLGLTETLGKRKFSTGGDSDPPLKRSLAQRLGKKVEAPETNTDETPKKAQVSKSLKERLGMSADPNNEDATDKVNKVGEIHVKTLEEMLLERASQKHGESQTKLKTEGPSKTDDSTSGARSSSTIRIKTFSEVLAEEEHRQQEAERQKSKKDTTCIKLKTDSEIKKTVVLPPIVASKGQSEEPAGKTKSMQEVHMKTVEEIKLEKALRVQQSSESSTSSPSQHEATPGARLLLRITKRTWRKEEKKLQEGNEVDFLSRVRMEATEASVETTGVDITKIQVKRCEIMRETRMQKQQEREKSVLTPLQGDVASCNTQVAEKPVLTAVPGITWHLTKQLPTKSSQKVEVETSGIADSLLNVKWSAQTLEKRGEAKPTVNVKQSVVKVVSSPKLAPKRKAVEMHPAVTAAVKPLSSSSVLQEPPAKKAAVDAVVLLDSEDKSVTVPEAENPRDSLVLPPTQSSSDSSPPEVSGPSSSQMSMKTRRLSSASTGKPPLSVEDDFEKLTWEISGGKLEAEIDLDPGKDEDDLPLEL

SEQ ID NO: 573 - protein, 533 aa, Homo sapiens
MAVESQGGRPLVLGLLLCVLGPVVSHAGKILLIPVDGSHWLSMLGAIQQLQQRGHEIVVLAPDASLYIRDGAFYTLKTYPVPFQREDVKESFVSLGHNVFENDSFLQRVIKTYKKIKKDSAMLLSGCSHLLHNKELMASLAESSFDVMLTDPFLPCSPIVAQYLSLPTVFFLHALPCSLEFEATQCPNPFSYVPRPLSSHSDHMTFLQRVKNMLIAFSQNFLCDVVYSPYATLASEFLQREVTVQDLLSSASVWLFRSDFVKDYPRPIMPNMVFVGGINCLHQNPLSQEFEAYINASGEHGIVVFSLGSMVSEIPEKKAMAIADALGKIPQTVLWRYTGTRPSNLANNTILVKWLPQNDLLGHPMTRAFITHAGSHGVYESICNGVPMVMMPLFGDQMDNAKRMETKGAGVTLNVLEMTSEDLENALKAVINDKSYKENIMRLSSLHKDRPVEPLDLAVFWVEFVMRHKGAPHLRPAAHDLTWYQYHSLDVIGFLLAVVLTVAFITFKCCAYGYRKCLGKKGRVKKAHKSKTH

SEQ ID NO: 574 - protein, 444 aa, Homo sapiens
MAVESQGGRPLVLGLLLCVLGPVVSHAGKILLIPVDGSHWLSMLGAIQQLQQRGHEIVVLAPDASLYIRDGAFYTLKTYPVPFQREDVKESFVSLGHNVFENDSFLQRVIKTYKKIKKDSAMLLSGCSHLLHNKELMASLAESSFDVMLTDPFLPCSPIVAQYLSLPTVFFLHALPCSLEFEATQCPNPFSYVPRPLSSHSDHMTFLQRVKNMLIAFSQNFLCDVVYSPYATLASEFLQREVTVQDLLSSASVWLFRSDFVKDYPRPIMPNMVFVGGINCLHQNPLSQEFEAYINASGEHGIVVFSLGSMVSEIPEKKAMAIADALGKIPQTVLWRYTGTRPSNLANNTILVKWLPQNDLLGHPMTRAFITHAGSHGVYESICNGVPMVMMPLFGDQMDNAKRMETKGAGVTLNVLEMTSEDLENALKAVINDKRKKQQSGRQM

SEQ ID NO: 575 - protein, 360 aa, Homo sapiens
MTQQPLRGVTSLRFNQDQSCFCCAMETGVRIYNVEPLMEKGHLDHEQVGSMGLVEMLHRSNLLALVGGGSSPKFSEISVLIWDDAREGKDSKEKLVLEFTFTKPVLSVRMRHDKIVIVLKNRIYVYSFPDNPRKLFEFDTRDNPKGLCDLCPSLEKQLLVFPGHKCGSLQLVDLASTKPGTSSAPFTINAHQSDIACVSLNQPGTVVASASQKGTLIRLFDTQSKEKLVELRRGTDPATLYCINFSHDSSFLCASSDKGTVHIFALKDTRLNRRSALARVGKVGPMIGQYVDSQWSLASFTVPAESACICAFGRNTSKNVNSVIAICVDGTFHKYVFTPDGNCNREAFDVYLDICDDDDF

SEQ ID NO: 576 - protein, 371 aa, Homo sapiens
MTQQPLRGVTSLRFNQDQSCFCCAMETGVRIYNVEPLMEKGHLDHEQVGSMGLVEMLHRSNLLALVGGGSSPKFSEISVLIWDDAREGKDSKEKLVLEFTFTKPVLSVRMRHDKIVIVLKNRIYVYSFPDNPRKLFEFDTRDNPKAAHPTPHLHTLGLCDLCPSLEKQLLVFPGHKCGSLQLVDLASTKPGTSSAPFTINAHQSDIACVSLNQPGTVVASASQKGTLIRLFDTQSKEKLVELRRGTDPATLYCINFSHDSSFLCASSDKGTVHIFALKDTRLNRRSALARVGKVGPMIGQYVDSQWSLASFTVPAESACICAFGRNTSKNVNSVIAICVDGTFHKYVFTPDGNCNREAFDVYLDICDDDDF

SEQ ID NO: 577 - protein, 361 aa, Homo sapiens
MTQQPLRGVTSLRFNQDQSCFCCAMETGVRIYNVEPLMEKGHLDHEQVGSMGLVEMLHRSNLLALVGGGSSPKFSEISAVLIWDDAREGKDSKEKLVLEFTFTKPVLSVRMRHDKIVIVLKNRIYVYSFPDNPRKLFEFDTRDNPKGLCDLCPSLEKQLLVFPGHKCGSLQLVDLASTKPGTSSAPFTINAHQSDIACVSLNQPGTVVASASQKGTLIRLFDTQSKEKLVELRRGTDPATLYCINFSHDSSFLCASSDKGTVHIFALKDTRLNRRSALARVGKVGPMIGQYVDSQWSLASFTVPAESACICAFGRNTSKNVNSVIAICVDGTFHKYVFTPDGNCNREAFDVYLDICDDDDF

SEQ ID NO: 578 - protein, 665 aa, Homo sapiens
MEVSGPEDDPFLSQLHQVQCPVCQQMMPAAHINSHLDRCLLLHPAGHAEPAAGSHRAGERAKGPSPPGAKRRRLSESSALKQPATPTAAESSEGEGEEGDDGGETESRESYDAPPTPSGARLIPDFPVARSSSPGRKGSGKRPAAAAAAGSASPRSWDEAEAQEEEEAVGDGDGDGDADADGEDDPGHWDADAAEAATAFGASGGGRPHPRALAAEEIRQMLQGKPLADTMRPDTLQDYFGQSKAVGQDTLLRSLLETNEIPSLILWGPPGCGKTTLAHIIASNSKKHSIRFVTLSATNAKTNDVRDVIKQAQNEKSFFKRKTILFIDEIHRFNKSQQDTFLPHVECGTITLIGATTENPSFQVNAALLSRCRVIVLEKLPVEAMVTILMRAINSLGIHVLDSSRPTDPLSHSSNSSSEPAMFIEDKAVDTLAYLSDGDARAGLNGLQLAVLARLSSRKMFCKKSGQSYSPSRVLITENDVKEGLQRSHILYDRAGEEHYNCISALHKSMRGSDQNASLYWLARMLEGGEDPLYVARRLVRFASEDIGLADPSALTQAVAAYQGCHFIGMPECEVLLAQCVVYFARAPKSIEVYSAYNNVKACLRNHQGPLPPVPLHLRNAPTRLMKDLGYGKGYKYNPMYSEPVDQEYLPEELRGVDFFKQRRC

SEQ ID NO: 579 - protein, 640 aa, Homo sapiens
MEVSGPEDDPFLSQLHQVQCPVCQQMMPAAHINSHLDRCLLLHPAGHAEPAAGSHRAGERAKGPSPPGAKRRRLSESSALKQPATPTAAESSEGEGEEGDDGGETESRESYDAPPTPSGARLIPDFPVARSSSPGRKGSGKRPAAAAAAGSASPRSWDEAEAQEEEEAVGDGDGDGDADADGEDDPGHWDADAAEAATAFGASGGGRPHPRALAAEEIRQMLQGKPLADTMRPDTLQDYFGQSKAVGQDTLLRSLLETNEIPSLILWGPPGCGKTTLAHIIASNSKKHSIRFVTLSATNAKTNDVRDVIKQAQNEKSFFKRKTILFIDEIHRFNKSQQVNAALLSRCRVIVLEKLPVEAMVTILMRAINSLGIHVLDSSRPTDPLSHSSNSSSEPAMFIEDKAVDTLAYLSDGDARAGLNGLQLAVLARLSSRKMFCKKSGQSYSPSRVLITENDVKEGLQRSHILYDRAGEEHYNCISALHKSMRGSDQNASLYWLARMLEGGEDPLYVARRLVRFASEDIGLADPSALTQAVAAYQGCHFIGMPECEVLLAQCVVYFARAPKSIEVYSAYNNVKACLRNHQGPLPPVPLHLRNAPTRLMKDLGYGKGYKYNPMYSEPVDQEYLPEELRGVDFFKQRRC

SEQ ID NO: 580 - protein, 445 aa, Homo sapiens
MLQGKPLADTMRPDTLQDYFGQSKAVGQDTLLRSLLETNEIPSLILWGPPGCGKTTLAHIIASNSKKHSIRFVTLSATNAKTNDVRDVIKQAQNEKSFFKRKTILFIDEIHRFNKSQQDTFLPHVECGTITLIGATTENPSFQVNAALLSRCRVIVLEKLPVEAMVTILMRAINSLGIHVLDSSRPTDPLSHSSNSSSEPAMFIEDKAVDTLAYLSDGDARAGLNGLQLAVLARLSSRKMFCKKSGQSYSPSRVLITENDVKEGLQRSHILYDRAGEEHYNCISALHKSMRGSDQNASLYWLARMLEGGEDPLYVARRLVRFASEDIGLADPSALTQAVAAYQGCHFIGMPECEVLLAQCVVYFARAPKSIEVYSAYNNVKACLRNHQGPLPPVPLHLRNAPTRLMKDLGYGKGYKYNPMYSEPVDQEYLPEELRGVDFFKQRRC

SEQ ID NO: 581 - protein, 281 aa, Homo sapiens
MVTILMRAINSLGIHVLDSSRPTDPLSHSSNSSSEPAMFIEDKAVDTLAYLSDGDARAGLNGLQLAVLARLSSRKMFCKKSGQSYSPSRVLITENDVKEGLQRSHILYDRAGEEHYNCISALHKSMRGSDQNASLYWLARMLEGGEDPLYVARRLVRFASEDIGLADPSALTQAVAAYQGCHFIGMPECEVLLAQCVVYFARAPKSIEVYSAYNNVKACLRNHQGPLPPVPLHLRNAPTRLMKDLGYGKGYKYNPMYSEPVDQEYLPEELRGVDFFKQRRC

SEQ ID NO: 582 - protein, 597 aa, Homo sapiens
MAEIIQERIEDRLPELEQLERIGLFSHAEIKAIIKKASDLEYKIQRRTLFKEDFINYVQYEINLLELIQRRRTRIGYSFKKDEIENSIVHRVQGVFQRASAKWKDDVQLWLSYVAFCKKWATKTRLSKVFSAMLAIHSNKPALWIMAAKWEMEDRLSSESARQLFLRALRFHPECPKLYKEYFRMELMHAEKLRKEKEEFEKASMDVENPDYSEEILKGELAWIIYKNSVSIIKGAEFHVSLLSIAQLFDFAKDLQKEIYDDLQALHTDDPLTWDYVARRELEIESQTEEQPTTKQAKAVEVGRKEERCCAVYEEAVKTLPTEAMWKCYITFCLERFTKKSNSGFLRGKRLERTMTVFRKAHELKLLSECQYKQLSVSLLCYNFLREALEVAVAGTELFRDSGTMWQLKLQVLIESKSPDIAMLFEEAFVHLKPQVCLPLWISWAEWSEGAKSQEDTEAVFKKALLAVIGADSVTLKNKYLDWAYRSGGYKKARAVFKSLQESRPFSVDFFRKMIQFEKEQESCNMANIREYYERALREFGSADSDLWMDYMKEELNHPLGRPENCGQIYWRAMKMLQGESAEAFVAKHAMHQTGHL

SEQ ID NO: 583 - protein, 156 aa, Homo sapiens
WASQVSENRPVCKAIIQGKQFEGLVDTGADVSIIALNQWPKNWPKQKAVTGLVGVGTASEVYQSTEILHCLGPDNQESTVQPMITSIPLNLWGRDLLQQWGAEITMPAPLYSPTSQKIMTKMGYIPGKGLGKNEDGIKIPVEAKINQKREGIGYPF

SEQ ID NO: 584 - protein, 236 aa, Homo sapiens
MMGIFLVYVGFVFFSVLYVQQGLSSQAKFTEFPRNVTATEGQNVEMSCAFQSGSASVYLEIQWWFLRGPEDLDPGAEGAGAQVELLPDRDPDSDGTKISTVKVQGNDISHKLQISKVRKKDEGLYECRVTDANYGELQEHKAQAYLKVNANSHARRMQAFEASPMWLQDMKPRKNVSAAIPSSIHGSANQRTHSTSSPQVVAKIPKQSPQSGARIATSHGLSVLLLVCGFVKGALL

SEQ ID NO: 585 - protein, 244 aa, Homo sapiens
MMGIFLVYVGFVFFSVLYVQQGLSSQAKFTEFPRNVTATEGQNVEMSCAFQSGSASVYLEIQWWFLRGPEDLDPGAEGAGAQVELLPDRDPDSDGTKISTVKVQGNDISHKLQISKVRKKDEGLYECRVTDANYGELQEHKAQAYLKVNANSHARRMQAFEASPMWLQDMKPRKNVSAAIPSSIHGSANQRTHSTSSPQVVAKIPKQSPQSGMETHFEPFILPLTNAPQKGQSYRVDRFMNGDF

SEQ ID NO: 586 - protein, 351 aa, Homo sapiens
MSPRSCLRSLRLLVFAVFSAAASNWLYLAKLSSVGSISEEETCEKLKGLIQRQVQMCKRNLEVMDSVRRGAQLAIEECQYQFRNRRWNCSTLDSLPVFGKVVTQGTREAAFVYAISSAGVAFAVTRACSSGELEKCGCDRTVHGVSPQGFQWSGCSDNIAYGVAFSQSFVDVRERSKGASSSRALMNLHNNEAGRKAILTHMRVECKCHGVSGSCEVKTCWRAVPPFRQVGHALKEKFDGATEVEPRRVGSSRALVPRNAQFKPHTDEDLVYLEPSPDFCEQDMRSGVLGTRGRTCNKTSKAIDGCELLCCGRGFHTAQVELAERCSCKFHWCCFVKCRQCQRLVELHTCR

SEQ ID NO: 587 - protein, 296 aa, Homo sapiens
MCKRNLEVMDSVRRGAQLAIEECQYQFRNRRWNCSTLDSLPVFGKVVTQGTREAAFVYAISSAGVAFAVTRACSSGELEKCGCDRTVHGVSPQGFQWSGCSDNIAYGVAFSQSFVDVRERSKGASSSRALMNLHNNEAGRKAILTHMRVECKCHGVSGSCEVKTCWRAVPPFRQVGHALKEKFDGATEVEPRRVGSSRALVPRNAQFKPHTDEDLVYLEPSPDFCEQDMRSGVLGTRGRTCNKTSKAIDGCELLCCGRGFHTAQVELAERCSCKFHWCCFVKCRQCQRLVELHTCR

SEQ ID NO: 588 - protein, 606 aa, Homo sapiens
MPYEIKKVFASLPQVERGVSKIIGGDPKGNNFLYTNGKCVILRNIDNPALADIYTEHAHQVVVAKYAPSGFYIASGDVSGKLRIWDTTQKEHLLKYEYQPFAGKIKDIAWTEDSKRIAVVGEGREKFGAVFLWDSGSSVGEITGHNKVINSVDIKQSRPYRLATGSDDNCAAFFEGPPFKFKFTIGDHSRFVNCVRFSPDGNRFATASADGQIYIYDGKTGEKVCALGGSKAHDGGIYAISWSPDSTHLLSASGDKTSKIWDVSVNSVVSTFPMGSTVLDQQLGCLWQKDHLLSVSLSGYINYLDRNNPSKPLHVIKGHSKSIQCLTVHKNGGKSYIYSGSHDGHINYWDSETGENDSFAGKGHTNQVSRMTVDESGQLISCSMDDTVRYTSLMLRDYSGQGVVKLDVQPKCVAVGPGGYAVVVCIGQIVLLKDQRKCFSIDNPGYEPEVVAVHPGGDTVAIGGVDGNVRLYSILGTTLKDEGKLLEAKGPVTDVAYSHDGAFLAVCDASKVVTVFSVADGYSENNVFYGHHAKIVCLAWSPDNEHFASGGMDMMVYVWTLSDPETRVKIQDAHRLHHVSSLAWLDEHTLVTTSHDASVKEWTITY

SEQ ID NO: 589 - protein, 466 aa, Homo sapiens
MPYEIKKVFASLPQVERGVSKIIGGDPKGNNFLYTNGKCVILRNIDDHSRFVNCVRFSPDGNRFATASADGQIYIYDGKTGEKVCALGGSKAHDGGIYAISWSPDSTHLLSASGDKTSKIWDVSVNSVVSTFPMGSTVLDQQLGCLWQKDHLLSVSLSGYINYLDRNNPSKPLHVIKGHSKSIQCLTVHKNGGKSYIYSGSHDGHINYWDSETGENDSFAGKGHTNQVSRMTVDESGQLISCSMDDTVRYTSLMLRDYSGQGVVKLDVQPKCVAVGPGGYAVVVCIGQIVLLKDQRKCFSIDNPGYEPEVVAVHPGGDTVAIGGVDGNVRLYSILGTTLKDEGKLLEAKGPVTDVAYSHDGAFLAVCDASKVVTVFSVADGYSENNVFYGHHAKIVCLAWSPDNEHFASGGMDMMVYVWTLSDPETRVKIQDAHRLHHVSSLAWLDEHTLVTTSHDASVKEWTITY

SEQ ID NO: 590 - protein, 792 aa, Homo sapiens
MAFSGIYKLDDGKPYLNNCFPARNLLRVPEEGQGHWLVVQKGNLKKKPKGLVGAQAERRESLKATSFEFKGKKESRRENQVDLPGHILDQAFLLKHHCVRKPSDLCTINAKENDFKHFHSVIYINASENLLPLEAFHTFPALKELDLAFNGIKTIYVKYGDFKLLEFLDLSFNSLTVEAICDLGILPHLRVLLLTGNGLTSLPPNLAVAEQEASVTSLTSKRYILRFPALETLMLDDNRLSNPSCFASLAGLRRLKKLSLDENRIIRIPYLQQVQLYDESVDWNGGRGSPHKEPQFMLQSKPRMLEDSDEQLDYTVLPMKKDVDRTEVVFSSYPGFSTSETTKICSLPPIFEILPVKSLKARNQTLAPPFPELRYLSLAYNKIAKEDAVLPVALFPSLCEFVFHNNPLVAHTRGVPPLLKSFLQERLGIHLIRRKIVKPKHHVLMSRKESWKVKSEIPKVPKQPLVLHHPRMTTTKSPSKDMLEPEAELAEDLPTTKSTSVESEMPTENLEGHSPSCRTFVPLPPICSNSTVHSEETLSHLSDTTVRLSPERPSDEDSKSTESIFLTQVSELPSSVIHKDDLELKEKDQKKPPTAPREVKGTRRKLPTAFLPSKYHGYEELLTAKPDPAFIEPKGIQKNAQALQQMLKHPLLCHSSKPKLDTLQKPYVHKEKRAQRIPIPPPKKTRAQLLDDIFIRLRDPRNITEAPLGAVLHQWTERRLVNHKQYLEAKRLLKEFQARYRQLVSGSLRTVFGTTPLPMACPALSESQPKFGHFLEFMDEFCQEPTASDSQG

SEQ ID NO: 591 - protein, 598 aa, Homo sapiens
MAFSGIYKLDDGKPYLNNCFPARNLLRVPEEGQGHWLVVQKGNLKKKPKGLVGAQAERRESLKATSFEFKGKKESRRENQVDLPGHILDQAFLLKHHCVRKPSDLCTINAKENDFKHFHSVIYINASENLLPLEAFHTFPALKELDLAFNGIKTIYVKYGDFKLLEFLDLSFNSLTVEAICDLGILPHLRVLLLTGNGLTSLPPNLAVAEQEASVTSLTSKRYILRFPALETLMLDDNRLSNPSCFASLAGLRRLKKLSLDENRIIRIPYLQQVQLYDESVDWNGGRGSPHKEPQFMLQSKPRMLEDSDEQLDYTVLPMKKDVDRTGVPPLLKSFLQERLGIHLIRRKIVKPKHHVLMSRKESWKVKSEIPKVPKQPLVLHHPRMTTTKSPSKDMLEPEAELAEDLPTTKSTSVESEMPTENLEGHSPSCRTFVPLPPICSNSTVHSEETLSHLSDTTVRLSPERPSDEDSKSTESIFLTQVSELPSSVIHKDDLELKEKDQKKPPTAPREVKGTRRKLPTAFLPSKYHGYEELLTAKPDPAFIEPKGIQKNAQALQQMLKHPLLCHSSKPKLDTLQKPYVHKEKRVLSCTSGQNGGW

SEQ ID NO: 592 - protein, 778 aa, Homo sapiens
MAFSGIYKLDDGKPYLNNCFPARNLLRVPEEGQGHWLVVQKGNLKKKPKGLVGAQAERRESLKATSFEFKGKKESRRENQVDLPGHILDQAFLLKHHCVRKPSDLCTINAKENDFKHFHSVIYINASENLLPLEAFHTFPALKELDLAFNGIKTIYVKYGDFKLLEFLDLSFNSLTVEAICDLGILPHLRVLLLTGNGLTSLPPNLAVAEQEASVTSLTSKRYILRFPALETLMLDDNRLSNPSCFASLAGLRRLKKLSLDENRIIRIPYLQQVQLYDESVDWNGGRGSPHKEPQFMLQSKPRMLEDSDEQLDYTVLPMKKDVDRTTTKICSLPPIFEILPVKSLKARNQTLAPPFPELRYLSLAYNKIAKEDAVLPVALFPSLCEFVFHNNPLVAHTRGVPPLLKSFLQERLGIHLIRRKIVKPKHHVLMSRKESWKVKSEIPKVPKQPLVLHHPRMTTTKSPSKDMLEPEAELAEDLPTTKSTSVESEMPTENLEGHSPSCRTFVPLPPICSNSTVHSEETLSHLSDTTVRLSPERPSDEDSKSTESIFLTQVSELPSSVIHKDDLELKEKDQKKPPTAPREVKGTRRKLPTAFLPSKYHGYEELLTAKPDPAFIEPKGIQKNAQALQQMLKHPLLCHSSKPKLDTLQKPYVHKEKRAQRIPIPPPKKTRAQLLDDIFIRLRDPRNITEAPLGAVLHQWTERRLVNHKQYLEAKRLLKEFQARYRQLVSGSLRTVFGTTPLPMACPALSESQPKFGHFLEFMDEFCQEPTASDSQG

SEQ ID NO: 593 - protein, 736 aa, Homo sapiens
MAFSGIYKLDDGKPYLNNCFPARNLLRVPEEGQGHWLVVQKGNLKKKPKGLVGAQAERRESLKATSFEFKGKKESRRENQVDLPGHILDQAFLLKHHCVRKPSDLCTINAKENDFKHFHSVIYINASENLLPLEAFHTFPALKELDLAFNGIKTIYVKYGDFKLLEFLDLSFNSLTVEAICDLGILPHLRVLLLTGNGLTSLPPNLAVAEQEASVTSLTSKRYILRFPALETLMLDDNRLSNPSCFASLAGLRRLKKLSLDENRIIRIPYLQQVQLYDESVDWNGGRGSPHKEPQFMLQSKPRMLEDSDEQLDYTVLPMKKDVDRTIAKEDAVLPVALFPSLCEFVFHNNPLVAHTRGVPPLLKSFLQERLGIHLIRRKIVKPKHHVLMSRKESWKVKSEIPKVPKQPLVLHHPRMTTTKSPSKDMLEPEAELAEDLPTTKSTSVESEMPTENLEGHSPSCRTFVPLPPICSNSTVHSEETLSHLSDTTVRLSPERPSDEDSKSTESIFLTQVSELPSSVIHKDDLELKEKDQKKPPTAPREVKGTRRKLPTAFLPSKYHGYEELLTAKPDPAFIEPKGIQKNAQALQQMLKHPLLCHSSKPKLDTLQKPYVHKEKRAQRIPIPPPKKTRAQLLDDIFIRLRDPRNITEAPLGAVLHQWTERRLVNHKQYLEAKRLLKEFQARYRQLVSGSLRTVFGTTPLPMACPALSESQPKFGHFLEFMDEFCQEPTASDSQG

SEQ ID NO: 594 - protein, 517 aa, Homo sapiens
MLDDNRLSNPSCFASLAGLRRLKKLSLDENRIIRIPYLQQVQLYDESVDWNGGRGSPHKEPQFMLQSKPRMLEDSDEQLDYTVLPMKKDVDRTEVVFSSYPGFSTSEIAKEDAVLPVALFPSLCEFVFHNNPLVAHTRGVPPLLKSFLQERLGIHLIRRKIVKPKHHVLMSRKESWKVKSEIPKVPKQPLVLHHPRMTTTKSPSKDMLEPEAELAEDLPTTKSTSVESEMPTENLEGHSPSCRTFVPLPPICSNSTVHSEETLSHLSDTTVRLSPERPSDEDSKSTESIFLTQVSELPSSVIHKDDLELKEKDQKKPPTAPREVKGTRRKLPTAFLPSKYHGYEELLTAKPDPAFIEPKGIQKNAQALQQMLKHPLLCHSSKPKLDTLQKPYVHKEKRAQRIPIPPPKKTRAQLLDDIFIRLRDPRNITEAPLGAVLHQWTERRLVNHKQYLEAKRLLKEFQARYRQLVSGSLRTVFGTTPLPMACPALSESQPKFGHFLEFMDEFCQEPTASDSQG

SEQ ID NO: 595 - protein, 314 aa, Homo sapiens
MNSGVPATLAVRRVKFFGQHGGEVNSSAFSPDGQMLLTGSEDGCVYGWETRSGQLLWRLGGHTGPVKFCRFSPDGHLFASASCDCTVRLWDVARAKCLRVLKGHQRSVETVSFSPDSRQLASGGWDKRVMLWDVQSGQMLRLLVGHRDSIQSSDFSPTVNCLATGSWDSTVHIWDLRMVTPAVSHQALEGHSANISCLCYSASGLLASGSWDKTIHIWKPTTSSLLIQLKGHVTWVKSIAFSPDELWLASAGYSRMVKVWDCNTGKCLETLKGVLDVAHTCAFTPDGKILVSGAADQTRRQISRTSKSPRDPQT

SEQ ID NO: 596 - protein, 922 aa, Homo sapiens
MATASPRSDTSNNHSGRLQLQVTVSSAKLKRKKNWFGTAIYTEVVVDGEITKTAKSSSSSNPKWDEQLTVNVTPQTTLEFQVWSHRTLKADALLGKATIDLKQALLIHNRKLERVKEQLKLSLENKNGIAQTGELTVVLDGLVIEQENITNCSSSPTIEIQENGDALHENGEPSARTTARLAVEGTNGIDNHVPTSTLVQNSCCSYVVNGDNTPSSPSQVAARPKNTPAPKPLASEPADDTVNGESSSFAPTDNASVTGTPVVSEENALSPNCTSTTVEDPPVQEILTSSENNECIPSTSAELESEARSILEPDTSNSRSSSAFEAAKSRQPDGCMDPVRQQSGNANTETLPSGWEQRKDPHGRTYYVDHNTRTTTWERPQPLPPGWERRVDDRRRVYYVDHNTRTTTWQRPTMESVRNFEQWQSQRNQLQGAMQQFNQRYLYSASMLAAENDPYGPLPPGWEKRVDSTDRVYFVNHNTKTTQWEDPRTQGLQNEEPLPEGWEIRYTREGVRYFVDHNTRTTTFKDPRNGKSSVTKGGPQIAYERGFRWKLAHFRYLCQSNALPSHVKINVSRQTLFEDSFQQIMALKPYDLRRRLYVIFRGEEGLDYGGLAREWFFLLSHEVLNPMYCLFEYAGKNNYCLQINPASTINPDHLSYFCFIGRFIAMALFHGKFIDTGFSLPFYKRMLSKKLTIKDLESIDTEFYNSLIWIRDNNIEECGLEMYFSVDMEILGKVTSHDLKLGGSNILVTEENKDEYIGLMTEWRFSRGVQEQTKAFLDGFNEVVPLQWLQYFDEKELEVMLCGMQEVDLADWQRNTVYRHYTRNSKQIIWFWQFVKETDNEVRMRLLQFVTGTCRLPLGGFAELMGSNGPQKFCIEKVGKDTWLPRSHTCFNRLDLPPYKSYEQLKEKLLFAIEETEGFGQE

SEQ ID NO: 597 - protein, 120 aa, Homo sapiens
MATASPRSDTSNNHSGRLQLQVTVSSAKLKRKKNWFGTAIYTEVVVDGEITKTAKSSSSSNPKWDEQLTVNVTPQTTLEFQVWSHRTLKADALLGKATIDLKQALLIHNRKCWLLKARME

SEQ ID NO: 598 - protein, 792 aa, Homo sapiens
MATASPRSDTSNNHSGRLQLQVTVSSAKLKRKKNWFGTAIYTEVVVDGEITKTAKSSSSSNPKWDEQLTVNVTPQTTLEFQVWSHRTLKADALLGKATIDLKQALLIHNRKFNGESSSFAPTDNASVTGTPVVSEENALSPNCTSTTVEDPPVQEILTSSENNECIPSTSAELESEARSILEPDTSNSRSSSAFEAAKSRQPDGCMDPVRQQSGNANTETLPSGWEQRKDPHGRTYYVDHNTRTTTWERPQPLPPGWERRVDDRRRVYYVDHNTRTTTWQRPTMESVRNFEQWQSQRNQLQGAMQQFNQRYLYSASMLAAENDPYGPLPPGWEKRVDSTDRVYFVNHNTKTTQWEDPRTQGLQNEEPLPEGWEIRYTREGVRYFVDHNTRTTTFKDPRNGKSSVTKGGPQIAYERGFRWKLAHFRYLCQSNALPSHVKINVSRQTLFEDSFQQIMALKPYDLRRRLYVIFRGEEGLDYGGLAREWFFLLSHEVLNPMYCLFEYAGKNNYCLQINPASTINPDHLSYFCFIGRFIAMALFHGKFIDTGFSLPFYKRMLSKKLTIKDLESIDTEFYNSLIWIRDNNIEECGLEMYFSVDMEILGKVTSHDLKLGGSNILVTEENKDEYIGLMTEWRFSRGVQEQTKAFLDGFNEVVPLQWLQYFDEKELEVMLCGMQEVDLADWQRNTVYRHYTRNSKQIIWFWQFVKETDNEVRMRLLQFVTGTCRLPLGGFAELMGSNGPQKFCIEKVGKDTWLPRSHTCFNRLDLPPYKSYEQLKEKLLFAIEETEGFGQE

SEQ ID NO: 599 - protein, 704 aa, Homo sapiens
MATASPRSDTSNNHSGRLQLQVTVNGESSSFAPTDNASVTGTPVVSEENALSPNCTSTTVEDPPVQEILTSSENNECIPSTSAELESEARSILEPDTSNSRSSSAFEAAKSRQPDGCMDPVRQQSGNANTETLPSGWEQRKDPHGRTYYVDHNTRTTTWERPQPLPPGWERRVDDRRRVYYVDHNTRTTTWQRPTMESVRNFEQWQSQRNQLQGAMQQFNQRYLYSASMLAAENDPYGPLPPGWEKRVDSTDRVYFVNHNTKTTQWEDPRTQGLQNEEPLPEGWEIRYTREGVRYFVDHNTRTTTFKDPRNGKSSVTKGGPQIAYERGFRWKLAHFRYLCQSNALPSHVKINVSRQTLFEDSFQQIMALKPYDLRRRLYVIFRGEEGLDYGGLAREWFFLLSHEVLNPMYCLFEYAGKNNYCLQINPASTINPDHLSYFCFIGRFIAMALFHGKFIDTGFSLPFYKRMLSKKLTIKDLESIDTEFYNSLIWIRDNNIEECGLEMYFSVDMEILGKVTSHDLKLGGSNILVTEENKDEYIGLMTEWRFSRGVQEQTKAFLDGFNEVVPLQWLQYFDEKELEVMLCGMQEVDLADWQRNTVYRHYTRNSKQIIWFWQFVKETDNEVRMRLLQFVTGTCRLPLGGFAELMGSNGPQKFCIEKVGKDTWLPRSHTCFNRLDLPPYKSYEQLKEKLLFAIEETEGFGQE

SEQ ID NO: 600 - protein, 397 aa, Homo sapiens
MSWLFPLTKSASSSAAGSPGGLTSLQQQKQRLIESLRNSHSSIAEIQKDVEYRLPFTINNLTININILLPPQFPQEKPVISVYPPIRHHLMDKQGVYVTSPLVNNFTMHSDLGKIIQSLLDEFWKNPPVLAPTSTAFPYLYSNPSGMSPYASQGFPFLPPYPPQEANRSITSLSVADTVSSSTTSHTTAKPAAPSFGVLSNLPLPIPTVDASIPTSQNGFGYKMPDVPDAFPELSELSVSQLTDMNEQEEVLLEQFLTLPQLKQIITDKDDLVKSIEELARKNLLLEPSLEAKRQTVLDKYELLTQMKSTFEKKMQRQHELSESCSASALQARLKVAAHEAEEESDNIAEDFLEGKMEIDDFLSSFMEKRTICHCRRAKEEKLQQAIAMHSQFHAPL

SEQ ID NO: 601 - protein, 372 aa, Homo sapiens
MSWLFPLTKSASSSAAGSPGGLTSLQQQKQRLIESLRNSHSRLLPPQFPQEKPVISVYPPIRHHLMDKQGVYVTSPLVNNFTMHSDLGKIIQSLLDEFWKNPPVLAPTSTAFPYLYSNPSGMSPYASQGFPFLPPYPPQEANRSITSLSVADTVSSSTTSHTTAKPAAPSFGVLSNLPLPIPTVDASIPTSQNGFGYKMPDVPDAFPELSELSVSQLTDMNEQEEVLLEQFLTLPQLKQIITDKDDLVKSIEELARKNLLLEPSLEAKRQTVLDKYELLTQMKSTFEKKMQRQHELSESCSASALQARLKVAAHEAEEESDNIAEDFLEGKMEIDDFLSSFMEKRTICHCRRAKEEKLQQAIAMHSQFHAPL

SEQ ID NO: 602 - protein, 185 aa, Homo sapiens
MSWLFPLTKSASSSAAGSPGGLTSLQQQKQRLIESLRNSHSSIAEIQKDVEYRLPFTINNLTININILLPPQFPQEKPVISVYPPIRHHLMDKQGVYVTSPLVNNFTMHSDLGKIIQSLLDEFWKNPPVLAPTSTAFPYQLEIRWHHPHCLEISLARSSNSLGFSISSSISSTRSKQEYHFFICC

SEQ ID NO: 603 - protein, 2723 aa, Homo sapiens
MADEEAEQERLSCGEGGCVAELQRLGERLQELELQLRESRVPAVEAATDYCQQLCQTLLEYAEKWKTSEDPLPLLEVYTVAIQSYVKARPYLTSECENVALVLERLALSCVELLLCLPVELSDKQWEQFQTLVQVAHEKLMENGSCELHFLATLAQETGVWKNPVLCTILSQEPLDKDKVNEFLAFEGPILLDMRIKHLIKTNQLSQATALAKLCSDHPEIGIKGSFKQTYLVCLCTSSPNGKLIEEISEVDCKDALEMICNLESEGDEKSALVLCTAFLSRQLQQGDMYCAWELTLFWSKLQQRVEPSIQVYLERCRQLSLLTKTVYHIFFLIKVINSETEGAGLATCIELCVKALRLESTENTEVKISICKTISCLLPDDLEVKRACQLSEFLIEPTVDAYYAVEMLYNQPDQKYDEENLPIPNSLRCELLLVLKTQWPFDPEFWDWKTLKRQCLALMGEEASIVSSIDELNDSEVYEKVVDYQEESKETSMNGLSGGVGANSGLLKDIGDEKQKKREIKQLRERGFISARFRNWQAYMQYCVLCDKEFLGHRIVRHAQKHYKDGIYSCPICAKNFNSKETFVPHVTLHVKQSSKERLAAMKPLRRLGRPPKITTTNENQKTNTVAKQEQRPIKKNSLYSTDFIVFNDNDGSDDENDDKDKSYEPEVIPVQKPVPVNEFNCPVTFCKKGFKYFKNLIAHVKGHKDNEDAKRFLEMQSKKVICQYCRRHFVSVTHLNDHLQMHCGSKPYICIQMKCKAGFNSYAELLTHRKEHQVFRAKCMFPKCGRIFSEAYLLYDHEAQHYNTYTCKFTGCGKVYRSQGELEKHLDDHSTPPEKVLPPEAQLNSSGDSIQPSEVNQNTAENIEKERSMLPSENNIENSLLADRSDAWDKSKAESAVTKQDQISASELRQANGPLSNGLENPATTPLLQSSEVAVSIKVSLNQGIEDNFGKQENSTVEGSGEALVTDLHTPVEDTCNDLCHPGFQERKEQDCFNDAHVTQNSLVNSETLKIGDLTPQNLERQVNNLMTFSVQNQAAFQNNLPTSKFECGDNVKTSSNLYNLPLKTLESIAFVPPQSDLSNSLGTPSVPPKAPVQKFSCQVEGCTRTYNSSQSIGKHMKTAHPDQYAAFKMQRKSKKGQKANNLNTPNNGKFVYFLPSPVNSSNPFFTSQTKANGNPACSAQLQHVSPPIFPAHLASVSTPLLSSMESVINPNITSQDKNEQGGMLCSQMENLPSTALPAQMEDLTKTVLPLNIDSGSDPFLPLPAESSSMSLFPSPADSGTNSVFSQLENNTNHYSSQIEGNTNSSFLKGGNGENAVFPSQVNVANNFSSTNAQQSAPEKVKKDRGRGPNGKERKPKHNKRAKWPAIIRDGKFICSRCYRAFTNPRSLGGHLSKRSYCKPLDGAEIAQELLQSNGQPSLLASMILSTNAVNLQQPQQSTFNPEACFKDPSFLQLLAENRSPAFLPNTFPRSGVTNFNTSVSQEGSEIIKQALETAGIPSTFEGAEMLSHVSTGCVSDASQVNATVMPNPTVPPLLHTVCHPNTLLTNQNRTSNSKTSSIEECSSLPVFPTNDLLLKTVENGLCSSSFPNSGGPSQNFTSNSSRVSVISGPQNTRSSHLNKKGNSASKRRKKVAPPLIAPNASQNLVTSDLTTMGLIAKSVEIPTTNLHSNVIPTCEPQSLVENLTQKLNNVNNQLFMTDVKENFKTSLESHTVLAPLTLKTENGDSQMMALNSCTTSINSDLQISEDNVIQNFEKTLEIIKTAMNSQILEVKSGSQGAGETSQNAQINYNIQLPSVNTVQNNKLPDSSPFSSFISVMPTKSNIPQSEVSHKEDQIQEILEGLQKLKLENDLSTPASQCVLINTSVTLTPTPVKSTADITVIQPVSEMINIQFNDKVNKPFVCQNQGCNYSAMTKDALFKHYGKIHQYTPEMILEIKKNQLKFAPFKCVVPTCTKTFTRNSNLRAHCQLVHHFTTEEMVKLKIKRPYGRKSQSENVPASRSTQVKKQLAMTEENKKESQPALELRAETQNTHSNVAVIPEKQLVEKKSPDKTESSLQVITVTSEQCNTNALTNTQTKGRKIRRHKKEKEEKKRKKPVSQSLEFPTRYSPYRPYRCVHQGCFAAFTIQQNLILHYQAVHKSDLPAFSAEVEEESEAGKESEETETKQTLKEFRCQVSDCSRIFQAITGLIQHYMKLHEMTPEEIESMTASVDVGKFPCDQLECKSSFTTYLNYVVHLEADHGIGLRASKTEEDGVYKCDCEGCDRIYATRSNLLRHIFNKHNDKHKAHLIRPRRLTPGQENMSSKANQEKSKSKHRGTKHSRCGKEGIKMPKTKRKKKNNLENKNAKIVQIEENKPYSLKRGKHVYSIKARNDALSECTSRFVTQYPCMIKGCTSVVTSESNIIRHYKCHKLSKAFTSQHRNLLIVFKRCCNSQVKETSEQEGAKNDVKDSDTCVSESNDNSRTTATVSQKEVEKNEKDEMDELTELFITKLINEDSTSVETQANTSSNVSNDFQEDNLCQSERQKASNLKRVNKEKNVSQNKKRKVEKAEPASAAELSSVRKEEETAVAIQTIEEHPASFDWSSFKPMGFEVSFLKFLEESAVKQKKNTDKDHPNTGNKKGSHSNSRKNIDKTAVTSGNHVCPCKESETFVQFANPSQLQCSDNVKIVLDKNLKDCTELVLKQLQEMKPTVSLKKLEVHSNDPDMSVMKDISIGKATGRGQY

SEQ ID NO: 604 - protein, 2578 aa, Homo sapiens
MENGSCELHFLATLAQETGVWKNPVLCTILSQEPLDKDKAFEGPILLDMRIKHLIKTNQLSQATALAKLCSDHPEIGIKGSFKQTYLVCLCTSSPNGKLIEEISEVDCKDALEMICNLESEGDEKSALVLCTAFLSRQLQQGDMYCAWELTLFWSKLQQRVEPSIQVYLERCRQLSLLTKTVYHIFFLIKVINSETEGAGLATCIELCVKALRLESTENTEVKISICKTISCLLPDDLEVKRACQLSEFLIEPTVDAYYAVEMLYNQPDQKYDEENLPIPNSLRCELLLVLKTQWPFDPEFWDWKTLKRQCLALMGEEASIVSSIDELNDSEVYEKVVDYQEESKETSMNGLSGGVGANSGLLKDIGDEKQKKREIKQLRERGFISARFRNWQAYMQYCVLCDKEFLGHRIVRHAQKHYKDGIYSCPICAKNFNSKETFVPHVTLHVKQSSKERLAAMKPLRRLGRPPKITTTNENQKTNTVAKQEQRPIKKNSLYSTDFIVFNDNDGSDDENDDKDKSYEPEVIPVQKPVPVNEFNCPVTFCKKGFKYFKNLIAHVKGHKDNEDAKRFLEMQSKKVICQYCRRHFVSVTHLNDHLQMHCGSKPYICIQMKCKAGFNSYAELLTHRKEHQVFRAKCMFPKCGRIFSEAYLLYDHEAQHYNTYTCKFTGCGKVYRSQGELEKHLDDHSTPPEKVLPPEAQLNSSGDSIQPSEVNQNTAENIEKERSMLPSENNIENSLLADRSDAWDKSKAESAVTKQDQISASELRQANGPLSNGLENPATTPLLQSSEVAVSIKVSLNQGIEDNFGKQENSTVEGSGEALVTDLHTPVEDTCNDLCHPGFQERKEQDCFNDAHVTQNSLVNSETLKIGDLTPQNLERQVNNLMTFSVQNQAAFQNNLPTSKFECGDNVKTSSNLYNLPLKTLESIAFVPPQSDLSNSLGTPSVPPKAPVQKFSCQVEGCTRTYNSSQSIGKHMKTAHPDQYAAFKMQRKSKKGQKANNLNTPNNGKFVYFLPSPVNSSNPFFTSQTKANGNPACSAQLQHVSPPIFPAHLASVSTPLLSSMESVINPNITSQDKNEQGGMLCSQMENLPSTALPAQMEDLTKTVLPLNIDSGSDPFLPLPAESSSMSLFPSPADSGTNSVFSQLENNTNHYSSQIEGNTNSSFLKGGNGENAVFPSQVNVANNFSSTNAQQSAPEKVKKDRGRGPNGKERKPKHNKRAKWPAIIRDGKFICSRCYRAFTNPRSLGGHLSKRSYCKPLDGAEIAQELLQSNGQPSLLASMILSTNAVNLQQPQQSTFNPEACFKDPSFLQLLAENRSPAFLPNTFPRSGVTNFNTSVSQEGSEIIKQALETAGIPSTFEGAEMLSHVSTGCVSDASQVNATVMPNPTVPPLLHTVCHPNTLLTNQNRTSNSKTSSIEECSSLPVFPTNDLLLKTVENGLCSSSFPNSGGPSQNFTSNSSRVSVISGPQNTRSSHLNKKGNSASKRRKKVAPPLIAPNASQNLVTSDLTTMGLIAKSVEIPTTNLHSNVIPTCEPQSLVENLTQKLNNVNNQLFMTDVKENFKTSLESHTVLAPLTLKTENGDSQMMALNSCTTSINSDLQISEDNVIQNFEKTLEIIKTAMNSQILEVKSGSQGAGETSQNAQINYNIQLPSVNTVQNNKLPDSSPFSSFISVMPTKSNIPQSEVSHKEDQIQEILEGLQKLKLENDLSTPASQCVLINTSVTLTPTPVKSTADITVIQPVSEMINIQFNDKVNKPFVCQNQGCNYSAMTKDALFKHYGKIHQYTPEMILEIKKNQLKFAPFKCVVPTCTKTFTRNSNLRAHCQLVHHFTTEEMVKLKIKRPYGRKSQSENVPASRSTQVKKQLAMTEENKKESQPALELRAETQNTHSNVAVIPEKQLVEKKSPDKTESSLQVITVTSEQCNTNALTNTQTKGRKIRRHKKEKEEKKRKKPVSQSLEFPTRYSPYRPYRCVHQGCFAAFTIQQNLILHYQAVHKSDLPAFSAEVEEESEAGKESEETETKQTLKEFRCQVSDCSRIFQAITGLIQHYMKLHEMTPEEIESMTASVDVGKFPCDQLECKSSFTTYLNYVVHLEADHGIGLRASKTEEDGVYKCDCEGCDRIYATRSNLLRHIFNKHNDKHKAHLIRPRRLTPGQENMSSKANQEKSKSKHRGTKHSRCGKEGIKMPKTKRKKKNNLENKNAKIVQIEENKPYSLKRGKHVYSIKARNDALSECTSRFVTQYPCMIKGCTSVVTSESNIIRHYKCHKLSKAFTSQHRNLLIVFKRCCNSQVKETSEQEGAKNDVKDSDTCVSESNDNSRTTATVSQKEVEKNEKDEMDELTELFITKLINEDSTSVETQANTSSNVSNDFQEDNLCQSERQKASNLKRVNKEKNVSQNKKRKVEKAEPASAAELSSVRKEEETAVAIQTIEEHPASFDWSSFKPMGFEVSFLKFLEESAVKQKKNTDKDHPNTGNKKGSHSNSRKNIDKTAVTSGNHVCPCKESETFVQFANPSQLQCSDNVKIVLDKNLKDCTELVLKQLQEMKPTVSLKKLEVHSNDPDMSVMKDISIGKATGRGQY

SEQ ID NO: 605 - protein, 540 aa, Homo sapiens
MAAGGSAPEPRVLVCLGALLAGWVAVGLEAVVIGEVHENVTLHCGNISGLRGQVTWYRNNSEPVFLLSSNSSLRPAEPRFSLVDATSLHIESLSLGDEGIYTCQEILNVTQWFQVWLQVASGPYQIEVHIVATGTLPNGTLYAARGSQVDFSCNSSSRPPPVVEWWFQALNSSSESFGHNLTVNFFSLLLISPNLQGNYTCLALNQLSKRHRKVTTELLVYYPPPSAPQCWAQMASGSFMLQLTCRWDGGYPDPDFLWIEEPGGVIVGKSKLGVEMLSESQLSDGKKFKCVTSHIVGPESGASCMVQIRGPSLLSEPMKTCFTGGNVTLTCQVSGAYPPAKILWLRNLTQPEVIIQPSSRHLITQDGQNSTLTIHNCSQDLDEGYYICRADSPVGVREMEIWLSVKEPLNIGGIVGTIVSLLLLGLAIISGLLLHYSPVFCWKVGNTSRGQNMDDVMVLVDSEEEEEEEEEEEEDAAVGEQEGAREREELPKEIPKQDHIHRVTALVNGNIEQMGNGFQDLQDDSSEEQSDIVQEEDRPV

SEQ ID NO: 606 - protein, 538 aa, Homo sapiens
MAAGGSAPEPRVLVCLGALLAGWVAVGLEAVVIGEVHENVTLHCGNISGLRGQVTWYRNNSEPVFLLSSNSSLRPAEPRFSLVDATSLHIESLSLGDEGIYTCQEILNVTQWFQVWLQVASGPYQIEVHIVATGTLPNGTLYAARGSQVDFSCNSSSRPPPVVEWWFQALNSSSESFGHNLTVNFFSLLLISPNLQGNYTCLALNQLSKRHRKVTTELLVYYPPPSAPQCWAQMASGSFMLQLTCRWDGGYPDPDFLWIEEPGGVIVGKSKLGVEMLSESQLSDGKKFKCVTSHIVGPESGASCMVQIRGPSLLSEPMKTCFTGGNVTLTCQVSGAYPPAKILWLRNLTQPEVIIQPSSRHLITQDGQNSTLTIHNCSQDLDEGYYICRADSPVGVREMEIWLSVKEPLNIGGIVGTIVSLLLLGLAIISGLLLHYSPVFCWKVGNTSRGQNMDDVMVLVDSEEEEEEEEEEDAAVGEQEGAREREELPKEIPKQDHIHRVTALVNGNIEQMGNGFQDLQDDSSEEQSDIVQEEDRPV

SEQ ID NO: 607 - protein, 336 aa, Homo sapiens
MSFFGFGQSVEVEILLNDAESRKRAEHKTEDGKKEKYFLFYDGETVSGKVSLALKNPNKRLEHQGIKIEFIGQIELYYDRGNHHEFVSLVKDLARPGEITQSQAFDFEFTHVEKPYESYTGQNVKLRYFLRATISRRLNDVVKEMDIVVHTLSTYPELNSSIKMEVGIEDCLHIEFEYNKSKYHLKDVIVGKIYFLLVRIKIKHMEIDIIKRETTGTGPNVYHENDTIAKYEIMDGAPVRGESIPIRLFLAGYELTPTMRDINKKFSVRYYLNLVLIDEEERRYFKQQEVVLWRKGDIVRKSMSHQAAIASQRFEGTTSLGEVRTPSQLSDNNCRQ

SEQ ID NO: 608 - protein, 358 aa, Homo sapiens
MAVKWTGGHSSPVLCLNASKEGLLASGAEGGDLTAWGEDGTPLGHTRFQGADDVTSVLFSPSCPTKLYASHGETISVLDVRSLKDSLDHFHVNEEEINCLSLNQTENLLASADDSGAIKILDLENKKVIRSLKRHSNICSSVAFRPQRPQSLVSCGLDMQVMLWSLQKARPLWITNLQEDETEEMEGPQSPGQLLNPALAHSISVASCGNIFSCGAEDGKVRIFRVMGVKCEQELGFKGHTSGVSQVCFLPESYLLLTGGNDGKITLWDANSEVEKKQKSPTKRTHRKKPKRGTCTKQGGNTNASVTDEEEHGNILPKLNIEHGEKVNWLLGTKIKGHQNILVADQTSCISVYPLNEF

SEQ ID NO: 609 - protein, 1087 aa, Homo sapiens
MADHVQSLAQLENLCKQLYETTDTTTRLQAEKALVEFTNSPDCLSKCQLLLERGSSSYSQLLAATCLTKLVSRTNNPLPLEQRIDIRNYVLNYLATRPKLATFVTQALIQLYARITKLGWFDCQKDDYVFRNAITDVTRFLQDSVEYCIIGVTILSQLTNEINQADTTHPLTKHRKIASSFRDSSLFDIFTLSCNLLKQASGKNLNLNDESQHGLLMQLLKLTHNCLNFDFIGTSTDESSDDLCTVQIPTSWRSAFLDSSTLQLFFDLYHSIPPSFSPLVLSCLVQIASVRRSLFNNAERAKFLSHLVDGVKRILENPQSLSDPNNYHEFCRLLARLKSNYQLGELVKVENYPEVIRLIANFTVTSLQHWEFAPNSVHYLLSLWQRLAASVPYVKATEPHMLETYTPEVTKAYITSRLESVHIILRDGLEDPLEDTGLVQQQLDQLSTIGRCEYEKTCALLVQLFDQSAQSYQELLQSASASPMDIAVQEGRLTWLVYIIGAVIGGRVSFASTDEQDAMDGELVCRVLQLMNLTDSRLAQAGNEKLELAMLSFFEQFRKIYIGDQVQKSSKLYRRLSEVLGLNDETMVLSVFIGKIITNLKYWGRCEPITSKTLQLLNDLSIGYSSVRKLVKLSAVQFMLNNHTSEHFSFLGINNQSNLTDMRCRTTFYTALGRLLMVDLGEDEDQYEQFMLPLTAAFEAVAQMFSTNSFNEQEAKRTLVGLVRDLRGIAFAFNAKTSFMMLFEWIYPSYMPILQRAIELWYHDPACTTPVLKLMAELVHNRSQRLQFDVSSPNGILLFRETSKMITMYGNRILTLGEVPKDQVYALKLKGISICFSMLKAALSGSYVNFGVFRLYGDDALDNALQTFIKLLLSIPHSDLLDYPKLSQSYYSLLEVLTQDHMNFIASLEPHVIMYILSSISEGLTALDTMVCTGCCSCLDHIVTYLFKQLSRSTKKRTTPLNQESDRFLHIMQQHPEMIQQMLSTVLNIIIFEDCRNQWSMSRPLLGLILLNEKYFSDLRNSIVNSQPPEKQQAMHLCFENLMEGIERNLLTKNRDRFTQNLSAFRREVNDSMKNSTYGVNSNDMMS

SEQ ID NO: 610 - protein, 1125 aa, Homo sapiens
MASEEASLRALESLMTEFFHDCTTNERKREIEELLNNFAQQIGAWRFCLYFLSSTRNDYVMMYSLTVFENLINKMWLGVPSQDKMEIRSCLPKLLLAHHKTLPYFIRNKLCKVIVDIGRQDWPMFYHDFFTNILQLIQSPVTTPLGLIMLKTTSEELACPREDLSVARKEELRKLLLDQVQTVLGLLTGILETVWDKHSVTAATPPPSPTSGESGDLLSNLLQSPSSAKLLNQPIPILDVESEYICSLALECLAHLFSWIPLSASITPSLLTTIFHFARFGCDIRARKMASVNGSSQNCVSGQERGRLGVLAMSCINELMSKNCVPMEFEEYLLRMFQQTFYLLQKITKDNNAHTVKSRLEELDESYIEKFTDFLRLFVSVHLRRIESYSQFPVVEFLTLLFKYTFHQPTHEGYFSCLDIWTLFLDYLTSKIKSRLGDKEAVLNRYEDALVLLLTEVLNRIQFRYNQAQLEELDDETLDDDQQTEWQRYLRQSLEVVAKVMELLPTHAFSTLFPVLQDNLEVYLGLQQFIVTSGSGHRLNITAENDCRRLHCSLRDLSSLLQAVGRLAEYFIGDVFAARFNDALTVVERLVKVTLYGSQIKLYNIETAVPSVLKPDLIDVHAQSLAALQAYSHWLAQYCSEVHRQNTQQFVTLISTTMDAITPLISTKVQDKLLLSACHLLVSLATTVRPVFLISIPAVQKVFNRITDASALRLVDKAQVLVCRALSNILLLPWPNLPENEQQWPVRSINHASLISALSRDYRNLKPSAVAPQRKMPLDDTKLIIHQTLSVLEDIVENISGESTKSRQICYQSLQESVQVSLALFPAFIHQSDVTDEMLSFFLTLFRGLRVQMGVPFTEQIIQTFLNMFTREQLAESILHEGSTGCRVVEKFLKILQVVVQEPGQVFKPFLPSIIALCMEQVYPIIAERPSPDVKAELFELLFRTLHHNWRYFFKSTVLASVQRGIAEEQMENEPQFSAIMQAFGQSFLQPDIHLFKQNLFYLETLNTKQKLYHKKIFRTAMLFQFVNVLLQVLVHKSHDLLQEEIGIAIYNMASVDFDGFFAAFLPEFLTSCDGVDANQKSVLGRNFKMDRDLPSFTQNVHRLVNDLRYYRLCNDSLPPGTVKL

SEQ ID NO: 611 - protein, 1111 aa, Homo sapiens
MTEFFHDCTTNERKREIEELLNNFAQQIGAWRFCLYFLSSTRNDYVMMYSLTVFENLINKMWLGVPSQDKMEIRSCLPKLLLAHHKTLPYFIRNKLCKVIVDIGRQDWPMFYHDFFTNILQLIQSPVTTPLGLIMLKTTSEELACPREDLSVARKEELRKLLLDQVQTVLGLLTGILETVWDKHSVTAATPPPSPTSGESGDLLSNLLQSPSSAKLLNQPIPILDVESEYICSLALECLAHLFSWIPLSASITPSLLTTIFHFARFGCDIRARKMASVNGSSQNCVSGQERGRLGVLAMSCINELMSKNCVPMEFEEYLLRMFQQTFYLLQKITKDNNAHTVKSRLEELDESYIEKFTDFLRLFVSVHLRRIESYSQFPVVEFLTLLFKYTFHQPTHEGYFSCLDIWTLFLDYLTSKIKSRLGDKEAVLNRYEDALVLLLTEVLNRIQFRYNQAQLEELDDETLDDDQQTEWQRYLRQSLEVVAKVMELLPTHAFSTLFPVLQDNLEVYLGLQQFIVTSGSGHRLNITAENDCRRLHCSLRDLSSLLQAVGRLAEYFIGDVFAARFNDALTVVERLVKVTLYGSQIKLYNIETAVPSVLKPDLIDVHAQSLAALQAYSHWLAQYCSEVHRQNTQQFVTLISTTMDAITPLISTKVQDKLLLSACHLLVSLATTVRPVFLISIPAVQKVFNRITDASALRLVDKAQVLVCRALSNILLLPWPNLPENEQQWPVRSINHASLISALSRDYRNLKPSAVAPQRKMPLDDTKLIIHQTLSVLEDIVENISGESTKSRQICYQSLQESVQVSLALFPAFIHQSDVTDEMLSFFLTLFRGLRVQMGVPFTEQIIQTFLNMFTREQLAESILHEGSTGCRVVEKFLKILQVVVQEPGQVFKPFLPSIIALCMEQVYPIIAERPSPDVKAELFELLFRTLHHNWRYFFKSTVLASVQRGIAEEQMENEPQFSAIMQAFGQSFLQPDIHLFKQNLFYLETLNTKQKLYHKKIFRTAMLFQFVNVLLQVLVHKSHDLLQEEIGIAIYNMASVDFDGFFAAFLPEFLTSCDGVDANQKSVLGRNFKMDRDLPSFTQNVHRLVNDLRYYRLCNDSLPPGTVKL

SEQ ID NO: 612 - protein, 979 aa, Homo sapiens
MGDNPFQPKSNSKMAELFMECEEEELEPWQKKVKEVEDDDDDEPIFVGEISSSKPAISNILNRVNPSSYSRGLKNGALSRGITAAFKPTSQHYTNPTSNPVPASPINFHPESRSSDSSVIVQPFSKPGYITNSSRVVSNKSSELLFDLTQDTGLSHYQGGPTLSMAGMSESSFLSKRPSTSEVNNVNPKKPKPSESVSGANSSAVLPSVKSPSVTSSQAMLAKGTNTSSNQSKNGTPFPRACPKCNIHFNLLDPLKNHMKYCCPDMINNFLGLAKTEFSSTVNKNTTIDSEKGKLIMLVNDFYYGKHEGDVQEEQKTHTTFKCFSCLKILKNNIRFMNHMKHHLELEKQSSESWENHTTCQHCYRQFPTPFQLQCHIESTHTPHEFSTICKICELSFETEHVLLQHMKDNHKPGEMPYVCQVCNYRSSSFSDVETHFRTSHENTKNLLCPFCLKVIKIATPYMHHYMKHQKKGIHRCTKCRLQFLTCKEKMDHKTQHHRTFIKPKQLEGLPPGTKVTIRASVGPLQSGASPTPSISASASTLQLSPPRTKNITAKNPAKSNTSKPNTVKSNASKPNTSKPNGSKSKYKPKISNMQKKQSTLASSNKKSKVNTALRNLRYRRGIHKCIECCSEIKDFANHFPTYVHCSFCRYNTSCSKAYVNHMMSFHSNRPSKRFCIFKKHSENLRGITLVCLNCDFLSDVSGLDNMATHLSQHKTHTCQVVMQKVSVCIPTSEHLSELKKEAPAKEQEPVSKEIARPNMAERETETSNSESKQDKAASSKEKNGCNANSFEGSSTTKSEESITVSDKENETCLADQETGSKNIVSCDSNIGADKVEKKKQIQHVCQEMELKMCQSSENIILSDQIKDHNSSEARFSSKNIKDLRLASDNVSIDQFLRKRHEPESVSSDVSEQGSIHLEPLTPSEVLEYEATEILQKGSGDPSAKTDEVVSDQTDDIPGGNNPSTTEATVDLEDEKERS

SEQ ID NO: 613 - protein, 966 aa, Homo sapiens
MAELFMECEEEELEPWQKKVKEVEDDDDDEPIFVGEISSSKPAISNILNRVNPSSYSRGLKNGALSRGITAAFKPTSQHYTNPTSNPVPASPINFHPESRSSDSSVIVQPFSKPGYITNSSRVVSNKSSELLFDLTQDTGLSHYQGGPTLSMAGMSESSFLSKRPSTSEVNNVNPKKPKPSESVSGANSSAVLPSVKSPSVTSSQAMLAKGTNTSSNQSKNGTPFPRACPKCNIHFNLLDPLKNHMKYCCPDMINNFLGLAKTEFSSTVNKNTTIDSEKGKLIMLVNDFYYGKHEGDVQEEQKTHTTFKCFSCLKILKNNIRFMNHMKHHLELEKQSSESWENHTTCQHCYRQFPTPFQLQCHIESTHTPHEFSTICKICELSFETEHVLLQHMKDNHKPGEMPYVCQVCNYRSSSFSDVETHFRTSHENTKNLLCPFCLKVIKIATPYMHHYMKHQKKGIHRCTKCRLQFLTCKEKMDHKTQHHRTFIKPKQLEGLPPGTKVTIRASVGPLQSGASPTPSISASASTLQLSPPRTKNITAKNPAKSNTSKPNTVKSNASKPNTSKPNGSKSKYKPKISNMQKKQSTLASSNKKSKVNTALRNLRYRRGIHKCIECCSEIKDFANHFPTYVHCSFCRYNTSCSKAYVNHMMSFHSNRPSKRFCIFKKHSENLRGITLVCLNCDFLSDVSGLDNMATHLSQHKTHTCQVVMQKVSVCIPTSEHLSELKKEAPAKEQEPVSKEIARPNMAERETETSNSESKQDKAASSKEKNGCNANSFEGSSTTKSEESITVSDKENETCLADQETGSKNIVSCDSNIGADKVEKKKQIQHVCQEMELKMCQSSENIILSDQIKDHNSSEARFSSKNIKDLRLASDNVSIDQFLRKRHEPESVSSDVSEQGSIHLEPLTPSEVLEYEATEILQKGSGDPSAKTDEVVSDQTDDIPGGNNPSTTEATVDLEDEKERS

SEQ ID NO: 614 - protein, 592 aa, Homo sapiens
MGDNPFQPKSNSKMAELFMECEEEELEPWQKKVKEVEDDDDDEPIFVGEISSSKPAISNILNRVNPSSYSRGLKNGALSRGITAAFKPTSQHYTNPTSNPVPASPINFHPESRSSDSSVIVQPFSKPGYITNSSRVVSNKSSELLFDLTQDTGLSHYQGGPTLSMAGMSESSFLSKRPSTSEVNNVNPKKPKPSESVSGANSSAVLPSVKSPSVTSSQAMLAKGTNTSSNQSKNGTPFPRACPKCNIHFNLLDPLKNHMKYCCPDMINNFLGLAKTEFSSTVNKNTTIDSEKGKLIMLVNDFYYGKHEGDVQEEQKTHTTFKCFSCLKILKNNIRFMNHMKHHLELEKQSSESWENHTTCQHCYRQFPTPFQLQCHIESTHTPHEFSTICKICELSFETEHVLLQHMKDNHKPGEMPYVCQVCNYRSSSFSDVETHFRTSHENTKNLLCPFCLKVIKIATPYMHHYMKHQKKGIHRCTKCRLQFLTCKEKMDHKTQHHRTFIKPKQLEGLPPGTKVTIRASVGPLQSGASPTPSISASASTLQLSPPRTKNITAKNPAKSNTSKPNTVKSNASKPNTSIVGAFTNALSVVPK

SEQ ID NO: 615 - protein, 421 aa, Homo sapiens
MLVNDFYYGKHEGDVQEEQKTHTTFKCFSCLKILKNNIRFMNHMKHHLELEKQSSESWENHTTCQHCYRQFPTPFQLQCHIESTHTPHEFSTICKICELSFETEHVLLQHMKDNHKPGEMPYVCQVCNYRSSSFSDVETHFRTSHENTKNLLCPFCLKVIKIATPYMHHYMKHQKKGIHRCTKCRLQFLTCKEKMDHKTQHHRTFIKPKQLEGLPPGTKVTIRASVGPLQSGASPTPSISASASTLQLSPPRTKNITAKNPAKSNTSKPNTVKSNASKPNTSKPNGSKSKYKPKISNMQKKQSTLASSNKKSKVNTALRNLRYRRGIHKCIECCSEIKDFANHFPTYVHCSFCRYNTSCSKAYVNHMMSFHSNRPSKRFCIFKKHSENLRCVGGQIECDLPKLHKLVVEPRLTLGLLTPNF

SEQ ID NO: 616 - protein, 220 aa, Homo sapiens
MAERETETSNSESKQDKAASSKEKNGCNANSFEGSSTTKSEESITVSDKENETCLADQETGSKNIVSCDSNIGADKVEKKKQIQHVCQEMELKMCQSSENIILSDQIKDHNSSEARFSSKNIKDLRLASDNVSIDQFLRKRHEPESVSSDVSEQGSIHLEPLTPSEVLEYEATEILQKGSGDPSAKTDEVVSDQTDDIPGGNNPSTTEATVDLEDEKERS

SEQ ID NO: 617 - protein, 158 aa, Homo sapiens
MGDNPFQPKSNSKMAELFMECEEEELEPWQKKVKEVEDDDDDEPIFVGEISSSKPAISNILNRVNPSSYSRGLKNGALSRGITAAFKPTSQHYTNPTSNPVPASPINFHPESRSSDSSVIVQPFSKPVSVSKTIRPAQGSIGCCLSISTVPSYNSGLS

SEQ ID NO: 618 - protein, 720 aa, Homo sapiens
MEEAEELLLEGKKALQLAREPRLGLDLGWNPSGEGCTQGLKDVPPEPTRDILALKSLPRGLALGPSLAKEQRLGVWCVGDPLQPGLLWGPLEEESASKEKGEGVKPRQEENLSLGPWGDVCACEQSSGWTSLVQRGRLESEGNVAPVRISERLHLQVYQLVLPGSELLLWPQPSSEGPSLTQPGLDKEAAVAVVTEVESAVQQEVASPGEDAAEPCIDPGSQSPSGIQAENMVSPGLKFPTQDRISKDSQPLGPLLQDGDVDEECPAQAQMPPELQSNSATQQDPDGSGASFSSSARGTQPHGYLAKKLHSPSDQCPPRAKTPEPGAQQSGFPTLSRSPPGPAGSSPKQGRRYRCGECGKAFLQLCHLKKHAFVHTGHKPFLCTECGKSYSSEESFKAHMLGHRGVRPFPCPQCDKAYGTQRDLKEHQVVHSGARPFACDQCGKAFARRPSLRLHRKTHQVPAAPAPCPCPVCGRPLANQGSLRNHMRLHTGEKPFLCPHCGRAFRQRGNLRGHLRLHTGERPYRCPHCADAFPQLPELRRHLISHTGEAHLCPVCGKALRDPHTLRAHERLHSGERPFPCPQCGRAYTLATKLRRHLKSHLEDKPYRCPTCGMGYTLPQSLRRHQLSHRPEAPCSPPSVPSAASEPTVVLLQAEPQLLDTHREEEVSPARDVVEVTISESQEKCFVVPEEPDAAPSLVLIHKDMGLGAWAEVVEVEMGT

SEQ ID NO: 619 - protein, 951 aa, Homo sapiens
MCCTEGSLRKRDSQRAPEAVLCLQLWQRTVPLDTLKGLGTCFPSGPELRGAGIAAAMERASERRTASALFAGFRALGLFSNDIPHVVRFSALKRRFYVTTCVGKSFHTYDVQKLSLVAVSNSVPQDICCMAADGRLVFAAYGNVFSAFARNKEIVHTFKGHKAEIHFLQPFGDHIISVDTDGILIIWHIYSEEEYLQLTFDKSVFKISAILHPSTYLNKILLGSEQGSLQLWNVKSNKLLYTFPGWKVGVTALQQAPAVDVVAIGLMSGQVIIHNIKFNETLMKFRQDWGPITSISFRTDGHPVMAAGSPCGHIGLWDLEDKKLINQMRNAHSTAIAGLTFLHREPLLVTNGADNALRIWIFDGPTGEGRLLRFRMGHSAPLTNIRYYGQNGQQILSASQDGTLQSFSTVHEKFNKSLGHGLINKKRVKRKGLQNTMSVRLPPITKFAAEEARESDWDGIIACHQGKLSCSTWNYQKSTIGAYFLKPKELKKDDITATAVDITSCGNFAVIGLSSGTVDVYNMQSGIHRGSFGKDQAHKGSVRGVAVDGLNQLTVTTGSEGLLKFWNFKNKILIHSVSLSSSPNIMLLHRDSGILGLALDDFSISVLDIETRKIVREFSGHQGQINDMAFSPDGRWLISAAMDCSIRTWDLPSGCLIDCFLLDSAPLNVSMSPTGDFLATSHVDHLGIYLWSNISLYSVVSLRPLPADYVPSIVMLPGTCQTQDVEVSEETVEPSDELIEYDSPEQLNEQLVTLSLLPESRWKNLLNLDVIKKKNKPKEPPKVPKSAPFFIPTIPGLVPRYAAPEQNNDPQQSKVVNLGVLAQKSDFCLKLEEGLVNNKYDTALNLLKESGPSGIETELRSLSPDCGGSIEVMQSFLKMIGMMLDRKRDFELAQAYLALFLKLHLKMLPSEPVLLEEITNLSSQVEENWTHLQSLFNQSMCILNYLKSALL

SEQ ID NO: 620 - protein, 854 aa, Homo sapiens
MAEAEEQETGSLEESTDESEEEESEEEPKLKYERLSNGVTEILQKDAASCMTVHDKFLALGTHYGKVYLLDVQGNITQKFDVSPVKINQISLDESGEHMGVCSEDGKVQVFGLYSGEEFHETFDCPIKIIAVHPHFVRSSCKQFVTGGKKLLLFERSWMNRWKSAVLHEGEGNIRSVKWRGHLIAWANNMGVKIFDIISKQRITNVPRDDISLRPDMYPCSLCWKDNVTLIIGWGTSVKVCSVKERHASEMRDLPSRYVEIVSQFETEFYISGLAPLCDQLVVLSYVKEISEKTEREYCARPRLDIIQPLSETCEEISSDALTVRGFQENECRDYHLEYSEGESLFYIVSPRDVVVAKERDQDDHIDWLLEKKKYEEALMAAEISQKNIKRHKILDIGLAYINHLVERGDYDIAARKCQKILGKNAALWEYEVYKFKEIGQLKAISPYLPRGDPVLKPLIYEMILHEFLESDYEGFATLIREWPGDLYNNSVIVQAVRDHLKKDSQNKTLLKTLAELYTYDKNYGNALEIYLTLRHKDVFQLIHKHNLFSSIKDKIVLLMDFDSEKAVDMLLDNEDKISIKKVVEELEDRPELQHVYLHKLFKRDHHKGQRYHEKQISLYAEYDRPNLLPFLRDSTHCPLEKALEICQQRNFVEETVYLLSRMGNSRSALKMIMEELHDVDKAIEFAKEQDDGELWEDLILYSIDKPPFITGLLNNIGTHVDPILLIHRIKEGMEIPNLRDSLVKILQDYNLQILLREGCKKILVADSLSLLKKMHRTQMKGVLVDEENICESCLSPILPSDAAKPFSVVVFHCRHMFHKECLPMPSMNSAAQFCNICSAKNRGPGSAILEMKK

SEQ ID NO: 621 - protein, 802 aa, Homo sapiens
MAEAEEQETGSLEESTDESEEEESEEEPKLKYERLSNGVTEILQKDAASCMTVHDKFLALGTHYGKVYLLDVQGNITQKFDVSPVKINQISLDESGEHMGVCSEDGKVQVFGLYSGEEFHETFDCPIKIIAVHPHFVRSSCKQFVTGGKKLLLFERSWMNRWKSAVLHEGEGNIRSVKWRGHLIAWANNMGVKIFDIISKQRITNVPRDDISLRPDMYPCSLCWKDNVTLIIGWGTSVKVCSVKERHASEMRDLPSRYVEIVSQFETEFYISGLAPLCDQLVVLSYVKEISEKTEREYCARPRLDIIQPLSETCEEISSDALTVRGFQENECRDYHLEYSEGESLFYIVSPRDVVVAKERDQDDHIDWLLEKKKYEEALMAAEISQKNIKRHKILDIGLAYINHLVERGDYDIAARKCQKILGKNAALWEYEVYKFKEIGQLKAISPYLPRGDPVLKPLIYEMILHEFLESDYEGFATLIREWPGDLYNNSVIVQAVRDHLKKDSQNKTLLKTLAELYTYDKNYGNALEIYLTLRHKDVFQLIHKHNLFSSIKDKIVLLMDFDSEKAVDMLLDNEDKISIKKVVEELEDRPELQHVYLHKLFKRDHHKGQRYHEKQISLYAEYDRPNLLPFLRDSTHCPLEKALEICQQRNFVEETVYLLSRMGNSRSALKMIMEELHDVDKAIEFAKEQDDGELWEDLILYSIDKPPFITGLLNNIGTHVDPILLIHRIKEGMEIPNLRDSLVKILQDYNLQILLREGCKKILVADSLSLLKKMHRTQMKGVLVDEENICESCLSPILPSE

SEQ ID NO: 622 - protein, 829 aa, Homo sapiens
MAEAEEQETGSLEESTDESEEEESEEEPKLKYERLSNGVTEILQKDAASCMTVHDKFLALGTHYGKVYLLDVQGNITQKFDVVQVFGLYSGEEFHETFDCPIKIIAVHPHFVRSSCKQFVTGGKKLLLFERSWMNRWKSAVLHEGEGNIRSVKWRGHLIAWANNMGVKIFDIISKQRITNVPRDDISLRPDMYPCSLCWKDNVTLIIGWGTSVKVCSVKERHASEMRDLPSRYVEIVSQFETEFYISGLAPLCDQLVVLSYVKEISEKTEREYCARPRLDIIQPLSETCEEISSDALTVRGFQENECRDYHLEYSEGESLFYIVSPRDVVVAKERDQDDHIDWLLEKKKYEEALMAAEISQKNIKRHKILDIGLAYINHLVERGDYDIAARKCQKILGKNAALWEYEVYKFKEIGQLKAISPYLPRGDPVLKPLIYEMILHEFLESDYEGFATLIREWPGDLYNNSVIVQAVRDHLKKDSQNKTLLKTLAELYTYDKNYGNALEIYLTLRHKDVFQLIHKHNLFSSIKDKIVLLMDFDSEKAVDMLLDNEDKISIKKVVEELEDRPELQHVYLHKLFKRDHHKGQRYHEKQISLYAEYDRPNLLPFLRDSTHCPLEKALEICQQRNFVEETVYLLSRMGNSRSALKMIMEELHDVDKAIEFAKEQDDGELWEDLILYSIDKPPFITGLLNNIGTHVDPILLIHRIKEGMEIPNLRDSLVKILQDYNLQILLREGCKKILVADSLSLLKKMHRTQMKGVLVDEENICESCLSPILPSDAAKPFSVVVFHCRHMFHKECLPMPSMNSAAQFCNICSAKNRGPGSAILEMKK

SEQ ID NO: 623 - protein, 310 aa, Homo sapiens
MSQQLKKRAKTRHQKGLGGRAPSGAKPRQGKSSQDLQAEIEPVSAVWALCDGYVCYEPGPQALGGDDFSDCYIECVIRGEFSQPILEEDSLFESLEYLKKGSEQQLSQKVFEASSLECSLEYMKKGVKKELPQKIVGENSLEYSEYMTGKKLPPGGIPGIDLSDPKQLAEFARKKPPINKEYDSLSAIACPQSGCTRKLRNRAALRKHLLIHGPRDHVCAECGKAFVESSKLKRHFLVHTGEKPFRCTFEGCGKRFSLDFNLRTHVRIHTGEKRFVCPFQGCNRRFIQSNNLKAHILTHANTNKNEQEGK

SEQ ID NO: 624 - protein, 530 aa, Homo sapiens
MPGPPGSLEMGPLTFRDVAIEFSLEEWQCLDTAQRNLYRKVMFENYRNLVFLGIAVSKPHLITCLEQGKEPWNRKRQEMVAKPPVIYSHFTEDLWPEHSIKDSFQKVILRGYGKCGHENLQLRISCKSVDESKVFKEGYNELNQCLRTTQSKIFQCDKYVKVFHKFSNSNSHKKRNTGKKVFKCKECGKSFCMLSHLTQHIRIHTRENSYKCEECGKVLNWFSELIKHKGIHMGEKPYKCEECGKAFNQSSTLIKHKKIHIEEKPFKCEECGKAFSLFSILSKHKIIHTGDKPYKCDECHKAFNWFATLTNHKRIHTGEKPFKCEECGKDFNQFSNLTKHKKIHTGEKPYKCEECGKAFNQFANLTRHKKIHTGEKSYKCEECGKAFIQSSNLTEHMRIHTGEKPYKCEECGKAFNGCSSLTRHKRIHTRENTYKCEECGKGFTLFSTLTNHKVIHTGEKSYKCDECGNVFNWPATLANHKRIHAREKPYKCEECGKAFNRSSHLTRHKKIHTGEKLYKPEKCDNNFDNT

SEQ ID NO: 625 - protein, 123 aa, Homo sapiens
MPGPPGSLEMGPLTFRDVAIEFSLEEWQCLDTAQRNLYRKVMFENYRNLVFLGIAVSKPHLITCLEQGKEPWNRKRQEMVAKPPESYCVAQADLELLVSSYLTALASLKMWDYRNNPLCQATM

SEQ ID NO: 626 - protein, 1342 aa, Homo sapiens
MKRIFSLLEKTWLGAPIQFAWQKTSGNYLAVTGADYIVKIFDRHGQKRSEINLPGNCVAMDWDKDGDVLAVIAEKSSCIYLWDANTNKTSQLDNGMRDQMSFLLWSKVGSFLAVGTVKGNLLIYNHQTSRKIPVLGKHTKRITCGCWNAENLLALGGEDKMITVSNQEGDTIRQTQVRSEPSNMQFFLMKMDDRTSAAESMISVVLGKKTLFFLNLNEPDNPADLEFQQDFGNIVCYNWYGDGRIMIGFSCGHFVVISTHTGELGQEIFQARNHKDNLTSIAVSQTLNKVATCGDNCIKIQDLVDLKDMYVILNLDEENKGLGTLSWTDDGQLLALSTQRGSLHVFLTKLPILGDACSTRIAYLTSLLEVTVANPVEGELPITVSVDVEPNFVAVGLYHLAVGMNNRAWFYVLGENAVKKLKDMEYLGTVASICLHSDYAAALFEGKVQLHLIESEILDAQEERETRLFPAVDDKCRILCHALTSDFLIYGTDTGVVQYFYIEDWQFVNDYRHPVSVKKIFPDPNGTRLVFIDEKSDGFVYCPVNDATYEIPDFSPTIKGVLWENWPMDKGVFIAYDDDKVYTYVFHKDTIQGAKVILAGSTKVPFAHKPLLLYNGELTCQTQSGKVNNIYLSTHGFLSNLKDTGPDELRPMLAQNLMLKRFSDAWEMCRILNDEAAWNELARACLHHMEVEFAIRVYRRIGNVGIVMSLEQIKGIEDYNLLAGHLAMFTNDYNLAQDLYLASSCPIAALEMRRDLQHWDSALQLAKHLAPDQIPFISKEYAIQLEFAGDYVNALAHYEKGITGDNKEHDEACLAGVAQMSIRMGDIRRGVNQALKHPSRVLKRDCGAILENMKQFSEAAQLYEKGLYYDKAASVYIRSKNWAKVGDLLPHVSSPKIHLQYAKAKEADGRYKEAVVAYENAKQWQSVIRIYLDHLNNPEKAVNIVRETQSLDGAKMVARFFLQLGDYGSAIQFLVMSKCNNEAFTLAQQHNKMEIYADIIGSEDTTNEDYQSIALYFEGEKRYLQAGKFFLLCGQYSRALKHFLKCPSSEDNVAIEMAIETVGQAKDELLTNQLIDHLLGENDGMPKDAKYLFRLYMALKQYREAAQTAIIIAREEQSAGNYRNAHDVLFSMYAELKSQKIKIPSEMATNLMILHSYILVKIHVKNGDHMKGARMLIRVANNISKFPSHIVPILTSTVIECHRAGLKNSAFSFAAMLMRPEYRSKIDAKYKKKIEGMVRRPDISEIEEATTPCPFCKFLLPECELLCPGCKNSIPYCIATGRHMLKDDWTVCPHCDFPALYSELKIMLNTESTCPMCSERLNAAQLKKISDCTQYLRTEEEL

SEQ ID NO: 627 - protein, 481 aa, Homo sapiens
MKRIFSLLEKTWLGAPIQFAWQKTSGNYLAVTGADYIVKIFDRHGQKRSEINLPGNCVAMDWDKDGDVLAVIAEKSSCIYLWDANTNKTSQLDNGMRDQMSFLLWSKVGSFLAVGTVKGNLLIYNHQTSRKIPVLGKHTKRITCGCWNAENLLALGGEDKMITVSNQEGDTIRQTQVRSEPSNMQFFLMKMDDRTSAAESMISVVLGKKTLFFLNLNEPDNPADLEFQQDFGNIVCYNWYGDGRIMIGFSCGHFVVISTHTGELGQEIFQARNHKDNLTSIAVSQTLNKVATCGDNCIKIQDLVDLKDMYVILNLDEENKGLGTLSWTDDGQLLALSTQRGSLHVFLTKLPILGDACSTRIAYLTSLLEVTVANPVEGELPITVSVDVEPNFVAVGLYHLAVGMNNRAWFYVLGENAVKKLKDMEYLGTVASICLHSDYAAALFEGKVQLHLKAKSWMLTKNVRLGFSQQWMISAVSYAMP

SEQ ID NO: 628 - protein, 507 aa, Homo sapiens
MPWLLSAPKLVPAVANVRGLSGCMLCSQRRYSLQPVPERRIPNRYLGQPSPFTHPHLLRPGEVTPGLSQVEYALRRHKLMSLIQKEAQGQSGTDQTVVVLSNPTYYMSNDIPYTFHQDNNFLYLCGFQEPDSILVLQSLPGKQLPSHKAILFVPRRDPSRELWDGPRSGTDGAIALTGVDEAYTLEEFQHLLPKMKAETNMVWYDWMRPSHAQLHSDYMQPLTEAKAKSKNKVRGVQQLIQRLRLIKSPAEIERMQIAGKLTSQAFIETMFTSKAPVEEAFLYAKFEFECRARGADILAYPPVVAGGNRSNTLHYVKNNQLIKDGEMVLLDGGCESSCYVSDITRTWPVNGRFTAPQAELYEAVLEIQRDCLALCFPGTSLENIYSMMLTLIGQKLKDLGIMKNIKENNAFKAARKYCPHHVGHYLGMDVHDTPDMPRSLPLQPGMVITIEPGIYIPEDDKDAPEKFRGLGVRIEDDVVVTQDSPLILSADCPKEMNDIEQICSQAS

SEQ ID NO: 629 - protein, 428 aa, Homo sapiens
MSLIQKEAQGQSGTDQTVVVLSNPTYYMSNDIPYTFHQDNNFLYLCGFQEPDSILVLQSLPGKQLPSHKAILFVPRRDPSRELWDGPRSGTDGAIALTGVDEAYTLEEFQHLLPKMKAETNMVWYDWMRPSHAQLHSDYMQPLTEAKAKSKNKVRGVQQLIQRLRLIKSPAEIERMQIAGKLTSQAFIETMFTSKAPVEEAFLYAKFEFECRARGADILAYPPVVAGGNRSNTLHYVKNNQLIKDGEMVLLDGGCESSCYVSDITRTWPVNGRFTAPQAELYEAVLEIQRDCLALCFPGTSLENIYSMMLTLIGQKLKDLGIMKNIKENNAFKAARKYCPHHVGHYLGMDVHDTPDMPRSLPLQPGMVITIEPGIYIPEDDKDAPEKFRGLGVRIEDDVVVTQDSPLILSADCPKEMNDIEQICSQAS

SEQ ID NO: 630 - protein, 278 aa, Homo sapiens
MPWLLSAPKLVPAVANVRGLSGCMLCSQRRYSLQPVPERRIPNRYLGQPSPFTHPHLLRPGEVTPGLSQVEYALRRHKLMSLIQKEAQGQSGTDQTVVVLSNPTYYMSNDIPYTFHQDNNFLYLCGFQEPDSILVLQSLPGKQLPSHKAILFVPRRDPSRELWDGPRSGTDGAIALTGVDEAYTLEEFQHLLPKMKAETNMVWYDWMRPSHAQLHSDYMQPLTEAKAKSKNKVRGVQQLIQRLRLIKSPAEIERMQIAGKLTSQRQGFSVLSRLVSNS

SEQ ID NO: 631 - protein, 484 aa, Homo sapiens
MLCSQRRYSLQPVPERRIPNRYLGQPSPFTHPHLLRPGEVTPGLSQVEYALRRHKLMSLIQKEAQGQSGTDQTVVVLSNPTYYMSNDIPYTFHQDNNFLYLCGFQEPDSILVLQSLPGKQLPSHKAILFVPRRDPSRELWDGPRSGTDGAIALTGVDEAYTLEEFQHLLPKMKAETNMVWYDWMRPSHAQLHSDYMQPLTEAKAKSKNKVRGVQQLIQRLRLIKSPAEIERMQIAGKLTSQAFIETMFTSKAPVEEAFLYAKFEFECRARGADILAYPPVVAGGNRSNTLHYVKNNQLIKDGEMVLLDGGCESSCYVSDITRTWPVNGRFTAPQAELYEAVLEIQRDCLALCFPGTSLENIYSMMLTLIGQKLKDLGIMKNIKENNAFKAARKYCPHHVGHYLGMDVHDTPDMPRSLPLQPGMVITIEPGIYIPEDDKDAPEKFRGLGVRIEDDVVVTQDSPLILSADCPKEMNDIEQICSQAS

SEQ ID NO: 632 - protein, 288 aa, Homo sapiens
MPWLLSAPKLVPAVANVRGLSGCMLCSQRRYSLQPVPERRIPNRYLGQPSPFTHPHLLRPGEVTPGLSQVEYALRRHKLMSLIQKEAQGQSGTDQTVVVLSNPTYYMSNDIPYTFHQDNNFLYLCGFQEPDSILVLQSLPGKQLPSHKAILFVPRRDPSRELWDGPRSGTDGAIALTGVDEAYTLEEFQHLLPKMKAETNMVWYDWMRPSHAQLHSDYMQPLTEAKAKSKNKVRGVQQLIQRLRLIKSPAEIERMQIAGKLTSQKSVLLARHGGSRLYSHHFGRPRLS

SEQ ID NO: 633 - protein, 622 aa, Homo sapiens
MGSLTFRDVAIQFSLEEWQCLDTAQQNLYRNVMLENYRNLVFLGIAAPKPDLIIFLEQGKEPWNMKRHELVKEPPVICSHFAQDLWPEQGREDSFQKVILRRYEKCGHENLQLKIGCTNVDECKVHKKGYNKLNQSLTTTQSKVFQCGKYANIFHKCSNSKRHKIRHTGKKLLKCKEYVRSFCMLSHLSQHKRIYTRENSYKSEEHGKAFNWSSALTYKRIHTGEKPCKCEECGKAFSKFSILTKHKVIHTGEKHYKCEECGKAFTRSSSLIEHKRSHAGEKPYKCEECGKAFSKASTLTAHKTIHAGEKPYKCEECGKAFNRSSNLMEHKRIHTGEKPCKCEECGKAFGNFSTLTKHKVIHTGEKPYKCEECGKAFSWPSSLTEHKRIHAGDKPYKCEECGKTFKWSSTLTKHKIIHTGEKPYKCEECGKAFTTFSSLTKHKVIHTGEKHYKCEECGKVFSWSSSLTTHKAIHAGEKLYKCEECGKAFKWSSNLMEHKRIHTGEKPYKCEECGKAFSKVANLTKHKVIHTGEKQYKCEECGKAFIWSSRLSEHKRIHTGEKPYKCEECGKAFSWVSVLNKHKKIHAGKKFYKCEECGKDFNQSSHLTTHKRIHTGGKTLQM

SEQ ID NO: 634 - protein, 831 aa, Homo sapiens
MENQRSSPLSFPSVPQEETLRQAPAGLPRETLFQSRVLPPKEIPSLSPTIPRQGSLPQTSSAPKQETSGRMPHVLQKGPSLLCSAASEQETSLQGPLASQEGTQYPPPAAAEQEVSLLSHSPHHQEAPVHSPEAPEKDPLTLSPTVPETDMDPLLQSPVSQKDTPFQISSAVQKEQPLPTAEITRLAVWAAVQAVERKLEAQAMRLLTLEGRTGTNEKKIADCEKTAVEFANHLESKWVVLGTLLQEYGLLQRRLENMENLLKNRNFWILRLPPGSNGEVPKVPVTFDDVAVHFSEQEWGNLSEWQKELYKNVMRGNYESLVSMDYAISKPDLMSQMERGERPTMQEQEDSEEGETPTDPSAAHDGIVIKIEVQTNDEGSESLETPEPLMGQVEEHGFQDSELGDPCGEQPDLDMQEPENTLEESTEGSSEFSELKQMLVQQRNCTEGIVIKTEEQDEEEEEEEEDELPQHLQSLGQLSGRYEASMYQTPLPGEMSPEGEESPPPLQLGNPAVKRLAPSVHGERHLSENRGASSQQQRNRRGERPFTCMECGKSFRLKINLIIHQRNHIKEGPYECAECEISFRHKQQLTLHQRIHRVRGGCVSPERGPTFNPKHALKPRPKSPSSGSGGGGPKPYKCPECDSSFSHKSSLTKHQITHTGERPYTCPECKKSFRLHISLVIHQRVHAGKHEVSFICSLCGKSFSRPSHLLRHQRTHTGERPFKCPECEKSFSEKSKLTNHCRVHSRERPHACPECGKSFIRKHHLLEHRRIHTGERPYHCAECGKRFTQKHHLLEHQRAHTGERPYPCTHCAKCFRYKQSLKYHLRTHTGE

SEQ ID NO: 635 - protein, 839 aa, Homo sapiens
MIMTESREVIDLDPPAETSQEQEDLFIVKVEEEDCTWMQEYNPPTFETFYQRFRHFQYHEASGPREALSQLRVLCCEWLRPELHTKEQILELLVLEQFLTILPEEFQPWVREHHPESGEEAVAVIENIQRELEERRQQIVACPDVLPRKMATPGAVQESCSPHPLTVDTQPEQAPQKPRLLEENALPVLQVPSLPLKDSQELTASLLSTGSQKLVKIEEVADVAVSFILEEWGHLDQSQKSLYRDDRKENYGSITSMGYESRDNMELIVKQISDDSESHWVAPEHTERSVPQDPDFAEVSDLKGMVQRWQVNPTVGKSRQNPSQKRDLDAITDISPKQSTHGERGHRCSDCGKFFLQASNFIQHRRIHTGEKPFKCGECGKSYNQRVHLTQHQRVHTGEKPYKCQVCGKAFRVSSHLVQHHSVHSGERPYGCNECGKNFGRHSHLIEHLKRHFREKSQRCSDKRSKNTKLSVKKKISEYSEADMELSGKTQRNVSQVQDFGEGCEFQGKLDRKQGIPMKEILGQPSSKRMNYSEVPYVHKKSSTGERPHKCNECGKSFIQSAHLIQHQRIHTGEKPFRCEECGKSYNQRVHLTQHQRVHTGEKPYTCPLCGKAFRVRSHLVQHQSVHSGERPFKCNECGKGFGRRSHLAGHLRLHSREKSHQCRECGEIFFQYVSLIEHQVLHMGQKNEKNGICEEAYSWNLTVIEDKKIELQEQPYQCDICGKAFGYSSDLIQHYRTHTAEKPYQCDICRENVGQCSHTKQHQKIYSSTKSHQCHECGRGFTLKSHLNQHQRIHTGEKPFQCKECGMNFSWSCSLFKHLRSHERTDPINTLSVEGSLL

SEQ ID NO: 636 - protein, 520 aa, Homo sapiens
MVTSSFPISVAVFALITLQVGTQDSFIAAVYEHAVILPNKTETPVSQEDALNLMNENIDILETAIKQAAEQGARIIVTPEDALYGWKFTRETVFPYLEDIPDPQVNWIPCQDPHRFGHTPVQARLSCLAKDNSIYVLANLGDKKPCNSRDSTCPPNGYFQYNTNVVYNTEGKLVARYHKYHLYSEPQFNVPEKPELVTFNTAFGRFGIFTCFDIFFYDPGVTLVKDFHVDTILFPTAWMNVLPLLTAIEFHSAWAMGMGVNLLVANTHHVSLNMTGSGIYAPNGPKVYHYDMKTELGKLLLSEVDSHPLSSLAYPTAVNWNAYATTIKPFPVQKNTFRGFISRDGFNFTELFENAGNLTVCQKELCCHLSYRMLQKEENEVYVLGAFTGLHGRRRREYWQVCTLLKCKTTNLTTCGRPVETASTRFEMFSLSGTFGTEYVFPEVLLTEIHLSPGKFEVLKDGRLVNKNGSSGPILTVSLFGRWYTKDSLYSSCGTSNSAITYLLIFILLMIIALQNIVML

SEQ ID NO: 637 - protein, 299 aa, Homo sapiens
MVTSSFPISVAVFALITLQVGTQDSFIAAVYEHAVILPNKTETPVSQEDALNLMNENIDILETAIKQAAEQGARIIVTPEDALYGWKFTRETVFPYLEDIPDPQVNWIPCQDPHRFGHTPVQARLSCLAKDNSIYVLANLGDKKPCNSRDSTCPPNGYFQYNTNVVYNTEGKLVARYHKVCTLLKCKTTNLTTCGRPVETASTRFEMFSLSGTFGTEYVFPEVLLTEIHLSPGKFEVLKDGRLVNKNGSSGPILTVSLFGRWYTKDSLYSSCGTSNSAITYLLIFILLMIIALQNIVML

SEQ ID NO: 638 - protein, 192 aa, Homo sapiens
MVTSSFPISVAVFALITLQVGTQDSFIAAVYEHAVILPNKTETPVSQEDALNLMNENIDILETAIKQAAEQGARIIVTPEDALYGWKFTRETVFPYLEDIPDPQVNWIPCQDPHRFGHTPVQARLSCLAKDNSIYVLANLGDKKPCNSRDSTCPPNGYFQYNTNVVYNTEGKLVARYHKETLQSVKRSFAVI

SEQ ID NO: 639 - protein, 195 aa, Homo sapiens
MVTSSFPISVAVFALITLQVGTQDSFIAAVYEHAVILPNKTETPVSQEDALNLMNENIDILETAIKQAAEQGARIIVTPEDALYGWKFTRETVFPYLEDIPDPQVNWIPCQDPHRFGHTPVQARLSCLAKDNSIYVLANLGDKKPCNSRDSTCPPNGYFQYNTNVVYNTEGKLVARYHKEVVFMHQMVPKCIIMT

SEQ ID NO: 640 - protein, 119 aa, Homo sapiens
MVTSSFPISVAVFALITLQVGTQDSFIAAVYEHAVILPNKTETPVSQEDALNLMNENIDILETAIKQAAEQGARIIVTPEDALYGWKFTRETVFPYLEDIPDPQVNWIPCQDPHRSAQC

SEQ ID NO: 641 - protein, 467 aa, Homo sapiens
MNENIDILETAIKQAAEQGARIIVTPEDALYGWKFTRETVFPYLEDIPDPQVNWIPCQDPHRFGHTPVQARLSCLAKDNSIYVLANLGDKKPCNSRDSTCPPNGYFQYNTNVVYNTEGKLVARYHKYHLYSEPQFNVPEKPELVTFNTAFGRFGIFTCFDIFFYDPGVTLVKDFHVDTILFPTAWMNVLPLLTAIEFHSAWAMGMGVNLLVANTHHVSLNMTGSGIYAPNGPKVYHYDMKTELGKLLLSEVDSHPLSSLAYPTAVNWNAYATTIKPFPVQKNTFRGFISRDGFNFTELFENAGNLTVCQKELCCHLSYRMLQKEENEVYVLGAFTGLHGRRRREYWQVCTLLKCKTTNLTTCGRPVETASTRFEMFSLSGTFGTEYVFPEVLLTEIHLSPGKFEVLKDGRLVNKNGSSGPILTVSLFGRWYTKDSLYSSCGTSNSAITYLLIFILLMIIALQNIVML

SEQ ID NO: 642 - protein, 497 aa, Homo sapiens
MTFNSFEGSKTCVPADINKEEEFVEEFNRLKTFANFPSGSPVSASTLARAGFLYTGEGDTVRCFSCHAAVDRWQYGDSAVGRHRKVSPNCRFINGFYLENSATQSTNSGIQNGQYKVENYLGSRDHFALDRPSETHADYLLRTGQVVDISDTIYPRNPAMYSEEARLKSFQNWPDYAHLTPRELASAGLYYTGIGDQVQCFCCGGKLKNWEPCDRAWSEHRRHFPNCFFVLGRNLNIRSESDAVSSDRNFPNSTNLPRNPSMADYEARIFTFGTWIYSVNKEQLARAGFYALGEGDKVKCFHCGGGLTDWKPSEDPWEQHAKWYPGCKYLLEQKGQEYINNIHLTHSLEECLVRTTEKTPSLTRRIDDTIFQNPMVQEAIRMGFSFKDIKKIMEEKIQISGSNYKSLEVLVADLVNAQKDSMQDESSQTSLQKEISTEEQLRRLQEEKLCKICMDRNIAIVFVPCGHLVTCKQCAEAVDKCPMCYTVITFKQKIFMS

SEQ ID NO: 643 - protein, 317 aa, Homo sapiens
MPGEQQAEEEEEEEMQEEMVLLVKGEEDEGEEKYEVVKLKIPMDNKEVPGEAPAPSADPARPHACPDCGRAFARRSTLAKHARTHTGERPFGCTECGRRFSQKSALTKHGRTHTGERPYECPECDKRFSAASNLRQHRRRHTGEKPYACAHCGRRFAQSSNYAQHLRVHTGEKPYACPDCGRAFGGSSCLARHRRTHTGERPYACADCGTRFAQSSALAKHRRVHTGEKPHRCAVCGRRFGHRSNLAEHARTHTGERPYPCAECGRRFRLSSHFIRHRRAHMRRRLYICAGCGRDFKLPPGATAATATERCPECEGS

SEQ ID NO: 644 - protein, 555 aa, Homo sapiens
MDSVVFEDVAVDFTLEEWALLDSAQRDLYRDVMLETFRNLASVDDGTQFKANGSVSLQDMYGQEKSKEQTIPNFTGNNSCAYTLEKNCEGYGTEDHHKNLRNHMVDRFCTHNEGNQYGEAIHQMPDLTLHKKVSAGEKPYECTKCRTVFTHLSSLKRHVKSHCGRKAPPGEECKQACICPSHLHSHGRTDTEEKPYKCQACGQTFQHPRYLSHHVKTHTAEKTYKCEQCRMAFNGFASFTRHVRTHTKDRPYKCQECGRAFIYPSTFQRHMTTHTGEKPYKCQHCGKAFTYPQAFQRHEKTHTGEKPYECKQCGKTFSWSETLRVHMRIHTGDKLYKCEHCGKAFTSSRSFQGHLRTHTGEKPYECKQCGKAFTWSSTFREHVRIHTQEQLYKCEQCGKAFTSSRSFRGHLRTHTGEKPYECKQCGKTFTWSSTFREHVRIHTQEQLHKCEHCGKAFTSSRAFQGHLRMHTGEKPYECKQCGKTFTWSSTLHNHVRMHTGEKPHKCKQCGMSFKWHSSFRNHLRMHTGQKSHECQSYSKAFSCQVILSKTSESTH

SEQ ID NO: 645 - protein, 388 aa, Homo sapiens
MKDCEYQQISPGAAPLPASPGARRPGPAASPTPGPGPAPPAAPAPPRWSSSGSGSGSGSGSLGRRPRRKWEVFPGRNRFYCGGRLMLAGHGGVFALTLLLILTTTGLFFVFDCPYLARKLTLAIPIIAAILFFFVMSCLLQTSFTDPGILPRATVCEAAALEKQIDNTGSSTYRPPPRTREVLINGQMVKLKYCFTCKMFRPPRTSHCSVCDNCVERFDHHCPWVGNCVGRRNYRFFYAFILSLSFLTAFIFACVVTHLTLRAQGSNFLSTLKETPASVLELVICFFSIWSILGLSGFHTYLVASNLTTNEDIKGSWSSKRGGEASVNPYSHKSIITNCCAVLCGPLPPSLIDRRGFVQSDTVLPSPIRSDEPACRAKPDASMVGGHP

SEQ ID NO: 646 - protein, 253 aa, Homo sapiens
MSCLLQTSFTDPGILPRATVCEAAALEKQIDNTGSSTYRPPPRTREVLINGQMVKLKYCFTCKMFRPPRTSHCSVCDNCVERFDHHCPWVGNCVGRRNYRFFYAFILSLSFLTAFIFACVVTHLTLRAQGSNFLSTLKETPASVLELVICFFSIWSILGLSGFHTYLVASNLTTNEDIKGSWSSKRGGEASVNPYSHKSIITNCCAVLCGPLPPSLIDRRGFVQSDTVLPSPIRSDEPACRAKPDASMVGGHP

SEQ ID NO: 647 - protein, 424 aa, Homo sapiens
MAALGDEVLDGYVFPACPPCSYRYPYPAATKGKGAAGGSWQQRGRGCLPASSPCSAGAASLSFPGCGRLTAAEYFDSYQRERLMALLAQVGPGLGPRARRAGSCDVAVQVSPRIDAAVQCSLGRRTLQRRARDPESPAGPGAEGTTGGGSFSQQPSRRGLEQGSPQNGAPRPMRFPRTVAVYSPLALRRLTAFLEGPGPAAGEQRSGASDGERGPPPARLQGPEEGEVWTKKAPRRPQSDDDGEAQAAVRASWEQPADGPELPPREAQEGEAAPRSALRSPGQPPSAGRARDGGDGREAAVAGEGPSPRSPELGKERLRFQFLEQKYGYYHCKDCNIRWESAYVWCVQGTNKVYFKQFCRTCQKSYNPYRVEDITCQSCKQTRCSCPVKLRHVDPKRPHRQDLCGRCKGKRLSCDSTFSFKYII

SEQ ID NO: 648 - protein, 669 aa, Homo sapiens
MEKCSVGGLELTEQTPALLGNMAMATSLMDIGDSFGHPACPLVSRSRNSPVEDDDDDDDVVFIESIQPPSISAPAIADQRNFIFASSKNEKPQGNYSVIPPSSRDLASQKGNISETIVIDDEEDIETNGGAEKKSSCFIEWGLPGTKNKTNDLDFSTSSLSRSKTKTGVRPFNPGRMNVAGDLFQNGEFATHHSPDSWISQSASFPSNQKQPGVDSLSPVALLRKQNFQPTAQQQLTKPAKITCANCKKPLQKGQTAYQRKGSAHLFCSTTCLSSFSHKRTQNTRSIICKKDASTKKANVILPVESSKSFQEFYSTSCLSPCENNWNLKKGVFNKSRCTICSKLAEIRHEVSVNNVTHKLCSNHCFNKYRLANGLIMNCCEHCGEYMPSKSTGNNILVIGGQQKRFCCQSCINEYKQMMETKSKKLTASENRKRNAFREENEKQLYGSSNTLLKKIEGIPEKKEKTSQLQLSVECGTDTLLIQENVNLPPSSTSTIADTFQEQLEEKNFEDSIVPVVLSADPGTWPRILNIKQRDTLVENVPPQVRNFNFPKDNTGRKFSETYYTRILPNGEKTTRSWLLYSTSKDSVFCLYCKLFGEGKNQLKNENGCKDWQHLSHILSKHEESEMHVNNSVKYSKLKSDLKKNKAIDAAEHRLYENEKNDGVLLLYT

SEQ ID NO: 649 - protein, 382 aa, Homo sapiens
MEKCSVGGLELTEQTPALLGNMAMATSLMDIGDSFGHPACPLVSRSRNSPVEDDDDDDDVVFIESIQPPSISAPAIADQRNFIFASSKNEKPQGNYSVIPPSSRDLASQKGNISETIVIDDEEDIETNGGAEKKSSCFIEWGLPGTKNKTNDLDFSTSSLSRSKTKTGVRPFNPGRMNVAGDLFQNGEFATHHSPDSWISQSASFPSNQKQPGVDSLSPVALLRKQNFQPTAQQQLTKPAKITCANCKKPLQKGQTAYQRKGSAHLFCSTTCLSSFSHKRTQNTRSIICKKDASTKKANVILPVESSKSFQEFYSTSCLSPCENNWNLKKGVFNKSRCTICSKLAEVWIFIPKLLFRLTVIILTFKCYYVLFHLHNARVLDV

SEQ ID NO: 650 - protein, 208 aa, Homo sapiens
MEKCSVGGLELTEQTPALLGNMAMATSLMDIGDSFGHPACPLVSRSRNSPVEDDDDDDDVVFIESIQPPSISAPAIADQRNFIFASSKNEKPQGNYSVIPPSSRDLASQKGNISETIVIDDEEDIETNGGAEKKSSCFIEWGLPGTKNKTNDLDFSTSSLSRSKTKTGVRPFNPGRMNVAGDLFQNGEFATHHSPEMHLQRRLMSFFQ

SEQ ID NO: 651 - protein, 213 aa, Homo sapiens
MEKCSVGGLELTEQTPALLGNMAMATSLMDIGDSFGHPACPLVSRSRNSPVEDDDDDDDVVFIESIQPPSISAPAIADQRNFIFASSKNEKPQGNYSVIPPSSRDLASQKGNISETIVIDDEEDIETNGGAEKKSSCFIEWGLPGTKNKTNDLDFSTSSLSRSKVNAGMGNSGITTELTLKYIITNVTTLETGISSVNAGQDVNIIITYKTSL

SEQ ID NO: 652 - protein, 493 aa, Homo sapiens
MNVAGDLFQNGEFATHHSPDSWISQSASFPSNQKQPGVDSLSPVALLRKQNFQPTAQQQLTKPAKITCANCKKPLQKGQTAYQRKGSAHLFCSTTCLSSFSHKRTQNTRSIICKKDASTKKANVILPVESSKSFQEFYSTSCLSPCENNWNLKKGVFNKSRCTICSKLAEIRHEVSVNNVTHKLCSNHCFNKYRLANGLIMNCCEHCGEYMPSKSTGNNILVIGGQQKRFCCQSCINEYKQMMETKSKKLTASENRKRNAFREENEKQLYGSSNTLLKKIEGIPEKKEKTSQLQLSVECGTDTLLIQENVNLPPSSTSTIADTFQEQLEEKNFEDSIVPVVLSADPGTWPRILNIKQRDTLVENVPPQVRNFNFPKDNTGRKFSETYYTRILPNGEKTTRSWLLYSTSKDSVFCLYCKLFGEGKNQLKNENGCKDWQHLSHILSKHEESEMHVNNSVKYSKLKSDLKKNKAIDAAEHRLYENEKNDGVLLLYT

SEQ ID NO: 653 - protein, 129 aa, Homo sapiens
MREKSFQCNESGKAFNCSSLLKKCQIIHLGEKKYKCDICGKVFNQKRYLAYHHRCHTGEKPYKCNQCGKTFSYKSSLVIHKAIHTGEKPHKCNECGKVFNQKAYLASHHRLHTGEKPYKCEECDKVFSR

SEQ ID NO: 654 - protein, 470 aa, Homo sapiens
MAATLLMAGSQAPVTFEDMAMYLTREEWRPLDAAQRDLYRDVMQENYGNVVSLDFEIRSENEVNPKQEISEDVQFGTTSERPAENAEENPESEEGFESGDRSERQWGDLTAEEWVSYPLQPVTDLLVHKEVHTGIRYHICSHCGKAFSQISDLNRHQKTHTGDRPYKCYECGKGFSRSSHLIQHQRTHTGERPYDCNECGKSFGRSSHLIQHQTIHTGEKPHKCNECGKSFCRLSHLIQHQRTHSGEKPYECEECGKSFSRSSHLAQHQRTHTGEKPYECNECGRGFSERSDLIKHYRVHTGERPYKCDECGKNFSQNSDLVRHRRAHTGEKPYHCNECGENFSRISHLVQHQRTHTGEKPYECNACGKSFSRSSHLITHQKIHTGEKPYECNECWRSFGERSDLIKHQRTHTGEKPYECVQCGKGFTQSSNLITHQRVHTGEKPYECTECEKSFSRSSALIKHKRVHTD

SEQ ID NO: 655 - protein, 368 aa, Homo sapiens
MSAQSVEEDSILIIPTPDEEEKILRVKLEEDPDGEEGSSIPWNHLPDPEIFRQRFRQFGYQDSPGPREAVSQLRELCRLWLRPETHTKEQILELVVLEQFVAILPKELQTWVRDHHPENGEEAVTVLEDLESELDDPGQPVSLRRRKREVLVEDMVSQEEAQGLPSSELDAVENQLKWASWELHSLRHCDDDGRTENGALAPKQELPSALESHEVPGTLNMGVPQIFKYGETCFPKGRFERKRNPSRKKQHICDECGKHFSQGSALILHQRIHSGEKPYGCVECGKAFSRSSILVQHQRVHTGEKPYKCLECGKAFSQNSGLINHQRIHTGEKPYECVQCGKSYSQSSNLFRHQRRHNAEKLLNVVKV

SEQ ID NO: 656 - protein, 193 aa, Homo sapiens
MSAQSVEEDSILIIPTPDEEEKILRVKLEEDPDGEEGSSIPWNHLPDPEIFRQRFRQFGYQDSPGPREAVSQLRELCRLWLRPETHTKEQILELVVLEQFVAILPKELQTWVRDHHPENGEEAVTVLEDLESELDDPGQPVSLRRRKREVLVEDMVSQEEAQGLPSSELDAVENQLKWASWELHSLRHCVIIP

SEQ ID NO: 657 - protein, 1081 aa, Homo sapiens
MPRRKQEQPKRLPSHVSRQEEAEGELSEGEHWYGNSSETPSEASYGEVQENYKLSLEDRIQEQSTSPDTSLGSTTPSSHTLELVALDSEVLRDSLQCQDHLSPGVSSLCDDDPGSNKPLSSNLRRLLEAGSLKLDAAATANGRVESPVNVGSNLSFSPPSHHAQQLSVLARKLAEKQEQNDQYTPSNRFIWNQGKWLPNSTTTCSLSPDSAILKLKAAANAVLQDKSLTRTEETMRFESFSSPFSSQSASSTLAALSKKVSERSLTPGQEHPPPASSFLSLASMTSSAALLKEVAARAAGSLLAEKSSLLPEDPLPPPPSEKKPEKVTPPPPPPPPPPPPPPPQSLELLLLPVPKGRVSKPSNSASEEESGKPFQCPICGLVIKRKSYWKRHMVIHTGLKSHQCPLCPFRCARKDNLKSHMKVHQHQDRGETFQCQLCPFTSSRHFSLKLHMRCHQHFLRTEAKVKEEIPDPDVKGSPHLSDSACLGQQREGGGTELVGTMMTSNTPERTSQGGAGVSPLLVKEEPKEDNGLPTSFTLNAADRPANHTKLKDPSEYVANSASALFSQDISVKMASDFLMKLSAANQKEPMNLNFKVKEEPKEGESLSTTLPRSSYVFSPESEVSAPGVSEDALKPQEGKGSVLRRDVSVKAASELLMKLSAESYKETQMVKIKEEPMEVDIQDSHVSISPSRNVGYSTLIGREKTEPLQKMPEGRVPPERNLFSQDISVKMASELLFQLSEKVSKEHNHTKENTIRTTTSPFFSEDTFRQSPFTSNSKELLPSDSVLHGRISAPETEKIVLEAGNGLPSWKFNDQLFPCDVCGKVFGRQQTLSRHLSLHTEERKYKCHLCPYAAKCRANLNQHLTVHSVKLVSTDTEDIVSAVTSEGSDGKKHPYYYSCHVCGFETELNVQFVSHMSLHVDKEQWMFSICCTACDFVTMEEAEIKTHIGTKHTGEDRKTPSESNSPSSSSLSALSDSANSKDDSDGSQKNKGGNNLLVISVMPGSQPSLNSEEKPEKGFECVFCNFVCKTKNMFERHLQIHLITRMFECDVCHKFMKTPEQLLEHKKCHTVPTGGLNSGQW

SEQ ID NO: 658 - protein, 1077 aa, Homo sapiens
MPRRKQEQPKRLPSHVSRQEEAEGELSEGEHWYGNSSETPSEASYGEVQENYKLSLEDRIQEQSTSPDTSLGSTTPSSHTLELVALDSEVLRDSLQCQDHLSPGVSSLCDDDPGSNKPLSSNLRRLLEAGSLKLDAAATANGRVESPVNVGSNLSFSPPSHHAQQLSVLARKLAEKQEQNDQYTPSNRFIWNQGKWLPNSTTTCSLSPDSAILKLKAAANAVLQDKSLTRTEETMRFESFSSPFSSQSASSTLAALSKKVSERSLTPGQEHPPPASSFLSLASMTSSAALLKEVAARAAGSLLAEKSSLLPEDPLPPPPSEKKPEKVTPPPPPPPPPPPPPPPQSLELLLLPVPKGRVSKPSNSASEEESGKPFQCPICGLVIKRKSYWKRHMVIHTGLKSHQCPLCPFRCARKDNLKSHMKVHQHQDRGETFQCQLCPFTSSRHFSLKLHMRCHQHFLRTEAKVKEEIPDPDVKGSPHLSDSACLGQQREGGGTELVGTMMTSNTPERTSQGGAGVSPLLVKEEPKEDNGLPTSFTLNAADRPANHTKLKDPSEYVANSASALFSQDISVKMASDFLMKLSAANQKEPMNLNFKVKEEPKEGESLSTTLPRSSYVFSPESEVSAPGVSEDALKPQEGKGSVLRRDVSVKAASELLMKLSAESYKETQMVKIKEEPMEVDIQDSHVSISPSRNVGYSTLIGREKTEPLQKMPEGRVPPERNLFSQDISVKMASELLFQLSEKVSKEHNHTKENTIRTTTSPFFSEDTFRQSPFTSNSKELLPSDSVLHGRISAPETEKIVLEAGNGLPSWKFNDQLFPCDVCGKVFGRQQTLSRHLSLHTEERKYKCHLCPYAAKCRANLNQHLTVHSVKLVSTDTEDIVSAVTSEGSDGKKHPYYYSCHVCGFETELNVQFVSHMSLHVDKEQWMFSICCTACDFVTMEEAEIKTHIGTKHTGEDRKTPSESNSPSSSSLSALSDSANSKDDSDGSQKNKGGNNLLVISVMPGSQPSLNSEEKPEKGFECVFCNFVCKTKNMFERHLQIHLITRMFECDVCHKFMKTPEQLLEHKKCHTVPTGGLK

SEQ ID NO: 659 - protein, 731 aa, Homo sapiens
MPRRKQEQPKRLPSHSEEESGKPFQCPICGLVIKRKSYWKRHMVIHTGLKSHQCPLCPFRCARKDNLKSHMKVHQHQDRGETFQCQLCPFTSSRHFSLKLHMRCHQHFLRTEAKVKEEIPDPDVKGSPHLSDSACLGQQREGGGTELVGTMMTSNTPERTSQGGAGVSPLLVKEEPKEDNGLPTSFTLNAADRPANHTKLKDPSEYVANSASALFSQDISVKMASDFLMKLSAANQKEPMNLNFKVKEEPKEGESLSTTLPRSSYVFSPESEVSAPGVSEDALKPQEGKGSVLRRDVSVKAASELLMKLSAESYKETQMVKIKEEPMEVDIQDSHVSISPSRNVGYSTLIGREKTEPLQKMPEGRVPPERNLFSQDISVKMASELLFQLSEKVSKEHNHTKENTIRTTTSPFFSEDTFRQSPFTSNSKELLPSDSVLHGRISAPETEKIVLEAGNGLPSWKFNDQLFPCDVCGKVFGRQQTLSRHLSLHTEERKYKCHLCPYAAKCRANLNQHLTVHSVKLVSTDTEDIVSAVTSEGSDGKKHPYYYSCHVCGFETELNVQFVSHMSLHVDKEQWMFSICCTACDFVTMEEAEIKTHIGTKHTGEDRKTPSESNSPSSSSLSALSDSANSKDDSDGSQKNKGGNNLLVISVMPGSQPSLNSEEKPEKGFECVFCNFVCKTKNMFERHLQIHLITRMFECDVCHKFMKTPEQLLEHKKCHTVPTGGLNSGQW

SEQ ID NO: 660 - protein, 306 aa, Homo sapiens
MGERLLESKKDHQHGEILTQVPDDMLKKKTPRVKSCGEVSVGHASLNRHHRADTGHKPYEYQEYGQKPYKCTYCKKAFSDLPYFRTHEWAHTGGKPYDCEECGKSFISRSSIRRHRIMHSGDGPYKCNFCGKALMCLSLYLIHKRTHTGEKPYECKQCGKAFSHSGSLRIHERTHTGEKPYECSECGKAFHSSTCLHAHKITHTGEKPYECKQCGKAFVSFNSVRYHERTHTGEKPYECKQCGKAFRSASHLRTHGRTHTGEKPYECKQCGKAFGCASSVKIHERTHTGEKPCSSNTSKGQGEKIA

SEQ ID NO: 661 - protein, 372 aa, Homo sapiens
MDSVVFEDVDVNFTQEEWALLDPSQKNLYRDVMQETFRNLASVGKKWKDQKIEDEYKNPRRNLRGLMGERLLESKKDHQHGEILTQVPDDMLKKKTPRVKSCGEVSVGHASLNRHHRADTGHKPYEYQEYGQKPYKCTYCKKAFSDLPYFRTHEWAHTGGKPYDCEECGKSFISRSSIRRHRIMHSGDGPYKCNFCGKALMCLSLYLIHKRTHTGEKPYECKQCGKAFSHSGSLRIHERTHTGEKPYECSECGKAFHSSTCLHAHKITHTGEKPYECKQCGKAFVSFNSVRYHERTHTGEKPYECKQCGKAFRSASHLRTHGRTHTGEKPYECKQCGKAFGCASSVKIHERTHTGEKPCSSNTSKGQGEKIA

SEQ ID NO: 662 - protein, 478 aa, Homo sapiens
MELLTFKDVAIEFSPEEWKCLDTSQQNLYRDVMLENYRNLVSLGVSISNPDLVTSLEQRKEPYNLKIHETAARPPAVCSHFTQNLWTVQGIEDSFHKLIPKGHEKRGHENLRKTCKSINECKVQKGGYNRINQCLLTTQKKTIQSNICVKVFHKFSNSNKDKIRYTGDKTFKCKECGKSFHVLSRLTQHKRIHTGENPYTCEECGKAFNWSSILTKHKRIHAREKFYKCEECGKGFTRSSHLTKHKRIHTGEKPYICEKCGKAFNQSSTLNLHKRIHSAQKYYKCEECGKAFKWSSSLNEHKRIHAGEKPFSCEECGNVFTTSSDFAKHKRIHTGEKPYKCEECGKSFNRSTTLTTHKRIHTGEKPYTCEECGKAFNWSSTLNVHKRIHSGKNPYKCEDCGKAFKVFANLHNHKKIHTGEKPYICKQCGKAFKQSSHLNKHKKIHTVDKPYKCKECGKAFKQYSNLPQHKRTHTGGKF

SEQ ID NO: 663 - protein, 446 aa, Homo sapiens
MLENYRNLVSLGVSISNPDLVTSLEQRKEPYNLKIHETAARPPAVCSHFTQNLWTVQGIEDSFHKLIPKGHEKRGHENLRKTCKSINECKVQKGGYNRINQCLLTTQKKTIQSNICVKVFHKFSNSNKDKIRYTGDKTFKCKECGKSFHVLSRLTQHKRIHTGENPYTCEECGKAFNWSSILTKHKRIHAREKFYKCEECGKGFTRSSHLTKHKRIHTGEKPYICEKCGKAFNQSSTLNLHKRIHSAQKYYKCEECGKAFKWSSSLNEHKRIHAGEKPFSCEECGNVFTTSSDFAKHKRIHTGEKPYKCEECGKSFNRSTTLTTHKRIHTGEKPYTCEECGKAFNWSSTLNVHKRIHSGKNPYKCEDCGKAFKVFANLHNHKKIHTGEKPYICKQCGKAFKQSSHLNKHKKIHTVDKPYKCKECGKAFKQYSNLPQHKRTHTGGKF

SEQ ID NO: 664 - protein, 216 aa, Homo sapiens
MSEAYFRVESGALGPEENFLSLDDILMSHEKLPVRTETAMPRLGAFFLERSAGAETDNAVPQGSKLELPLWLAKGLFDNKRRILSVELPKIYQEGWRTVFSADPNVVDLHKMGPHFYGFGSQLLHFDSPENADISQSLLQTFIGRFRRIMDSSQNAYNEDTSALVARLDEMERGLFQTGQKGLNDFQCWEKGQASQITASNLVQNYKKRKFTDMED

SEQ ID NO: 665 - protein, 138 aa, Homo sapiens
MSEAYFRVESGALGPEENFLSLDDILMSHEKLPVRTETAMPRLGAFFLERSAGAETDNAVPQTFIGRFRRIMDSSQNAYNEDTSALVARLDEMERGLFQTGQKGLNDFQCWEKGQASQITASNLVQNYKKRKFTDMED

SEQ ID NO: 666 - protein, 255 aa, Homo sapiens
MSEAYFRVESGALGPEENFLSLDDILMSHEKLPVRTETAMPRLGAFFLERSAGAETDNAVPQGFALLPRLECSGVIWLTAALTSQAPEILPPQPPMWLVLQGSKLELPLWLAKGLFDNKRRILSVELPKIYQEGWRTVFSADPNVVDLHKMGPHFYGFGSQLLHFDSPENADISQSLLQTFIGRFRRIMDSSQNAYNEDTSALVARLDEMERGLFQTGQKGLNDFQCWEKGQASQITASNLVQNYKKRKFTDMED

SEQ ID NO: 667 - protein, 342 aa, Homo sapiens
MEPHDSSHMDSEFRYTLFPIVYSIIFVLGVIANGYVLWVFARLYPCKKFNEIKIFMVNLTMADMLFLITLPLWIVYYQNQGNWILPKFLCNVAGCLFFINTYCSVAFLGVITYNRFQAVTRPIKTAQANTRKRGISLSLVIWVAIVGAASYFLILDSTNTVPDSAGSGNVTRCFEHYEKGSVPVLIIHIFIVFSFFLVFLIILFCNLVIIRTLLMQPVQQQRNAEVKRRALWMVCTVLAVFIICFVPHHVVQLPWTLAELGFQDSKFHQAINDAHQVTLCLLSTNCVLDPVIYCFLTKKFRKHLTEKFYSMRSSRKCSRATTDTVTEVVVPFNQIPGNSLKN

SEQ ID NO: 668 - protein, 159 aa, Homo sapiens [sequence omitted]

SEQ ID NO: 669 - protein, 251 aa, Homo sapiens
MAEDLGLSFGETASVEMLPEHGSCRPKARSSSARWALTCCLVLLPFLAGLTTYLLVSQLRAQGEACVQFQALKGQEFAPSHQQVYAPLRADGDKPRAHLTVVRQTPTQHFKNQFPALHWEHELGLAFTKNRMNYTNKFLLIPESGDYFIYSQVTFRGMTSECSEIRQAGRPNKPDSITVVITKVTDSYPEPTQLLMGTKSVCEVGSNWFQPIYLGAMFSLQEGDKLMVNVSDISLVDYTKEDKTFFGAFLL

SEQ ID NO: 670 - protein, 192 aa, Homo sapiens
MQLTKGRLHFSHPLSHTKHISPFVTDAPLRADGDKPRAHLTVVRQTPTQHFKNQFPALHWEHELGLAFTKNRMNYTNKFLLIPESGDYFIYSQVTFRGMTSECSEIRQAGRPNKPDSITVVITKVTDSYPEPTQLLMGTKSVCEVGSNWFQPIYLGAMFSLQEGDKLMVNVSDISLVDYTKEDKTFFGAFLL

SEQ ID NO: 671 - protein, 174 aa, Homo sapiens
MRRFLSKVYSFPMRKLILFLVFPVVRQTPTQHFKNQFPALHWEHELGLAFTKNRMNYTNKFLLIPESGDYFIYSQVTFRGMTSECSEIRQAGRPNKPDSITVVITKVTDSYPEPTQLLMGTKSVCEVGSNWFQPIYLGAMFSLQEGDKLMVNVSDISLVDYTKEDKTFFGAFLL

SEQ ID NO: 672 - protein, 281 aa, Homo sapiens
MQQPFNYPYPQIYWVDSSASSPWAPPGTVLPCPTSVPRRPGQRRPPPPPPPPPLPPPPPPPPLPPLPLPPLKKRGNHSTGLCLLVMFFMVLVALVGLGLGMFQLFHLQKELAELRESTSQMHTASSLEKQIGHPSPPPEKKELRKVAHLTGKSNSRSMPLEWEDTYGIVLLSGVKYKKGGLVINETGLYFVYSKVYFRGQSCNNLPLSHKVYMRNSKYPQDLVMMEGKMMSYCTTGQMWARSSYLGAVFNLTSADHLYVNVSELSLVNFEESQTFFGLYKL

SEQ ID NO: 673 - protein, 127 aa, Homo sapiens
MQQPFNYPYPQIYWVDSSASSPWAPPGTVLPCPTSVPRRPGQRRPPPPPPPPPLPPPPPPPPLPPLPLPPLKKRGNHSTGLCLLVMFFMVLVALVGLGLGMFQLFHLQKELAELREATPVHPLKKRS

SEQ ID NO: 674 - protein, 551 aa, Homo sapiens
MNESPDPTDLAGVIIELGPNDSPQTSEFKGATEEAPAKESPHTSEFKGAARVSPISESVLARLSKFEVEDAENVASYDSKIKKIVHSIVSSFAFGLFGVFLVLLDVTLILADLIFTDSKLYIPLEYRSISLAIALFFLMDVLLRVFVERRQQYFSDLFNILDTAIIVILLLVDVVYIFFDIKLLRNIPRWTHLLRLLRLIILLRIFHLFHQKRQLEKLIRRRVSENKRRYTRDGFDLDLTYVTERIIAMSFPSSGRQSFYRNPIKEVVRFLDKKHRNHYRVYNLCSERAYDPKHFHNRVVRIMIDDHNVPTLHQMVVFTKEVNEWMAQDLENIVAIHCKGGTDRTGTMVCAFLIASEICSTAKESLYYFGERRTDKTHSEKFQGVKTPSQKRYVAYFAQVKHLYNWNLPPRRILFIKHFIIYSIPRYVRDLKIQIEMEKKVVFSTISLGKCSVLDNITTDKILIDVFDGLPLYDDVKVQFFYSNLPTYYDNCSFYFWLHTSFIENNRLYLPKNELDNLHKQKARRIYPSDFAVEILFGEKMTSSDVVAGSD

SEQ ID NO: 675 - protein, 533 aa, Homo sapiens
MNESPDPTDLAGVIIELGPNDSPQTSEFKGATEEAPAKESVLARLSKFEVEDAENVASYDSKIKKIVHSIVSSFAFGLFGVFLVLLDVTLILADLIFTDSKLYIPLEYRSISLAIALFFLMDVLLRVFVERRQQYFSDLFNILDTAIIVILLLVDVVYIFFDIKLLRNIPRWTHLLRLLRLIILLRIFHLFHQKRQLEKLIRRRVSENKRRYTRDGFDLDLTYVTERIIAMSFPSSGRQSFYRNPIKEVVRFLDKKHRNHYRVYNLCSERAYDPKHFHNRVVRIMIDDHNVPTLHQMVVFTKEVNEWMAQDLENIVAIHCKGGTDRTGTMVCAFLIASEICSTAKESLYYFGERRTDKTHSEKFQGVKTPSQKRYVAYFAQVKHLYNWNLPPRRILFIKHFIIYSIPRYVRDLKIQIEMEKKVVFSTISLGKCSVLDNITTDKILIDVFDGLPLYDDVKVQFFYSNLPTYYDNCSFYFWLHTSFIENNRLYLPKNELDNLHKQKARRIYPSDFAVEILFGEKMTSSDVVAGSD

SEQ ID NO: 676 - protein, 513 aa, Homo sapiens
MNESPDPTDLAGVIIELGPNDSPQTSEFKGATEEAPAKESSKIKKIVHSIVSSFAFGLFGVFLVLLDVTLILADLIFTDSKLYIPLEYRSISLAIALFFLMDVLLRVFVERRQQYFSDLFNILDTAIIVILLLVDVVYIFFDIKLLRNIPRWTHLLRLLRLIILLRIFHLFHQKRQLEKLIRRRVSENKRRYTRDGFDLDLTYVTERIIAMSFPSSGRQSFYRNPIKEVVRFLDKKHRNHYRVYNLCSERAYDPKHFHNRVVRIMIDDHNVPTLHQMVVFTKEVNEWMAQDLENIVAIHCKGGTDRTGTMVCAFLIASEICSTAKESLYYFGERRTDKTHSEKFQGVKTPSQKRYVAYFAQVKHLYNWNLPPRRILFIKHFIIYSIPRYVRDLKIQIEMEKKVVFSTISLGKCSVLDNITTDKILIDVFDGLPLYDDVKVQFFYSNLPTYYDNCSFYFWLHTSFIENNRLYLPKNELDNLHKQKARRIYPSDFAVEILFGEKMTSSDVVAGSD

SEQ ID NO: 677 - protein, 413 aa, Homo sapiens
MDVLLRVFVERRQQYFSDLFNILDTAIIVILLLVDVVYIFFDIKLLRNIPRWTHLLRLLRLIILLRIFHLFHQKRQLEKLIRRRVSENKRRYTRDGFDLDLTYVTERIIAMSFPSSGRQSFYRNPIKEVVRFLDKKHRNHYRVYNLCSERAYDPKHFHNRVVRIMIDDHNVPTLHQMVVFTKEVNEWMAQDLENIVAIHCKGGTDRTGTMVCAFLIASEICSTAKESLYYFGERRTDKTHSEKFQGVKTPSQKRYVAYFAQVKHLYNWNLPPRRILFIKHFIIYSIPRYVRDLKIQIEMEKKVVFSTISLGKCSVLDNITTDKILIDVFDGLPLYDDVKVQFFYSNLPTYYDNCSFYFWLHTSFIENNRLYLPKNELDNLHKQKARRIYPSDFAVEILFGEKMTSSDVVAGSD

SEQ ID NO: 678 - protein, 284 aa, Homo sapiens
MDAIKKKMQMLKLDKENALDRAEQAEADKKAAEDRSKQLEDELVSLQKKLKGTEDELDKYSEALKDAQEKLELAEKKATDAEADVASLNRRIQLVEEELDRAQERLATALQKLEEAEKAADESERGMKVIESRAQKDEEKMEIQEIQLKEAKHIAEDADRKYEEVARKLVIIESDLERAEERAELSEGKCAELEEELKTVTNNLKSLEAQAEKYSQKEDRYEEEIKVLSDKLKEAETRAEFAERSVTKLEKSIDDLEDELYAQKLKYKAISEELDHALNDMTSI

SEQ ID NO: 679 - protein, 228 aa, Homo sapiens
MCRLRIFLRTASSEHLHERKLRETAEADVASLNRRIQLVEEELDRAQERLATALQKLEEAEKAADESERGMKVIESRAQKDEEKMEIQEIQLKEAKHIAEDADRKYEEVARKLVIIESDLERAEERAELSEGQVRQLEEQLRIMDSDLESINAAEDKYSQKEDRYEEEIKVLSDKLKEAETRAEFAERSVTKLEKSIDDLEEKVAHAKEENLSMHQMLDQTLLELNNM

SEQ ID NO: 680 - protein, 284 aa, Homo sapiens
MDAIKKKMQMLKLDKENALDRAEQAEADKKAAEDRSKQLEDELVSLQKKLKGTEDELDKYSEALKDAQEKLELAEKKATDAEADVASLNRRIQLVEEELDRAQERLATALQKLEEAEKAADESERGMKVIESRAQKDEEKMEIQEIQLKEAKHIAEDADRKYEEVARKLVIIESDLERAEERAELSEGQVRQLEEQLRIMDQTLKALMAAEDKYSQKEDRYEEEIKVLSDKLKEAETRAEFAERSVTKLEKSIDDLEEKVAHAKEENLSMHQMLDQTLLELNNM

SEQ ID NO: 681 - protein, 284 aa, Homo sapiens
MDAIKKKMQMLKLDKENALDRAEQAEADKKAAEDRSKQLEDELVSLQKKLKGTEDELDKYSEALKDAQEKLELAEKKATDAEADVASLNRRIQLVEEELDRAQERLATALQKLEEAEKAADESERGMKVIESRAQKDEEKMEIQEIQLKEAKHIAEDADRKYEEVARKLVIIESDLERAEERAELSEGQVRQLEEQLRIMDQTLKALMAAEDKYSQKEDRYEEEIKVLSDKLKEAETRAEFAERSVTKLEKSIDDLEDELYAQKLKYKAISEELDHALNDMTSI

SEQ ID NO: 682 - protein, 245 aa, Homo sapiens
MAGSSSLEAVRRKIRSLQEQADAAEERAGTLQRELDHERKLRETAEADVASLNRRIQLVEEELDRAQERLATALQKLEEAEKAADESERGMKVIESRAQKDEEKMEIQEIQLKEAKHIAEDADRKYEEVARKLVIIESDLERAEERAELSEGKCAELEEELKTVTNNLKSLEAQAEKYSQKEDRYEEEIKVLSDKLKEAETRAEFAERSVTKLEKSIDDLEDQLYQQLEQNRRLTNELKLALNED

SEQ ID NO: 683 - protein, 284 aa, Homo sapiens
MDAIKKKMQMLKLDKENALDRAEQAEADKKAAEDRSKQLEEDIAAKEKLLRVSEDERDRVLEELHKAEDSLLAAEEAAAKAEADVASLNRRIQLVEEELDRAQERLATALQKLEEAEKAADESERGMKVIESRAQKDEEKMEIQEIQLKEAKHIAEDADRKYEEVARKLVIIESDLERAEERAELSEGKCAELEEELKTVTNNLKSLEAQAEKYSQKEDRYEEEIKVLSDKLKEAETRAEFAERSVTKLEKSIDDLEDELYAQKLKYKAISEELDHALNDMTSI

SEQ ID NO: 684 - protein, 284 aa, Homo sapiens
MDAIKKKMQMLKLDKENALDRAEQAEADKKAAEDRSKQLEEDIAAKEKLLRVSEDERDRVLEELHKAEDSLLAAEEAAAKAEADVASLNRRIQLVEEELDRAQERLATALQKLEEAEKAADESERGMKVIESRAQKDEEKMEIQEIQLKEAKHIAEDADRKYEEVARKLVIIESDLERAEERAELSEGKCAELEEELKTVTNNLKSLEAQAEKYSQKEDRYEEEIKVLSDKLKEAETRAEFAERSVTKLEKSIDDLEEKVAHAKEENLSMHQMLDQTLLELNNM

SEQ ID NO: 685 - protein, 284 aa, Homo sapiens
MDAIKKKMQMLKLDKENALDRAEQAEADKKAAEDRSKQLEEDIAAKEKLLRVSEDERDRVLEELHKAEDSLLAAEEAAAKAEADVASLNRRIQLVEEELDRAQERLATALQKLEEAEKAADESERGMKVIESRAQKDEEKMEIQEIQLKEAKHIAEDADRKYEEVARKLVIIESDLERAEERAELSEGQVRQLEEQLRIMDQTLKALMAAEDKYSQKEDRYEEEIKVLSDKLKEAETRAEFAERSVTKLEKSIDDLEEKVAHAKEENLSMHQMLDQTLLELNNM

SEQ ID NO: 686 - protein, 284 aa, Homo sapiens
MDAIKKKMQMLKLDKENALDRAEQAEADKKAAEDRSKQLEDELVSLQKKLKGTEDELDKYSEALKDAQEKLELAEKKATDAEADVASLNRRIQLVEEELDRAQERLATALQKLEEAEKAADESERGMKVIESRAQKDEEKMEIQEIQLKEAKHIAEDADRKYEEVARKLVIIESDLERAEERAELSEGKCAELEEELKTVTNNLKSLEAQAEKYSQKEDRYEEEIKVLSDKLKEAETRAEFAERSVTKLEKSIDDLEEKVAHAKEENLSMHQMLDQTLLELNNM

SEQ ID NO: 687 - protein, 284 aa, Homo sapiens
MDAIKKKMQMLKLDKENALDRAEQAEADKKAAEDRSKQLEDELVSLQKKLKGTEDELDKYSEALKDAQEKLELAEKKATDAEADVASLNRRIQLVEEELDRAQERLATALQKLEEAEKAADESERGMKVIESRAQKDEEKMEIQEIQLKEAKHIAEDADRKYEEVARKLVIIESDLERAEERAELSEGQVRQLEEQLRIMDQTLKALMAAEDKYSQKEDRYEEEIKVLSDKLKEAETRAEFAERSVTKLEKSIDDLEDELYAQKLKYKAISEELDHALNDMTSM

SEQ ID NO: 688 - protein, 275 aa, Homo sapiens
MACPGFLWALVISTCLEFSMAQTVTQSQPEMSVQEAETVTLSCTYDTSESDYYLFWYKQPPSRQMILVIRQEAYKQQNATENRFSVNFQKAAKSFSLKISDSQLGDAAMYFCAYRSAVNARLMFGDGTQLVVKPNIQNPDPAVYQLRDSKSSDKSVCLFTDFDSQTNVSQSKDSDVYITDKTVLDMRSMDFKSNSAVAWSNKSDFACANAFNNSIIPEDTFFPSPESSCDVKLVEKSFETDTNLNFQNLSVIGFRILLLKVAGFNLLMTLRLWSS

SEQ ID NO: 689 - protein, 194 aa, Homo sapiens
MKGLYQAAGRILVTLGILSVCSGVIAFFPVFSYKPWFTGWSVRIACPIWNGALAITTGVLLLLAYREWTQRYLGEATFTFVILSIMGCPLHFAIALESALLGPYCFYSFSGIAGTNYLGYAVTFPYPYAKFPLACVDPPHYEEYHLTLQALDLCLSFTLLCTSLTVFIKLSARLIQNGHINMQLPAGNPNPFSP

SEQ ID NO: 690 - protein, 213 aa, Homo sapiens
MAALLRAVRRFRGKAVWERPLHGLWCCSGQEDPKRWVGSSSPISKEKLPNAETEKFWMFYRFDAIRTFGFLSRLKLAQTALTVVALPPGYYLYSQGLLTLNTVCLMSGISGFALTMLCWMSYFLRRLVGILYLNESGTMLRVAHLNFWGWRQDTYCPMADVIPLTETKDRPQEMFVRIQRYSGKQTFYVTLRYGRILDRERFTQVFGVHQMLK

SEQ ID NO: 691 - protein, 401 aa, Homo sapiens
MNNLLCCALVFLDISIKWTTQETFPPKYLHYDEETSHQLLCDKCPPGTYLKQHCTAKWKTVCAPCPDHYYTDSWHTSDECLYCSPVCKELQYVKQECNRTHNRVCECKEGRYLEIEFCLKHRSCPPGFGVVQAGTPERNTVCKRCPDGFFSNETSSKAPCRKHTNCSVFGLLLTQKGNATHDNICSGNSESTQKCGIDVTLCEEAFFRFAVPTKFTPNWLSVLVDNLPGTKVNAESVERIKRQHSSQEQTFQLLKLWKHQNKDQDIVKKIIQDIDLCENSVQRHIGHANLTFEQLRSLMESLPGKKVGAEDIEKTIKACKPSDQILKLLSLWRIKNGDQDTLKGLMHALKHSKTYHFPKTVTQSLKKTIRFLHSFTMYKLYQKLFLEMIGNQVQSVKISCL

SEQ ID NO: 692 - protein, 659 aa, Homo sapiens
MQGSSLWLSLTFRSARVLSRARFFEWQSPGLPNTAAMENGTGPYGEERPREVQETTVTEGAAKIAFPSANEVFYNPVQEFNRDLTCAVITEFARIQLGAKGIQIKVPGEKDTQKVVVDLSEQEEEKVELKESENLASGDQPRTAAVGEICEEGLHVLEGLAASGLRSIRFALEVPGLRSVVANDASTRAVDLIRRNVQLNDVAHLVQPSQADARMLMYQHQRVSERFDVIDLDPYGSPATFLDAAVQAVSEGGLLCVTCTDMAVLAGNSGETCYSKYGAMALKSRACHEMALRIVLHSLDLRANCYQRFVVPLLSISADFYVRVFVRVFTGQAKVKASASKQALVFQCVGCGAFHLQRLGKASGVPSGRAKFSAACGPPVTPECEHCGQRHQLGGPMWAEPIHDLDFVGRVLEAVSANPGRFHTSERIRGVLSVITEELPDVPLYYTLDQLSSTIHCNTPSLLQLRSALLHADFRVSLSHACKNAVKTDAPASALWDIMRCWEKECPVKRERLSETSPAFRILSVEPRLQANFTIREDANPSSRQRGLKRFQANPEANWGPRPRARPGGKAADEAMEERRRLLQNKRKEPPEDVAQRAARLKTFPCKRFKEGTCQRGDQCCYSHSPPTPRVSADAAPDCPETSNQTPPGPGAAAGPGID

SEQ ID NO: 693 - protein, 630 aa, Homo sapiens
MQGSSLWLSLTFRSARVLSRARFFEWQSPGLPNTAAMENGTGPYGEERPREVQETTVTEGAAKIAFPSANEVFYNPVQEFNRDLTCAVITEFARIQLGAKGIQIKVPGEKDTQKVVVDLSEQEEEKVELKESENLASGDQPRTAAVGEICEEGLHVLEGLAASGLRSIRFALEVPGLRSVVANDASTRAVDLIRRNVQLNDVAHLVQPSQADARMLMYQHQRVSERFDVIDLDPYGSPATFLDAAVQAVSEGGLLCVTCTDMAVLAGNSGETCYSKYGAMALKSRACHEMALRIVLHSLDLRANCYQRFVVPLLSISADFYVRVFVRVFTGQAKVKASARAKFSAACGPPVTPECEHCGQRHQLGGPMWAEPIHDLDFVGRVLEAVSANPGRFHTSERIRGVLSVITEELPDVPLYYTLDQLSSTIHCNTPSLLQLRSALLHADFRVSLSHACKNAVKTDAPASALWDIMRCWEKECPVKRERLSETSPAFRILSVEPRLQANFTIREDANPSSRQRGLKRFQANPEANWGPRPRARPGGKAADEAMEERRRLLQNKRKEPPEDVAQRAARLKTFPCKRFKEGTCQRGDQCCYSHSPPTPRVSADAAPDCPETSNQTPPGPGAAAGPGID

SEQ ID NO: 694 - protein, 493 aa, Homo sapiens
MERSPDVSPGPSRSFKEELLCAVCYDPFRDAVTLRCGHNFCRGCVSRCWEVQVSPTCPVCKDRASPADLRTNHTLNNLVEKLLREEAEGARWTSYRFSRVCRLHRGQLSLFCLEDKELLCCSCQADPRHQGHRVQPVKDTAHDFRAKCRNMEHALREKAKAFWAMRRSYEAIAKHNQVEAAWLEGRIRQEFDKLREFLRVEEQAILDAMAEETRQKQLLADEKMKQLTEETEVLAHEIERLQMEMKEDDVSFLMKHKSRKRRLFCTMEPEPVQPGMLIDVCKYLGSLQYRVWKKMLASVESVPFSFDPNTAAGWLSVSDDLTSVTNHGYRVQVENPERFSSAPCLLGSRVFSQGSHAWEVALGGLQSWRVGVVRVRQDSGAEGHSHSCYHDTRSGFWYVCRTQGVEGDHCVTSDPATSPLVLAIPRRLRVELECEEGELSFYDAERHCHLYTFHARFGEVRPYFYLGGARGAGPPEPLRICPLHISVKEELDG

SEQ ID NO: 695 - protein, 493 aa, Homo sapiens
MERSPDVSPGPSRSFKEELLCAVCYDPFRDAVTLRCGHNFCRGCVSRCWEVQVSPTCPVCKDRASPADLRTNHTLNNLVEKLLREEAEGARWTSYRFSRVCRLHRGQLSLFCLEDKELLCCSCQADPRHQGHRVQPVKDTAHDFRVRSLIAEERRNFLPTHQWIVTKTRLQTSSPNLQSRRQGQVQEHGACTAGEGQGLLGHAALLDAMAEETRQKQLLADEKMKQLTEETEVLAHEIERLQMEMKEDDVSFLMKHKSRKRRLFCTMEPEPVQPGMLIDVCKYLGSLQYRVWKKMLASVESVPFSFDPNTAAGWLSVSDDLTSVTNHGYRVQVENPERFSSAPCLLGSRVFSQGSHAWEVALGGLQSWRVGVVRVRQDSGAEGHSHSCYHDTRSGFWYVCRTQGVEGDHCVTSDPATSPLVLAIPRRLRVELECEEGELSFYDAERHCHLYTFHARFGEVRPYFYLGGARGAGPPEPLRICPLHISVKEELDG

SEQ ID NO: 696 - protein, 272 aa, Homo sapiens
MLQLRDSVDSAGTSPTAVLAAGEEVGAGGGPGGGRPGAGTPLRQTLWPLSIHDPTRRARVKEYFVFRPGSIEQAVEEIRVVVRPVEDGEIQGVWLLTEVDHWNNEKERLVLVTEQSLLICKYDFISLQCQQVVRIALNAVDTISYGEFQFPPKSLNKREGFGIRIQWDKQSRPSFINRWNPWSTNVPYATFTEHPMAGADEKTASLCQLESFKALLIQAVKKAQKESPLPGQANGVLILERPLLIETYVGLMSFINNEAKLGYSMTRGKIGF

SEQ ID NO: 697 - protein, 213 aa, Homo sapiens
MLQLRDSVDSAGTSPTAVLAAGEEVGAGGGPGGGRPGAGTPLRQTLWPLSIHDPTRRARVKEYFVFRPGSIEQAVEEIRVVVRPVEDGEIQGVWLLTEREGFGIRIQWDKQSRPSFINRWNPWSTNVPYATFTEHPMAGADEKTASLCQLESFKALLIQAVKKAQKESPLPGQANGVLILERPLLIETYVGLMSFINNEAKLGYSMTRGKIGF

SEQ ID NO: 698 - protein, 178 aa, Homo sapiens
DLKNVFPPKVAVFEPSEAEISHTQKATLVCLATGFYPDHVELSWWVNGKEVHSGVSTDPQPLKEQPALNDSRYCLSSRLRVSATFWQNPRNHFRCQVQFYGLSENDEWTQDRAKPVTQIVSAEAWGRADCGFTSESYQQGVLSATILYEILLGKATLYAVLVSALVLMAMVKRKDSRG

SEQ ID NO: 699 - protein, 107 aa, Homo sapiens
MQRLPAATRATLILSLAFASLHSACSAEASSSNSSSLTAHHPDPGTLEQCLNVDFCPQAARCCRTGVDEYGWIAAAVGWSLWFLTLILLCVDKLMKLTPDEPKDLQA

SEQ ID NO: 700 - protein, 83 aa, Homo sapiens
MQRLPAATRATLILSLAFASLHSACSADVDFCPQAARCCRTGVDEYGWIAAAVGWSLWFLTLILLCVDKLMKLTPDEPKDLQA

SEQ ID NO: 701 - protein, 106 aa, Homo sapiens
MQRLPAATRATLILSLAFASLHSACSAASSSNSSSLTAHHPDPGTLEQCLNVDFCPQAARCCRTGVDEYGWIAAAVGWSLWFLTLILLCVDKLMKLTPDEPKDLQA

SEQ ID NO: 702 - protein, 105 aa, Homo sapiens
MQRLPAATRATLILSLAFASLHSACSAEASSSNSSSLTAHHPDPGTLEQCLRSGYLANLRGEADQLWKFCTVLCFWESRRSSSRIALMREAEEWPGWRSSVELVG

SEQ ID NO: 703 - protein, 461 aa, Homo sapiens
MAPVAVWAALAVGLELWAAAHALPAQVAFTPYAPEPGSTCRLREYYDQTAQMCCSKCSPGQHAKVFCTKTSDTVCDSCEDSTYTQLWNWVPECLSCGSRCSSDQVETQACTREQNRICTCRPGWYCALSKQEGCRLCAPLRKCRPGFGVARPGTETSDVVCKPCAPGTFSNTTSSTDICRPHQICNVVAIPGNASMDAVCTSTSPTRSMAPGAVHLPQPVSTRSQHTQPTPEPSTAPSTSFLLPMGPSPPAEGSTGDFALPVGLIVGVTALGLLIIGVVNCVIMTQVKKKPLCLQREAKVPHLPADKARGTQGPEQQHLLITAPSSSSSSLESSASALDRRAPTRNQPQAPGVEASGAGEARASTGSSDSSPGGHGTQVNVTCIVNVCSSSDHSSQCSSQASSTMGDTDSSPSESPKDEQVPFSKEECAFRSQLETPETLLGSTEEKPLPLGVPDAGMKPS

SEQ ID NO: 704 - protein, 268 aa, Homo sapiens
MAPVAVWAALAVGLELWAAAHALPAQVAFTPYAPEPGSTCRLREYYDQTAQMCCSKCSPGQHAKVFCTKTSDTVCDSCEDSTYTQLWNWVPECLSCGSRCSSDQVETQACTREQNRICTCRPGWYCALSKQEGCRLCAPLRKCRPGFGVARPGTETSDVVCKPCAPGTFSNTTSSTDICRPHQICNVVAIPGNASMDAVCTSTSPTRSMAPGAVHLPQPVSTRSQHTQPTPEPSTAPSTSFLLPMGPSPPAEGSTGDFALPVASLACR

SEQ ID NO: 705 - protein, 184 aa, Homo sapiens
MLQMAGQCSQNEYFDSLLHACIPCQLRCSSNTPPLTCQRYCNASVTNSVKGTNAILWTCLGLSLIISLAVFVLMFLLRKINSEPLKDEFKNTGSGLLGMANIDLEKSRTGDEIILPRGLEYTVEECTCEDCIKSKPKVDSDHCFPLPAMEEGATILVTTKTNDYCKSLPAALSATEIEKSISAR

SEQ ID NO: 706 - protein, 135 aa, Homo sapiens
MLQMAGQCSQNEYFDSLLHACIPCQLRCSSNTPPLTCQRYCNARSGLLGMANIDLEKSRTGDEIILPRGLEYTVEECTCEDCIKSKPKVDSDHCFPLPAMEEGATILVTTKTNDYCKSLPAALSATEIEKSISAR

SEQ ID NO: 707 - protein, 2542 aa, Homo sapiens
MVALSLKICVRHCNVVKTMQFEPSTAVYDACRVIRERVPEAQTGQASDYGLFLSDEDPRKGIWLEAGRTLDYYMLRNGDILEYKKKQRPQKIRMLDGSVKTVMVDDSKTVGELLVTICSRIGITNYEEYSLIQETIEEKKEEGTGTLKKDRTLLRDERKMEKLKAKLHTDDDLNWLDHSRTFREQGVDENETLLLRRKFFYSDQNVDSRDPVQLNLLYVQARDDILNGSHPVSFEKACEFGGFQAQIQFGPHVEHKHKPGFLDLKEFLPKEYIKQRGAEKRIFQEHKNCGEMSEIEAKVKYVKLARSLRTYGVSFFLVKEKMKGKNKLVPRLLGITKDSVMRVDEKTKEVLQEWPLTTVKRWAASPKSFTLDFGEYQESYYSVQTTEGEQISQLIAGYIDIILKKKQSKDRFGLEGDEESTMLEESVSPKKSTILQQQFNRTGKAEHGSVALPAVMRSGSSGPETFNVGSMPSPQQQVMVGQMHRGHMPPLTSAQQALMGTINTSMHAVQQAQDDLSELDSLPPLGQDMASRVWVQNKVDESKHEIHSQVDAITAGTASVVNLTAGDPADTDYTAVGCAITTISSNLTEMSKGVKLLAALMDDEVGSGEDLLRAARTLAGAVSDLLKAVQPTSGEPRQTVLTAAGSIGQASGDLLRQIGENETDERFQDVLMSLAKAVANAAAMLVLKAKNVAQVAEDTVLQNRVIAAATQCALSTSQLVACAKVVSPTISSPVCQEQLIEAGKLVDRSVENCVRACQAATTDSELLKQVSAAASVVSQALHDLLQHVRQFASRGEPIGRYDQATDTIMCVTESIFSSMGDAGEMVRQARVLAQATSDLVNAMRSDAEAEIDMENSKKLLAAAKLLADSTARMVEAAKGAAANPENEDQQQRLREAAEGLRVATNAAAQNAIKKKIVNRLEVAAKQAAAAATQTIAASQNAAVSNKNPAAQQQLVQSCKAVADHIPQLVQGVRGSQAQAEDLSAQLALIISSQNFLQPGSKMVSSAKAAVPTVSDQAAAMQLSQCAKNLATSLAELRTASQKAHEACGPMEIDSALNTVQTLKNELQDAKMAAVESQLKPLPGETLEKCAQDLGSTSKAVGSSMAQLLTCAAQGNEHYTGVAARETAQALKTLAQAARGVAASTTDPAAAHAMLDSARDVMEGSAMLIQEAKQALIAPGDAERQQRLAQVAKAVSHSLNNCVNCLPGQKDVDVALKSIGESSKKLLVDSLPPSTKPFQEAQSELNQAAADLNQSAGEVVHATRGQSGELAAASGKFSDDFDEFLDAGIEMAGQAQTKEDQIQVIGNLKNISMASSKLLLAAKSLSVDPGAPNAKNLLAAAARAVTESINQLITLCTQQAPGQKECDNALRELETVKGMLDNPNEPVSDLSYFDCIESVMENSKVLGESMAGISQNAKTGDLPAFGECVGIASKALCGLTEAAAQAAYLVGISDPNSQAGHQGLVDPIQFARANQAIQMACQNLVDPGSSPSQVLSAATIVAKHTSALCNACRIASSKTANPVAKRHFVQSAKEVANSTANLVKTIKALDGDFSEDNRNKCRIATAPLIEAVENLTAFASNPEFVSIPAQISSEGSQAQEPILVSAKTMLESSSYLIRTARSLAINPKDPPTWSVLAGHSHTVSDSIKSLITSIRDKAPGQRECDYSIDGINRCIRDIEQASLAAVSQSLATRDDISVEALQEQLTSVVQEIGHLIDPIATAARGEAAQLGHKVTQLASYFEPLILAAVGVASKILDHQQQMTVLDQTKTLAESALQMLYAAKEGGGNPKAQHTHDAITEAAQLMKEAVDDIMVTLNEAASEVGLVGGMVDAIAEAMSKLDEGTPPEPKGTFVDYQTTVVKYSKAIAVTAQEMMTKSVTNPEELGGLASQMTSDYGHLAFQGQMAAATAEPEEIGFQIRTRVQDLGHGCIFLVQKAGALQVCPTDSYTKRELIECARAVTEKVSLVLSALQAGNKGTQACITAATAVSGIIADLDTTIMFATAGTLNAENSETFADHRENILKTAKALVEDTKLLVSGAASTPDKLAQAAQSSAATITQLAEVVKLGAASLGSDDPETQVVLINAIKDVAKALSDLISATKGAASKPVDDPSMYQLKGAAKVMVTNVTSLLKTVKAVEDEATRGTRALEATIECIKQELTVFQSKDVPEKTSSPEESIRMTKGITMATAKAVAAGNSCRQEDVIATANLSRKAVSDMLTACKQASFHPDVSDEVRTRALRFGTECTLGYLDLLEHVLVILQKPTPEFKQQLAAFSKRVAGAVTELIQAAEAMKGTEWVDPEDPTVIAETELLGAAASIEAAAKKLEQLKPRAKPKQADETLDFEEQILEAAKSIAAATSALVKSASAAQRELVAQGKVGSIPANAADDGQWSQGLISAARMVAAATSSLCEAANASVQGHASEEKLISSAKQVAASTAQLLVACKVKADQDSEAMRRLQAAGNAVKRASDNLVRAAQKAAFGKADDDDVVVKTKFVGGIAQIIAAQEEMLKKERELEEARKKLAQIRQQQYKFLPTELREDEG

SEQ ID NO: 708 - protein, 202 aa, Homo sapiens
MRGHPSLLLLYMALTTCLDTSPSEETDQEVFLGPPEAQSFLSSHTRIPRANHWDLELLTPGNLERECLEERCSWEEAREYFEDNTLTERFWESYIYNGKGGRGRVDVASLAVGLTGGILLIVLAGLGAFWYLRWRQHRGQQPCPQEAGLISPLSPLNPLGPPTPLPPPPPPPPGLPTYEQALAASGVHDAPPPPYTSLRRPH

SEQ ID NO: 709 - protein, 110 aa, Homo sapiens
MGASGSKARGLWPFASAAGGGGSEAAGAEQALVRPRGRAVPPFVFTRRGSMFYDEDGDLAHEFYEETIVTKNGQKRAKLRRVHKNLIPQGIVKLDHPRIHVDFPVILYEV

SEQ ID NO: 710 - protein, 170 aa, Homo sapiens
MRLQGAIFVLLPHLGPILVWLFTRDHMSGWCEGPRMLSWCPFYKVLLLVQTAIYSVVGYASYLVWKDLGGGLGWPLALPLGLYAVQLTISWTVLVLFFTVHNPGLALLHLLLLYGLVVSTALIWHPINKLAALLLLPYLAWLTVTSALTYHLWRDSLCPVHQPQPTEKSD

SEQ ID NO: 711 - protein, 70 aa, Homo sapiens
MRLQGAIFVLLPHLGPILVWLFTRDHMSGWCEGPRMLSWCPFYKVLLLVQTAIYSVVGPCCTCCCCMGWW

SEQ ID NO: 712 - protein, 705 aa, Homo sapiens
MDADKEKDLQKFLKNVDEISNLIQEMNSDDPVVQQKAVLETEKRLLLMEEDQEEDECRTTLNKTMISPPQTAMKSAEEINSEAFLASVEKDAKERAKRRRENKVLADALKEKGNEAFAEGNYETAILRYSEGLEKLKDMKVLYTNRAQAYMKLEDYEKALVDCEWALKCDEKCTKAYFHMGKANLALKNYSVSRECYKKILEINPKLQTQVKGYLNQVDLQEKADLQEKEAHELLDSGKNTAVTTKNLLETLSKPDQIPLFYAGGIEILTEMINECTEQTLFRMHNGFSIISDNEVIRRCFSTAGNDAVEEMVCVSVLKLWQAVCSRNEENQRVLVIHHDRARLLAALLSSKVLAIRQQSFALLLHLAQTESGRSLIINHLDLTRLLEALVSFLDFSDKEANTAMGLFTDLALEERFQVWFQANLPGVLPALTGVLKTDPKVSSSSALCQCIAIMGNLSAEPTTRRHMAACEEFGDGCLSLLARCEEDVDLFREVIYTLLGLMMNLCLQAPFVSEVWAVEVSRRCLSLLNSQDGGILTRAAGVLSRTLSSSLKIVEEALRAGVVKKMMKFLKTGGETASRYAIKILAICTNSYHEAREEVIRLDKKLSVMMKLLSSEDEVLVGNAALCLGNCMEVPNVASSLLKTDLLQVLLKLAGSDTQKTAVQVNAGIALGKLCTAEPRFAAQLRKLHGLEILNSTMKYISDS

SEQ ID NO: 713 - protein, 732 aa, Homo sapiens
MDADKEKDLQKFLKNVDEISNLIQEMNSDDPVVQQKAVLETEKRLLLMEEDQEEDECRTTLNKTMISPPQTAMKSAEEINSEAFLASVEKDAKERAKRRRENKVLADALKEKGNEAFAEGNYETAILRYSEGLEKLKDMKVLYTNRAQAYMKLEDYEKALVDCEWALKCDEKCTKAYFHMGKANLALKNYSVSRECYKKILEINPKLQTQVKGYLNQVDLQEKADLQEKEAHELLDSGKNTAVTTKNLLETLSKPDQIPLFYAGGIEILTEMINECTEQTLFRMHNGFSIISDNEVIRRCFSTAGNDAVEEMVCVSVLKLWQAVCSRNEENQRVLVIHHDRARLLAALLSSKVLAIRQQSFALLLHLAQTESGRSLIINHLDLTRLLEALVSFLDFSDKEANTAMGLFTDLALEERFQVWFQANLPGVLPALTGVLKTDPKVSSSSALCQCIAIMGNLSAEPTTRRHMAACEEFGDGCLSLLARCEEDVDLFREVIYTLLGLMMNLCLQAPFVSEVWAVEVSRRCLSLLNSQDGGILTRAAGVLSRTLSSSLKIVEEALRAGVVKKMMKFLKTGGETASRYAIKILAICTNSYHEAREEVIRLDKKLSVMMKLLSSEDEVLVGNAALCLGNCMEVPNVASSLLKTDLLQVLLKLAGSDTQKTAVQVNAGIALGKLCTAEPRVPAESSHLQFGRESAAPEALSPRRWEEMFHMLVFSLSSVDPPPPPPQTCYP

SEQ ID NO: 714 - protein, 613 aa, Homo sapiens
MGQKGHKDSLYPCGGTPESSLHEALDQCMTALDLFLTNQFSEALSYLKPRTKESMYHSLTYATILEMQAMMTFDPQDILLAGNMMKEAQMLCQRHRRKSSVTDSFSSLVNRPTLGQFTEEEIHAEVCYAECLLQRAALTFLQGSSHGGAVRPRALHDPSHACSCPPGPGRQHLFLLQDENMVSFIKGGIKVRNSYQTYKELDSLVQSSQYCKGENHPHFEGGVKLGVGAFNLTLSMLPTRILRLLEFVGFSGNKDYGLLQLEEGASGHSFRSVLCVMLLLCYHTFLTFVLGTGNVNIEEAEKLLKPYLNRYPKGAIFLFFAGRIEVIKGNIDAAIRRFEECCEAQQHWKQFHHMCYWELMWCFTYKGQWKMSYFYADLLSKENCWSKATYIYMKAAYLSMFGKEDHKPFGDDEVELFRAVPGLKLKIAGKSLPTEKFAIRKSRRYFSSNPISLPVPALEMMYIWNGYAVIGKQPKLTDGILEIITKAEEMLEKGPENEYSVDDECLVKLLKGLCLKYLGRVQEAEENFRSISANEKKIKYDHYLIPNALLELALLLMEQDRNEEAIKLLESAKQNYKNYSMESRTHFRIQAATLQAKSSLENSSRSMVSSVSL

SEQ ID NO: 715 - protein, 221 aa, Homo sapiens
MKAAYLSMFGKEDHKPFGDDEVELFRAVPGLKLKIAGKSLPTEKFAIRKSRRYFSSNPISLPVPALEMMYIWNGYAVIGKQPKLTDGILEIITKAEEMLEKGPENEYSVDDECLVKLLKGLCLKYLGRVQEAEENFRSISANEKKIKYDHYLIPNALLELALLLMEQDRNEEAIKLLESAKQNYKNYSMESRTHFRIQAATLQAKSSLENSSRSMVSSVSL

SEQ ID NO: 716 - protein, 420 aa, Homo sapiens
MDSSPSLPLIRTPESSLHEALDQCMTALDLFLTNQFSEALSYLKPRTKESMYHSLTYATILEMQAMMTFDPQDILLAGNMMKEAQMLCQRHRRKSSVTDSFSSLVNRPTLGQFTEEEIHAEVCYAECLLQRAALTFLQGSSHGGAVRPRALHDPSHACSCPPGPGRQHLFLLQDENMVSFIKGGIKVRNSYQTYKELDSLVQSSQYCKGENHPHFEGGVKLGVGAFNLTLSMLPTRILRLLEFVGFSGNKDYGLLQLEEGASGHSFRSVLCVMLLLCYHTFLTFVLGTGNVNIEEAEKLLKPYLNRYPKGAIFLFFAGRIEVIKGNIDAVSDGGPGRGWGSLGVSQTSRKSGTCDILRDRIDWGRGGGQERTNQRAGAGEALLAEQPGKTREEEAFVVPGILTGRYRTAALQWREVEGGA

SEQ ID NO: 717 - protein, 581 aa, Homo sapiens
MAFLTTWKEAASGKSDRRTPESSLHEALDQCMTALDLFLTNQFSEALSYLKPRTKESMYHSLTYATILEMQAMMTFDPQDILLAGNMMKEAQMLCQRHRRKSSVTDSFSSLVNRPTLGQFTEEEIHAEVCYAECLLQRAALTFLQDENMVSFIKGGIKVRNSYQTYKELDSLVQSSQYCKGENHPHFEGGVKLGVGAFNLTLSMLPTRILRLLEFVGFSGNKDYGLLQLEEGASGHSFRSVLCVMLLLCYHTFLTFVLGTGNVNIEEAEKLLKPYLNRYPKGAIFLFFAGRIEVIKGNIDAAIRRFEECCEAQQHWKQFHHMCYWELMWCFTYKGQWKMSYFYADLLSKENCWSKATYIYMKAAYLSMFGKEDHKPFGDDEVELFRAVPGLKLKIAGKSLPTEKFAIRKSRRYFSSNPISLPVPALEMMYIWNGYAVIGKQPKLTDGILEIITKAEEMLEKGPENEYSVDDECLVKLLKGLCLKYLGRVQEAEENFRSISANEKKIKYDHYLIPNALLELALLLMEQDRNEEAIKLLESAKQNYKNYSMESRTHFRIQAATLQAKSSLENSSRSMVSSVSL

SEQ ID NO: 718 - protein, 577 aa, Homo sapiens
MTSAGGAPGALPAGTPESSLHEALDQCMTALDLFLTNQFSEALSYLKPRTKESMYHSLTYATILEMQAMMTFDPQDILLAGNMMKEAQMLCQRHRRKSSVTDSFSSLVNRPTLGQFTEEEIHAEVCYAECLLQRAALTFLQDENMVSFIKGGIKVRNSYQTYKELDSLVQSSQYCKGENHPHFEGGVKLGVGAFNLTLSMLPTRILRLLEFVGFSGNKDYGLLQLEEGASGHSFRSVLCVMLLLCYHTFLTFVLGTGNVNIEEAEKLLKPYLNRYPKGAIFLFFAGRIEVIKGNIDAAIRRFEECCEAQQHWKQFHHMCYWELMWCFTYKGQWKMSYFYADLLSKENCWSKATYIYMKAAYLSMFGKEDHKPFGDDEVELFRAVPGLKLKIAGKSLPTEKFAIRKSRRYFSSNPISLPVPALEMMYIWNGYAVIGKQPKLTDGILEIITKAEEMLEKGPENEYSVDDECLVKLLKGLCLKYLGRVQEAEENFRSISANEKKIKYDHYLIPNALLELALLLMEQDRNEEAIKLLESAKQNYKNYSMESRTHFRIQAATLQAKSSLENSSRSMVSSVSL

SEQ ID NO: 719 - protein, 578 aa, Homo sapiens
MGQKGHKDSLYPCGGTPESSLHEALDQCMTALDLFLTNQFSEALSYLKPRTKESMYHSLTYATILEMQAMMTFDPQDILLAGNMMKEAQMLCQRHRRKSSVTDSFSSLVNRPTLGQFTEEEIHAEVCYAECLLQRAALTFLQDENMVSFIKGGIKVRNSYQTYKELDSLVQSSQYCKGENHPHFEGGVKLGVGAFNLTLSMLPTRILRLLEFVGFSGNKDYGLLQLEEGASGHSFRSVLCVMLLLCYHTFLTFVLGTGNVNIEEAEKLLKPYLNRYPKGAIFLFFAGRIEVIKGNIDAAIRRFEECCEAQQHWKQFHHMCYWELMWCFTYKGQWKMSYFYADLLSKENCWSKATYIYMKAAYLSMFGKEDHKPFGDDEVELFRAVPGLKLKIAGKSLPTEKFAIRKSRRYFSSNPISLPVPALEMMYIWNGYAVIGKQPKLTDGILEIITKAEEMLEKGPENEYSVDDECLVKLLKGLCLKYLGRVQEAEENFRSISANEKKIKYDHYLIPNALLELALLLMEQDRNEEAIKLLESAKQNYKNYSMESRTHFRIQAATLQAKSSLENSSRSMVSSVSL

SEQ ID NO: 720 - protein, 507 aa, Homo sapiens
MASEQDVRARLQRAGQEHLLRFWAELAPEPRAALLAELALLEPEALREHCRRAAEACARPHGPPPDLAARLRPLPPERVGRASRSDPETRRRWEEEGFRQISLNKVAVLLLAGGQGTRLGVTYPKGMYRVGLPSRKTLYQLQAERIRRVEQLAGERHGTRCTVPWYVMTSEFTLGPTAEFFREHNFFHLDPANVVMFEQRLLPAVTFDGKVILERKDKVAMAPDGNGGLYCALEDHKILEDMERRGVEFVHVYCVDNILVRLADPVFIGFCVLQGADCGAKVVEKAYPEEPVGVVCQVDGVPQVVEYSEISPETAQLRASDGSLLYNAGNICNHFFTRGFLKAVTREFEPLLKPHVAVKKVPYVDEEGNLVKPLKPNGIKMEKFVFDVFRFAKNFAALEVLREEEFSPLKNAEPADRDSPRTARQALLTQHYRWALRAGARFLDAHGAWLPELPSLPPNGDPPAICEISPLVSYSGEGLEVYLQGREFQSPLILDEDQAREPQLQES

SEQ ID NO: 721 - protein, 384 aa, Homo sapiens
MGPGPSPNWTLDPEPRCRLWSEPRLPAGPGVLAAGSPRLPCRYVMTSEFTLGPTAEFFREHNFFHLDPANVVMFEQRLLPAVTFDGKVILERKDKVAMAPDGNGGLYCALEDHKILEDMERRGVEFVHVYCVDNILVRLADPVFIGFCVLQGADCGAKVVEKAYPEEPVGVVCQVDGVPQVVEYSEISPETAQLRASDGSLLYNAGNICNHFFTRGFLKAVTREFEPLLKPHVAVKKVPYVDEEGNLVKPLKPNGIKMEKFVFDVFRFAKNFAALEVLREEEFSPLKNAEPADRDSPRTARQALLTQHYRWALRAGARFLDAHGAWLPELPSLPPNGDPPAICEISPLVSYSGEGLEVYLQGREFQSPLILDEDQAREPQLQES

SEQ ID NO: 722 - protein, 44 aa, Homo sapiens
MSDKPDMAEIEKFDKSKLKKTETQEKNPLPSKETIEQEKQAGES

SEQ ID NO: 723 - protein, 608 aa, Homo sapiens
MSQEGDYGRWTISSSDESEEEKPKPDKPSTSSLLCARQGAANEPRYTCSEAQKAAHKRKISPVKFSNTDSVLPPKRQKSGSQEDLGWCLSSSDDELQPEMPQKQAEKVVIKKEKDISAPNDGTAQRTENHGAPACHRLKEEEDEYETSGEGQDIWDMLDKGNPFQFYLTRVSGVKPKYNSGALHIKDILSPLFGTLVSSAQFNYCFDVDWLVKQYPPEFRKKPILLVHGDKREAKAHLHAQAKPYENISLCQAKLDIAFGTHHTKMMLLLYEEGLRVVIHTSNLIHADWHQKTQGIWLSPLYPRIADGTHKSGESPTHFKADLISYLMAYNAPSLKEWIDVIHKHDLSETNVYLIGSTPGRFQGSQKDNWGHFRLKKLLKDHASSMPNAESWPVVGQFSSVGSLGADESKWLCSEFKESMLTLGKESKTPGKSSVPLYLIYPSVENVRTSLEGYPAGGSLPYSIQTAEKQNWLHSYFHKWSAETSGRSNAMPHIKTYMRPSPDFSKIAWFLVTSANLSKAAWGALEKNGTQLMIRSYELGVLFLPSAFGLDSFKVKQKFFAGSQEPMATFPVPYDLPPELYGSKDRPWIWNIPYVKAPDTHGNMWVPS

SEQ ID NO: 724 - protein, 369 aa, Homo sapiens
MVISERLRLTSMPRPSLTRTSLSARKMMLLLYEEGLRVVIHTSNLIHADWHQKTQGIWLSPLYPRIADGTHKSGESPTHFKADLISYLMAYNAPSLKEWIDVIHKHDLSETNVYLIGSTPGRFQGSQKDNWGHFRLKKLLKDHASSMPNAESWPVVGQFSSVGSLGADESKWLCSEFKESMLTLGKESKTPGKSSVPLYLIYPSVENVRTSLEGYPAGGSLPYSIQTAEKQNWLHSYFHKWSAETSGRSNAMPHIKTYMRPSPDFSKIAWFLVTSANLSKAAWGALEKNGTQLMIRSYELGVLFLPSAFGLDSFKVKQKFFAGSQEPMATFPVPYDLPPELYGSKDRPWIWNIPYVKAPDTHGNMWVPS

SEQ ID NO: 725 - protein, 360 aa, Homo sapiens
MVPAAGRRPPRVMRLLGWWQVLLWVLGLPVRGVEVAEESGRLWSEEQPAHPLQVGAVYLGEEELLHDPMGQDRAAEEANAVLGLDTQGDHMVMLSVIPGEAEDKVSSEPSGVTCGAGGAEDSRCNVRESLFSLDGAGAHFPDREEEYYTEPEVAESDAAPTEDSNNTESLKSPKVNCEERNITGLENFTLKILNMSQDLMDFLNPNGSDCTLVLFYTPWCRFSASLAPHFNSLPRAFPALHFLALDASQHSSLSTRFGTVAVPNILLFQGAKPMARFNHTDRTLETLKIFIFNQTGIEAKKNVVVTQADQIGPLPSTLIKSVDWLLVFSLFFLISFIMYATIRTESIRWLIPGQEQEHVE

SEQ ID NO: 726 - protein, 343 aa, Homo sapiens
MVPAAGRRPPRVMRLLGWWQVLLWVLGLPVRGVEVAEESGRLWSEELLHDPMGQDRAAEEANAVLGLDTQGDHMVMLSVIPGEAEDKVSSEPSGVTCGAGGAEDSRCNVRESLFSLDGAGAHFPDREEEYYTEPEVAESDAAPTEDSNNTESLKSPKVNCEERNITGLENFTLKILNMSQDLMDFLNPNGSDCTLVLFYTPWCRFSASLAPHFNSLPRAFPALHFLALDASQHSSLSTRFGTVAVPNILLFQGAKPMARFNHTDRTLETLKIFIFNQTGIEAKKNVVVTQADQIGPLPSTLIKSVDWLLVFSLFFLISFIMYATIRTESIRWLIPGQEQEHVE

SEQ ID NO: 727 - protein, 863 aa, Homo sapiens
MQRRGALFGMPGGSGGRKMAAGDIGELLVPHMPTIRVPRSGDRVYKNECAFSYDSPNSEGGLYVCMNTFLAFGREHVERHFRKTGQSVYMHLKRHVREKVRGASGGALPKRRNSKIFLDLDTDDDLNSDDYEYEDEAKLVIFPDHYEIALPNIEELPALVTIACDAVLSSKSPYRKQDPDTWENELPVSKYANNLTQLDNGVRIPPSGWKCARCDLRENLWLNLTDGSVLCGKWFFDSSGGNGHALEHYRDMGYPLAVKLGTITPDGADVYSFQEEEPVLDPHLAKHLAHFGIDMLHMHGTENGLQDNDIKLRVSEWEVIQESGTKLKPMYGPGYTGLKNLGNSCYLSSVMQAIFSIPEFQRAYVGNLPRIFDYSPLDPTQDFNTQMTKLGHGLLSGQYSKPPVKSELIEQVMKEEHKPQQNGISPRMFKAFVSKSHPEFSSNRQQDAQEFFLHLVNLVERNRIGSENPSDVFRFLVEERIQCCQTRKVRYTERVDYLMQLPVAMEAATNKDELIAYELTRREAEANRRPLPELVRAKIPFSACLQAFSEPENVDDFWSSALQAKSAGVKTSRFASFPEYLVVQIKKFTFGLDWVPKKFDVSIDMPDLLDINHLRARGLQPGEEELPDISPPIVIPDDSKDRLMNQLIDPSDIDESSVMQLAEMGFPLEACRKAVYFTGNMGAEVAFNWIIVHMEEPDFAEPLTMPGYGGAASAGASVFGASGLDNQPPEEIVAIITSMGFQRNQAIQALRATNNNLERALDWIFSHPEFEEDSDFVIEMENNANANIISEAKPEGPRVKDGSGTYELFAFISHMGTSTMSGHYICHIKKEGRWVIYNDHKVCASERPPKDLGYMYFYRRIPS

SEQ ID NO: 728 - protein, 798 aa, Homo sapiens
MNTFLAFGREHVERHFRKTGQSVYMHLKRHVREKVRGASGGALPKRRNSKIFLDLDTDDDLNSDDYEYEDEAKLVIFPDHYEIALPNIEELPALVTIACDAVLSSKSPYRKQDPDTWENELPVSKYANNLTQLDNGVRIPPSGWKCARCDLRENLWLNLTDGSVLCGKWFFDSSGGNGHALEHYRDMGYPLAVKLGTITPDGADVYSFQEEEPVLDPHLAKHLAHFGIDMLHMHGTENGLQDNDIKLRVSEWEVIQESGTKLKPMYGPGYTGLKNLGNSCYLSSVMQAIFSIPEFQRAYVGNLPRIFDYSPLDPTQDFNTQMTKLGHGLLSGQYSKPPVKSELIEQVMKEEHKPQQNGISPRMFKAFVSKSHPEFSSNRQQDAQEFFLHLVNLVERNRIGSENPSDVFRFLVEERIQCCQTRKVRYTERVDYLMQLPVAMEAATNKDELIAYELTRREAEANRRPLPELVRAKIPFSACLQAFSEPENVDDFWSSALQAKSAGVKTSRFASFPEYLVVQIKKFTFGLDWVPKKFDVSIDMPDLLDINHLRARGLQPGEEELPDISPPIVIPDDSKDRLMNQLIDPSDIDESSVMQLAEMGFPLEACRKAVYFTGNMGAEVAFNWIIVHMEEPDFAEPLTMPGYGGAASAGASVFGASGLDNQPPEEIVAIITSMGFQRNQAIQALRATNNNLERALDWIFSHPEFEEDSDFVIEMENNANANIISEAKPEGPRVKDGSGTYELFAFISHMGTSTMSGHYICHIKKEGRWVIYNDHKVCASERPPKDLGYMYFYRRIPS

SEQ ID NO: 729 - protein, 349 aa, Homo sapiens
MAHQTGIHATEELKEFFAKARAGSVRLIKVVIEDEQLVLGASQEPVGRWDQDYDRAVLPLLDAQQPCYLLYRLDSQNAQGFEWLFLAWSPDNSPVRLKMLYAATRATVKKEFGGGHIKDELFGTVKDDLSFAGYQKHLSSCAAPAPLTSAERELQQIRINEVKTEISVESKHQTLQGLAFPLQPEAQRALQQLKQKMVNYIQMKLDLERETIELVHTEPTDVAQLPSRVPRDAARYHFFLYKHTHEGDPLESVVFIYSMPGYKCSIKERMLYSSCKSRLLDSVEQDFHLEIAKKIEIGDGAELTAEFLYDEVHPKQHAFKQAFAKPKGPGGKRGHKRLIRGPGENGDDS

SEQ ID NO: 730 - protein, 534 aa, Homo sapiens
MATGLQVPLPQLATGLLLLLSVQPWAESGKVLVVPTDGSHWLSMREALRDLHARGHQVVVLTLEVNMYIKEENFFTLTTYAISWTQDEFDRLLLGHTQSFFETEHLLMKFSRRMAIMNNMSLIIHRSCVELLHNEALIRHLHATSFDVVLTDPFHLCAAVLAKYLSIPAVFFLRNIPCDLDFKGTQCPNPSSYIPRLLTTNSDHMTFLQRVKNMLYPLALSYLCHAVSAPYASLASELFQREVSVVDLVSHASVWLFRGDFVMDYPRPIMPNMVFIGGINCANGKPLSQEFEAYINASGEHGIVVFSLGSMVSEIPEKKAMAIADALGKIPQTVLWRYTGTRPSNLANNTILVKWLPQNDLLGHPMTRAFITHAGSHGVYESICNGVPMVMMPLFGDQMDNAKRMETKGAGVTLNVLEMTSEDLENALKAVINDKSYKENIMRLSSLHKDRPVEPLDLAVFWVEFVMRHKGAPHLRPAAHDLTWYQYHSLDVIGFLLAVVLTVAFITFKCCAYGYRKCLGKKGRVKKAHKSKTH

SEQ ID NO: 731 - protein, 445 aa, Homo sapiens
MATGLQVPLPQLATGLLLLLSVQPWAESGKVLVVPTDGSHWLSMREALRDLHARGHQVVVLTLEVNMYIKEENFFTLTTYAISWTQDEFDRLLLGHTQSFFETEHLLMKFSRRMAIMNNMSLIIHRSCVELLHNEALIRHLHATSFDVVLTDPFHLCAAVLAKYLSIPAVFFLRNIPCDLDFKGTQCPNPSSYIPRLLTTNSDHMTFLQRVKNMLYPLALSYLCHAVSAPYASLASELFQREVSVVDLVSHASVWLFRGDFVMDYPRPIMPNMVFIGGINCANGKPLSQEFEAYINASGEHGIVVFSLGSMVSEIPEKKAMAIADALGKIPQTVLWRYTGTRPSNLANNTILVKWLPQNDLLGHPMTRAFITHAGSHGVYESICNGVPMVMMPLFGDQMDNAKRMETKGAGVTLNVLEMTSEDLENALKAVINDKRKKQQSGRQM

SEQ ID NO: 732 - protein, 979 aa, Homo sapiens
MSPLKIHGPIRIRSMQTGITKWKEGSFEIVEKENKVSLVVHYNTGGIPRIFQLSHNIKNVVLRPSGAKQSRLMLTLQDNSFLSIDKVPSKDAEEMRLFLDAVHQNRLPAAMKPSQGSGSFGAILGSRTSQKETSRQLSYSDNQASAKRGSLETKDDIPFRKVLGNPGRGSIKTVAGSGIARTIPSLTSTSTPLRSGLLENRTEKRKRMISTGSELNEDYPKENDSSSNNKAMTDPSRKYLTSSREKQLSLKQSEENRTSGLLPLQSSSFYGSRAGSKEHSSGGTNLDRTNVSSQTPSAKRSLGFLPQPVPLSVKKLRCNQDYTGWNKPRVPLSSHQQQQLQGFSNLGNTCYMNAILQSLFSLQSFANDLLKQGIPWKKIPLNALIRRFAHLLVKKDICNSETKKDLLKKVKNAISATAERFSGYMQNDAHEFLSQCLDQLKEDMEKLNKTWKTEPVSGEENSPDISATRAYTCPVITNLEFEVQHSIICKACGEIIPKREQFNDLSIDLPRRKKPLPPRSIQDSLDLFFRAEELEYSCEKCGGKCALVRHKFNRLPRVLILHLKRYSFNVALSLNNKIGQQVIIPRYLTLSSHCTENTKPPFTLGWSAHMAISRPLKASQMVNSCITSPSTPSKKFTFKSKSSLALCLDSDSEDELKRSVALSQRLCEMLGNEQQQEDLEKDSKLCPIEPDKSELENSGFDRMSEEELLAAVLEISKRDASPSLSHEDDDKPTSSPDTGFAEDDIQEMPENPDTMETEKPKTITELDPASFTEITKDCDENKENKTPEGSQGEVDWLQQYDMEREREEQELQQALAQSLQEQEAWEQKEDDDLKRATELSLQEFNNSFVDALGSDEDSGNEDVFDMEYTEAEAEELKRNAETGNLPHSYRLISVVSHIGSTSSSGHYISDVYDIKKQAWFTYNDLEVSKIQEAAVQSDRDRSGYIFFYMHKEIFDELLETEKNSQSLSTEVGKTTRQAL

SEQ ID NO: 733 - protein, 885 aa, Homo sapiens
MLTLQDNSFLSIDKVPSKDAEEMRLFLDAVHQNRLPAAMKPSQGSGSFGAILGSRTSQKETSRQLSYSDNQASAKRGSLETKDDIPFRKVLGNPGRGSIKTVAGSGIARTIPSLTSTSTPLRSGLLENRTEKRKRMISTGSELNEDYPKENDSSSNNKAMTDPSRKYLTSSREKQLSLKQSEENRTSGLLPLQSSSFYGSRAGSKEHSSGGTNLDRTNVSSQTPSAKRSLGFLPQPVPLSVKKLRCNQDYTGWNKPRVPLSSHQQQQLQGFSNLGNTCYMNAILQSLFSLQSFANDLLKQGIPWKKIPLNALIRRFAHLLVKKDICNSETKKDLLKKVKNAISATAERFSGYMQNDAHEFLSQCLDQLKEDMEKLNKTWKTEPVSGEENSPDISATRAYTCPVITNLEFEVQHSIICKACGEIIPKREQFNDLSIDLPRRKKPLPPRSIQDSLDLFFRAEELEYSCEKCGGKCALVRHKFNRLPRVLILHLKRYSFNVALSLNNKIGQQVIIPRYLTLSSHCTENTKPPFTLGWSAHMAMKFTFKSKSSLALCLDSDSEDELKRSVALSQRLCEMLGNEQQQEDLEKDSKLCPIEPDKSELENSGFDRMSEEELLAAVLEISKRDASPSLSHEDDDKPTSSPDTGFAEDDIQEMPENPDTMETEKPKTITELDPASFTEITKDCDENKENKTPEGSQGEVDWLQQYDMEREREEQELQQALAQSLQEQEAWEQKEDDDLKRATELSLQEFNNSFVDALGSDEDSGNEDVFDMEYTEAEAEELKRNAETGNLPHSYRLISVVSHIGSTSSSGHYISDVYDIKKQAWFTYNDLEVSKIQEAAVQSDRDRSGYIFFYMHKEIFDELLETEKNSQSLSTEVGKTTRQAL

SEQ ID NO: 734 - protein, 589 aa, Homo sapiens
MAESGESGGPPGSQDSAAGAEGAGAPAAAASAEPKIMKVTVKTPKEKEEFAVPENSSVQQFKEEISKRFKSHTDQLVLIFAGKILKDQDTLSQHGIHDGLTVHLVIKTQNRPQDHSAQQTNTAGSNVTTSSTPNSNSTSGSATSNPFGLGGLGGLAGLSSLGLNTTNFSELQSQMQRQLLSNPEMMVQIMENPFVQSMLSNPDLMRQLIMANPQMQQLIQRNPEISHMLNNPDIMRQTLELARNPAMMQEMMRNQDRALSNLESIPGGYNALRRMYTDIQEPMLSAAQEQFGGNPFASLVSNTSSGEGSQPSRTENRDPLPNPWAPQTSQSSSASSGTASTVGGTTGSTASGTSGQSTTAPNLVPGVGASMFNTPGMQSLLQQITENPQLMQNMLSAPYMRSMMQSLSQNPDLAAQMMLNNPLFAGNPQLQEQMRQQLPTFLQQMQNPDTLSAMSNPRAMQALLQIQQGLQTLATEAPGLIPGFTPGLGALGSTGGSSGTNGSNATPSENTSPTAGTTEPGHQQFIQQMLQALAGVNPQLQNPEVRFQQQLEQLSAMGFLNREANLQALIATGGDINAAIERLLGSQPS

SEQ ID NO: 735 - protein, 561 aa, Homo sapiens
MAESGESGGPPGSQDSAAGAEGAGAPAAAASAEPKIMKVTVKTPKEKEEFAVPENSSVQQFKEEISKRFKSHTDQLVLIFAGKILKDQDTLSQHGIHDGLTVHLVIKTQNRPQDHSAQQTNTAGSNVTTSSTPNSNSTSGSATSNPFGLGGLGGLAGLSSLGLNTTNFSELQSQMQRQLLSNPEMMVQIMENPFVQSMLSNPDLMRQLIMANPQMQQLIQRNPEISHMLNNPDIMRQTLELARNPAMMQEMMRNQDRALSNLESIPGGYNALRRMYTDIQEPMLSAAQEQFGGNPFASLVSNTSSGEGSQPSRTENRDPLPNPWAPQTSQSSSASSGTASTVGGTTGSTASGTSGQSTTAPNLVPGVGASMFNTPGMQSLLQQITENPQLMQNMLSAPYMRSMMQSLSQNPDLAAQMQNPDTLSAMSNPRAMQALLQIQQGLQTLATEAPGLIPGFTPGLGALGSTGGSSGTNGSNATPSENTSPTAGTTEPGHQQFIQQMLQALAGVNPQLQNPEVRFQQQLEQLSAMGFLNREANLQALIATGGDINAAIERLLGSQPS

SEQ ID NO: 736 - protein, 412 aa, Homo sapiens
MAESGESGGPPGSQDSAAGAEGAGAPAAAASAEPKIMKVTVKTPKEKEEFAVPENSSVQQTLELARNPAMMQEMMRNQDRALSNLESIPGGYNALRRMYTDIQEPMLSAAQEQFGGNPFASLVSNTSSGEGSQPSRTENRDPLPNPWAPQTSQSSSASSGTASTVGGTTGSTASGTSGQSTTAPNLVPGVGASMFNTPGMQSLLQQITENPQLMQNMLSAPYMRSMMQSLSQNPDLAAQMMLNNPLFAGNPQLQEQMRQQLPTFLQQMQNPDTLSAMSNPRAMQALLQIQQGLQTLATEAPGLIPGFTPGLGALGSTGGSSGTNGSNATPSENTSPTAGTTEPGHQQFIQQMLQALAGVNPQLQNPEVRFQQQLEQLSAMGFLNREANLQALIATGGDINAAIERLLGSQPS

SEQ ID NO: 737 - protein, 181 aa, Homo sapiens
MAESGESGGPPGSQDSAAGAEGAGAPAAAASAEPKIMKVTVKTPKEKEEFAVPENSSVQQFKEEISKRFKSHTDQLVLIFAGKILKDQDTLSQHGIHDGLTVHLVIKTQNRPQDHSAQQTNTAGSNVTTSSTPNSNSTSGSATSNPFGLDVGTCQESSNDAGDDEEPGPSFEQPRKHPRGI

SEQ ID NO: 738 - protein, 118 aa, Homo sapiens
MSAPAQPPAEGTEGTAPGGGPPGPPPNMTSNRRLQQTQAQVEEVVDIIRVNVDKVLERDQKLSELDDRADALQAGASQFESSAAKLKRKYWWKNCKMMIMLGAICAIIVVVIVIYFFT

SEQ ID NO: 739 - protein, 117 aa, Homo sapiens
MSAPAQPPAEGTEGTAPGGGPPGPPPNMTSNRRLQQTQAQVEEVVDIIRVNVDKVLERDQKLSELDDRADALQAGASQFESSAAKLKRKYWWKNCKMMIMLGAICAIIVVVIVSKYR

SEQ ID NO: 740 - protein, 116 aa, Homo sapiens
MSAPAQPPAEGTEGTAPGGGPPGPPPNMTSNRRLQQTQAQVEEVVDIIRVNVDKVLERDQKLSELDDRADALQAGASQFESSAAKLKRKYWWKNCKMMIMLGAICAIIVVVIVRRD

SEQ ID NO: 741 - protein, 1318 aa, Homo sapiens
MLRTSGLALLALVSAVGPSQASGFTEKGLSLLGYQLCSHRVTHTVQKVEAVQTSYTSYVSCGGWIPWRRCPKMVYRTQYLVVEVPESRNVTDCCEGYEQLGLYCVLPLNQSGQFTSRPGACPAEGPEPSTSPCSLDIDCPGLEKCCPWSGGRYCMAPAPQAPERDPVGSWYNVTILVKMDFKELQQVDPRLLNHMRLLHSLVTSALQPMASTVHHLHSAPGNASTTVSRLLLGLPRPLPVADVSTLLGDIAKRVYEVISVQVQDVNECFYEELNACSGRELCANLEGSYWCVCHQEAPATSPRKLNLEWEDCPPVSDYVVLNVTSDSFQVSWRLNSTQNHTFHVRVYRGMELLRSARTQSQALAVAGLEAGVLYRVKTSYQGCGADVSTTLTIKTNAQVFEVTIKIVNHNLTEKLLNRSSVEYQDFSRQLLHEVESSFPPVVSDLYRSGKLRMQIVSLQAGSVVVRLKLTVQDPGFPMGISTLAPILQPLLASTVFQIDRQGTRVQDWDECVDSAEHDCSPAAWCINLEGSYTCQCRTTRDATPSRAGRACEGDLVSPMGGGLSAATGVTVPGLGTGTAALGLENFTLSPSPGYPQGTPAAGQAWTPEPSPRRGGSNVVGYDRNNTGKGVEQELQGNSIMEPPSWPSPTEDPTGHFLWHATRSTRETLLNPTWLRNEDSGPSGSVDLPLTSTLTALKTPACVPVSIGRIMVSNVTSTGFHLAWEADLAMDSTFQLTLTSMWSPAVVLETWNTSVTLSGLEPGVLHLVEIMAKACGKEGARAHLKVRTAARKLIGKVRIKNVRYSESFRNASSQEYRDFLELFFRMVRGSLPATMCQHMDAGGVRMEVVSVTNGSIVVEFHLLIIADVDVQEVSAAFLTAFQTVPLLEVIRGDTFIQDYDECERKEDDCVPGTSCRNTLGSFTCSCEGGAPDFPVEYSERPCEGDSPGNETWATSPERPLTTAGTKAAFVQGTSPTPQGLPQRLNLTGAVRVLCEIEKVVVAIQKRFLQQESIPESSLYLSHPSCNVSHSNGTHVLLEAGWSECGTLMQSNMTNTVVRTTLRNDLSQEGIIHHLKILSPIYCAFQNDLLTSSGFTLEWGVYTIIEDLHGAGNFVTEMQLFIGDSPIPQNYSVSASDDVRIEVGLYRQKSNLKVVLTECWATPSSNARDPITFSFINNSCPVPNTYTNVIENGNSNKAQFKLRIFSFINDSIVYLHCKLRVCMESPGATCKINCNNFRLLQNSETSATHQMSWGPLIRSEGEPPHAEAGLGAGYVVLIVVAIFVLVAGTATLLIVRYQRMNGRYNFKIQSNNFSYQVFYE

SEQ ID NO: 742 - protein, 1446 aa, Homo sapiens
MLRTSGLALLALVSAVGPSQASGFTEKGLSLLGYQLCSHRVTHTVQKVEAVQTSYTSYVSCGGWIPWRRCPKMVYRTQYLVVEVPESRNVTDCCEGYEQLGLYCVLPLNQSGQFTSRPGACPAEGPEPSTSPCSLDIDCPGLEKCCPWSGGRYCMAPAPQAPERDPVGSWYNVTILVKMDFKELQQVDPRLLNHMRLLHSLVTSALQPMASTVHHLHSAPGNASTTVSRLLLGLPRPLPVADVSTLLGDIAKRVYEVISVQVQDVNECFYEELNACSGRELCANLEGSYWCVCHQEAPATSPRKLNLEWEDCPPVSDYVVLNVTSDSFQVSWRLNSTQNHTFHVRVYRGMELLRSARTQSQALAVAGLEAGVLYRVKTSYQGCGADVSTTLTIKTNAQVFEVTIKIVNHNLTEKLLNRSSVEYQDFSRQLLHEVESSFPPVVSDLYRSGKLRMQIVSLQAGSVVVRLKLTVQDPGFPMGISTLAPILQPLLASTVFQIDRQGTRVQDWDECVDSAEHDCSPAAWCINLEGSYTCQCRTTRDATPSRAGRACEGDLVSPMGGGLSAATGVTVPGLGTGTAALGLENFTLSPSPGYPQGTPAAGQAWTPEPSPRRGGSNVVGYDRNNTGKGVEQEVPSTAPGLGMDQGSPSQVNPSQGSPSQGSLRQESTSQASPSQRSTSQGSPSQVNPSQRSTSHANSSQGSPSQGSPSQESPSQGSTSQASPSHRNTIGVIGTTSSPKATGSTHSFPPGATDGPLALPGQLQGNSIMEPPSWPSPTEDPTGHFLWHATRSTRETLLNPTWLRNEDSGPSGSVDLPLTSTLTALKTPACVPVSIGRIMVSNVTSTGFHLAWEADLAMDSTFQLTLTSMWSPAVVLETWNTSVTLSGLEPGVLHLVEIMAKACGKEGARAHLKVRTAARKLIGKVRIKNVRYSESFRNASSQEYRDFLELFFRMVRGSLPATMCQHMDAGGVRMEVVSVTNGSIVVEFHLLIIADVDVQEVSAAFLTAFQTVPLLEVIRGDTFIQDYDECERKEDDCVPGTSCRNTLGSFTCSCEGGAPDFPVEYSERPCEGDSPGNETWATSPERPLTTAGTKAAFVQGTSPTPQGLPQRLNLTGAVRVLCEIEKVVVAIQKRFLQQESIPESSLYLSHPSCNVSHSNGTHVLLEAGWSECGTLMQSNMTNTVVRTTLRNDLSQEGIIHHLKILSPIYCAFQNDLLTSSGFTLEWGVYTIIEDLHGAGNFVTEMQLFIGDSPIPQNYSVSASDDVRIEVGLYRQKSNLKVVLTECWATPSSNARDPITFSFINNSCPVPNTYTNVIENGNSNKAQFKLRIFSFINDSIVYLHCKLRVCMESPGATCKINCNNFRLLQNSETSATHQMSWGPLIRSEGEPPHAEAGLGAGYVVLIVVAIFVLVAGTATLLIVRYQRMNGRYNFKIQSNNFSYQVFYE

SEQ ID NO: 743 - protein, 1246 aa, Homo sapiens
MVYRTQYLVVEVPESRNVTDCCEGYEQLGLYCVLPLNQSGQFTSRPGACPAEGPEPSTSPCSLDIDCPGLEKCCPWSGGRYCMAPAPQAPERDPVGSWYNVTILVKMDFKELQQVDPRLLNHMRLLHSLVTSALQPMASTVHHLHSAPGNASTTVSRLLLGLPRPLPVADVSTLLGDIAKRVYEVISVQVQDVNECFYEELNACSGRELCANLEGSYWCVCHQEAPATSPRKLNLEWEDCPPVSDYVVLNVTSDSFQVSWRLNSTQNHTFHVRVYRGMELLRSARTQSQALAVAGLEAGVLYRVKTSYQGCGADVSTTLTIKTNAQVFEVTIKIVNHNLTEKLLNRSSVEYQDFSRQLLHEVESSFPPVVSDLYRSGKLRMQIVSLQAGSVVVRLKLTVQDPGFPMGISTLAPILQPLLASTVFQIDRQGTRVQDWDECVDSAEHDCSPAAWCINLEGSYTCQCRTTRDATPSRAGRACEGDLVSPMGGGLSAATGVTVPGLGTGTAALGLENFTLSPSPGYPQGTPAAGQAWTPEPSPRRGGSNVVGYDRNNTGKGVEQELQGNSIMEPPSWPSPTEDPTGHFLWHATRSTRETLLNPTWLRNEDSGPSGSVDLPLTSTLTALKTPACVPVSIGRIMVSNVTSTGFHLAWEADLAMDSTFQLTLTSMWSPAVVLETWNTSVTLSGLEPGVLHLVEIMAKACGKEGARAHLKVRTAARKLIGKVRIKNVRYSESFRNASSQEYRDFLELFFRMVRGSLPATMCQHMDAGGVRMEVVSVTNGSIVVEFHLLIIADVDVQEVSAAFLTAFQTVPLLEVIRGDTFIQDYDECERKEDDCVPGTSCRNTLGSFTCSCEGGAPDFPVEYSERPCEGDSPGNETWATSPERPLTTAGTKAAFVQGTSPTPQGLPQRLNLTGAVRVLCEIEKVVVAIQKRFLQQESIPESSLYLSHPSCNVSHSNGTHVLLEAGWSECGTLMQSNMTNTVVRTTLRNDLSQEGIIHHLKILSPIYCAFQNDLLTSSGFTLEWGVYTIIEDLHGAGNFVTEMQLFIGDSPIPQNYSVSASDDVRIEVGLYRQKSNLKVVLTECWATPSSNARDPITFSFINNSCPVPNTYTNVIENGNSNKAQFKLRIFSFINDSIVYLHCKLRVCMESPGATCKINCNNFRLLQNSETSATHQMSWGPLIRSEGEPPHAEAGLGAGYVVLIVVAIFVLVAGTATLLIVRYQRMNGRYNFKIQSNNFSYQVFYE

SEQ ID NO: 744 - protein, 1374 aa, Homo sapiens
MVYRTQYLVVEVPESRNVTDCCEGYEQLGLYCVLPLNQSGQFTSRPGACPAEGPEPSTSPCSLDIDCPGLEKCCPWSGGRYCMAPAPQAPERDPVGSWYNVTILVKMDFKELQQVDPRLLNHMRLLHSLVTSALQPMASTVHHLHSAPGNASTTVSRLLLGLPRPLPVADVSTLLGDIAKRVYEVISVQVQDVNECFYEELNACSGRELCANLEGSYWCVCHQEAPATSPRKLNLEWEDCPPVSDYVVLNVTSDSFQVSWRLNSTQNHTFHVRVYRGMELLRSARTQSQALAVAGLEAGVLYRVKTSYQGCGADVSTTLTIKTNAQVFEVTIKIVNHNLTEKLLNRSSVEYQDFSRQLLHEVESSFPPVVSDLYRSGKLRMQIVSLQAGSVVVRLKLTVQDPGFPMGISTLAPILQPLLASTVFQIDRQGTRVQDWDECVDSAEHDCSPAAWCINLEGSYTCQCRTTRDATPSRAGRACEGDLVSPMGGGLSAATGVTVPGLGTGTAALGLENFTLSPSPGYPQGTPAAGQAWTPEPSPRRGGSNVVGYDRNNTGKGVEQEVPSTAPGLGMDQGSPSQVNPSQGSPSQGSLRQESTSQASPSQRSTSQGSPSQVNPSQRSTSHANSSQGSPSQGSPSQESPSQGSTSQASPSHRNTIGVIGTTSSPKATGSTHSFPPGATDGPLALPGQLQGNSIMEPPSWPSPTEDPTGHFLWHATRSTRETLLNPTWLRNEDSGPSGSVDLPLTSTLTALKTPACVPVSIGRIMVSNVTSTGFHLAWEADLAMDSTFQLTLTSMWSPAVVLETWNTSVTLSGLEPGVLHLVEIMAKACGKEGARAHLKVRTAARKLIGKVRIKNVRYSESFRNASSQEYRDFLELFFRMVRGSLPATMCQHMDAGGVRMEVVSVTNGSIVVEFHLLIIADVDVQEVSAAFLTAFQTVPLLEVIRGDTFIQDYDECERKEDDCVPGTSCRNTLGSFTCSCEGGAPDFPVEYSERPCEGDSPGNETWATSPERPLTTAGTKAAFVQGTSPTPQGLPQRLNLTGAVRVLCEIEKVVVAIQKRFLQQESIPESSLYLSHPSCNVSHSNGTHVLLEAGWSECGTLMQSNMTNTVVRTTLRNDLSQEGIIHHLKILSPIYCAFQNDLLTSSGFTLEWGVYTIIEDLHGAGNFVTEMQLFIGDSPIPQNYSVSASDDVRIEVGLYRQKSNLKVVLTECWATPSSNARDPITFSFINNSCPVPNTYTNVIENGNSNKAQFKLRIFSFINDSIVYLHCKLRVCMESPGATCKINCNNFRLLQNSETSATHQMSWGPLIRSEGEPPHAEAGLGAGYVVLIVVAIFVLVAGTATLLIVRYQRMNGRYNFKIQSNNFSYQVFYE

SEQ ID NO: 745 - protein, 502 aa, Homo sapiens
MPLVKRNIEPRHLCRGALPEGITSELECVTNSTLAAIIRQLSSLSKHAEDIFGELFNEANNFYIRANSLQDRIDRLAVKVTQLDSTVEEVSLQDINMKKAFKSSTVQDQQVVSKNSIPNPVADIYNQSDKPPPLNILTPYRDDKKDGLKFYTDPSYFFDLWKEKMLQDTEDKRKEKRRQKEQKRIDGTTREVKKVRKARNRRQEWNMMAYDKELRPDNRLSQSVYHGASSEGSLSPDTRSHASDVTDYSYPATPNHSLHPQPVTPSYAAGDVPPHGPASQAAEHEYRPPSASARHMALNRPQQPPPPPPPQAPEGSQASAPMAPADYGMLPAQIIEYYNPSGPPPPPPPPVIPSAQTAFVSPLQMPMQPPFPASASSTHAAPPHPPSTGLLVTAPPPPGPPPPPPGPPGPGSSLSSSPMHGPPVAEAKRQEPAQPPISDARSDLLAAIRMGIQLKKVQEQREQEAKREPVGNDVATILSRRIAVEYSDSDDDSEFDENDWSD

SEQ ID NO: 746 - protein, 499 aa, Homo sapiens
MPLVKRNIEPRHLCRGALPEGITSELECVTNSTLAAIIRQLSSLSKHAEDIFGELFNEANNFYIRANSLQDRIDRLAVKVTQLDSTVEEVSLQDINMKKAFKSSTVQDQQVVSKNSIPNPVADIYNQSDKPPPLNILTPYRDDKKDGLKFYTDPSYFFDLWKEKMLQDTEDKRKEKRRQKREKHKLNPNRNQQVNVRKVRTRKEEWERRKMGIEFMSDAKKLEQAGSAKEDRVPSGSHASDVTDYSYPATPNHSLHPQPVTPSYAAGDVPPHGPASQAAEHEYRPPSASARHMALNRPQQPPPPPPPQAPEGSQASAPMAPADYGMLPAQIIEYYNPSGPPPPPPPPVIPSAQTAFVSPLQMPMQPPFPASASSTHAAPPHPPSTGLLVTAPPPPGPPPPPPGPPGPGSSLSSSPMHGPPVAEAKRQEPAQPPISDARSDLLAAIRMGIQLKKVQEQREQEAKREPVGNDVATILSRRIAVEYSDSDDDSEFDENDWSD

SEQ ID NO: 747 - protein, 315 aa, Homo sapiens
MAFPEPKPRPPELPQKRLKTLDCGQGAVRAVRFNVDGNYCLTCGSDKTLKLWNPLRGTLLRTYSGHGYEVLDAAGSFDNSSLCSGGGDKAVVLWDVASGQVVRKFRGHAGKVNTVQFNEEATVILSGSIDSSIRCWDCRSRRPEPVQTLDEARDGVSSVKVSDHEILAGSVDGRVRRYDLRMGQLFSDYVGSPITCTCFSRDGQCTLVSSLDSTLRLLDKDTGELLGEYKGHKNQEYKLDCCLSERDTHVVSCSEDGKVFFWDLVEGALALALPVGSGVVQSLAYHPTEPCLLTAMGGSVQCWREEAYEAEDGAG

SEQ ID NO: 748 - protein, 85 aa, Homo sapiens
MRPLLCALAGLALLCAVGALADGREDRGSPGDTGERPAGPARGPGLEPARGTLQPRPRPPRKRWLLSPGAGAQQLEVVHLPGSTL

SEQ ID NO: 749 - protein, 314 aa, Homo sapiens
MHPAGLAAAAAGTPRLRKWPSKRRIPVSQPGMADPHQLFDDTSSAQSRGYGAQRAPGGLSYPAASPTPHAAFLADPVSNMAMAYGSSLAAQGKELVDKNIDRFIPITKLKYYFAVDTMYVGRKLGLLFFPYLHQDWEVQYQQDTPVAPRFDVNAPDLYIPAMAFITYVLVAGLALGTQDRFSPDLLGLQASSALAWLTLEVLAILLSLYLVTVNTDLTTIDLVAFLGYKYVGMIGGVLMGLLFGKIGYYLVLGWCCVAIFVFMIRTLRLKILADAAAEGVPVRGARNQLRMYLTMAVAAAQPMLMYWLTFHLVR

SEQ ID NO: 750 - protein, 283 aa, Homo sapiens
MADPHQLFDDTSSAQSRGYGAQRAPGGLSYPAASPTPHAAFLADPVSNMAMAYGSSLAAQGKELVDKNIDRFIPITKLKYYFAVDTMYVGRKLGLLFFPYLHQDWEVQYQQDTPVAPRFDVNAPDLYIPAMAFITYVLVAGLALGTQDRFSPDLLGLQASSALAWLTLEVLAILLSLYLVTVNTDLTTIDLVAFLGYKYVGMIGGVLMGLLFGKIGYYLVLGWCCVAIFVFMIRTLRLKILADAAAEGVPVRGARNQLRMYLTMAVAAAQPMLMYWLTFHLVR

SEQ ID NO: 751 - protein, 311 aa, Homo sapiens
MHPAGLAAAAAGTPRLPSKRRIPVSQPGMADPHQLFDDTSSAQSRGYGAQRAPGGLSYPAASPTPHAAFLADPVSNMAMAYGSSLAAQGKELVDKNIDRFIPITKLKYYFAVDTMYVGRKLGLLFFPYLHQDWEVQYQQDTPVAPRFDVNAPDLYIPAMAFITYVLVAGLALGTQDRFSPDLLGLQASSALAWLTLEVLAILLSLYLVTVNTDLTTIDLVAFLGYKYVGMIGGVLMGLLFGKIGYYLVLGWCCVAIFVFMIRTLRLKILADAAAEGVPVRGARNQLRMYLTMAVAAAQPMLMYWLTFHLVR

SEQ ID NO: 752 - protein, 291 aa, Homo sapiens
MHPAGLAAAAAGTPRLPSKRRIPVSQPGMADPHQLFDDTSSAQSRGYGAQRAPGGLSYPAASPTPHAAFLADPVSNMAMAYGSSLAAQGKELVDKNIDRFIPITKLKYYFAVDTMYVGRKLGLLFFPYLHQDWEVQYQQDTPVAPRFDVNAPDLYIPAMAFITYVLVAGLALGTQDRFSPDLLGLQASSALAWLTLEVLAILLSLYLVTVNTDLTTIDLVAFLGYKYVGMIGGVLMGLLFGKIGYYLVLGWCCVAIFVFMFPLLPGAVAHACNPSTLGGRGGRITRSGRCG

SEQ ID NO: 753 - protein, 294 aa, Homo sapiens
MHPAGLAAAAAGTPRLPSKRRIPVSQPGMADPHQLFDDTSSAQSRGYGAQRAPGGLSYPAASPTPHAAFLADPVSNMAMAYGSSLAAQGKELVDKNIDRFIPITKLKYYFAVDTMYVGRKLGLLFFPYLHQDWEVQYQQDTPVAPRFDVNAPDLYIPAMAFITYVLVAGLALGTQDRFSPDLLGLQASSALAWLTLEVLAILLSLYLVTVNTDLTTIDLVAFLGYKYVGMIGGVLMGLLFGKIGYYLVLGWCCVAIFVFMFPLLPGAVAHACNPSTLGGRGGRITRSGDQDHPG

SEQ ID NO: 754 - protein, 299 aa, Homo sapiens
MPGSASKRRIPVSQPGMADPHQLFDDTSSAQSRGYGAQRAPGGLSYPAASPTPHAAFLADPVSNMAMAYGSSLAAQGKELVDKNIDRFIPITKLKYYFAVDTMYVGRKLGLLFFPYLHQDWEVQYQQDTPVAPRFDVNAPDLYIPAMAFITYVLVAGLALGTQDRFSPDLLGLQASSALAWLTLEVLAILLSLYLVTVNTDLTTIDLVAFLGYKYVGMIGGVLMGLLFGKIGYYLVLGWCCVAIFVFMIRTLRLKILADAAAEGVPVRGARNQLRMYLTMAVAAAQPMLMYWLTFHLVR

SEQ ID NO: 755 - protein, 782 aa, Homo sapiens
MAEPPRLPLTFEDVAIYFSEQEWQDLEAWQKELYKHVMRSNYETLVSLDDGLPKPELISWIEHGGEPFRKWRESQKSGNIICSSVDMHFDPGFEEQLFWGSQQAMNSGKTKSHFQLDPESQCSFGSFVSFRPDQGITLGSPQRHDARAPPPLACGPSESTLKEGIPGPRNLDLPGLWDVPAWESTQHPWPVCGESCWENNHLVMHQRGHSKDRTRRAWEKFNKRAETQMPWSSPRVQRHFRCGVCGKSFRRKLCLLRHLAAHTGRGPFRNADGEMCFRHELTHPSHRLPQQGEKPAQCTPCGKRSLPVDSTQARRCQHSREGPASWREGRGASSSVHSGQKPGSRLPQEGNSHQEGDTEALQHGAEGPCSCSECGERSPMSARLASPCRAHTGEKPFQCAHCTKRFRLRRLLQVHQHAHGGERPFSCRKCGKGFAKQCKLTEHIRVHSGEKPFRCAKCGRNFRQRGQLLRHQRLHTDEKPFQCPECGLSFRLESMLRAHRLRHGGERPFSCSECGRGFTHQCKLREHLRVHSGERPFQCLKCDKRFRLKGILKAHQHTHSKERPFSCGECGKGFTRQSKLTEHLRVHSGERPFQCPECNRSFRLKGQLLSHQRLHTGERPFQCPECDKRYRVKADMKAHQLLHSGEMPFSCECGKGFVKHSKLIEHIRTHTGEKPFQCPKCDKSFRLKAQLLSHQGLHTGERPFHCPECDKNFRERGHMLRHQRIHRPERPFACGDCGKGFIYKSKLAEHIRVHTKSCPAPNELDIKKRLSQLFAMIEADWS

SEQ ID NO: 756 - protein, 745 aa, Homo sapiens
MRSNYETLVSLDDGLPKPELISWIEHGGEPFRKWRESQKSGNIICSSVDMHFDPGFEEQLFWGSQQAMNSGKTKSHFQLDPESQCSFGSFVSFRPDQGITLGSPQRHDARAPPPLACGPSESTLKEGIPGPRNLDLPGLWDVPAWESTQHPWPVCGESCWENNHLVMHQRGHSKDRTRRAWEKFNKRAETQMPWSSPRVQRHFRCGVCGKSFRRKLCLLRHLAAHTGRGPFRNADGEMCFRHELTHPSHRLPQQGEKPAQCTPCGKRSLPVDSTQARRCQHSREGPASWREGRGASSSVHSGQKPGSRLPQEGNSHQEGDTEALQHGAEGPCSCSECGERSPMSARLASPCRAHTGEKPFQCAHCTKRFRLRRLLQVHQHAHGGERPFSCRKCGKGFAKQCKLTEHIRVHSGEKPFRCAKCGRNFRQRGQLLRHQRLHTDEKPFQCPECGLSFRLESMLRAHRLRHGGERPFSCSECGRGFTHQCKLREHLRVHSGERPFQCLKCDKRFRLKGILKAHQHTHSKERPFSCGECGKGFTRQSKLTEHLRVHSGERPFQCPECNRSFRLKGQLLSHQRLHTGERPFQCPECDKRYRVKADMKAHQLLHSGEMPFSCECGKGFVKHSKLIEHIRTHTGEKPFQCPKCDKSFRLKAQLLSHQGLHTGERPFHCPECDKNFRERGHMLRHQRIHRPERPFACGDCGKGFIYKSKLAEHIRVHTKSCPAPNELDIKKRLSQLFAMIEADWS

SEQ ID NO: 757 - protein, 648 aa, Homo sapiens
MMTTLQNKEECGKGPKRIFAPPAQKSYSLLPCSPNSPKEETPGISSPETEARISLPKASLKKKEEKATMKNVPSREQEKKRKAQINKQAEKKEKEKSSLTNAEFEEIVQIVLQKSLQECLGMGSGLDFAETSCAQPVVSTQSDKEPGITASATDTDNANGEEVPHTQEISVSWEGEAAPEIRTSKLGQPDPAPSKKKSNRLTLSKRKKEAHEKVEKTQGGHEHRQEDRLKKTVQDHSQIRDQQKGEISGFGQCLVWVQCSFPNCGKWRRLCGNIDPSVLPDNWSCDQNTDVQYNRCDIPEETWTGLESDVAYASYIPGSIIWAKQYGYPWWPGMIESDPDLGEYFLFTSHLDSLPSKYHVTFFGETVSRAWIPVNMLKNFQELSLELSVMKKRRNDCSQKLGVALMMAQEAEQISIQERVNLFGFWSRFNGSNSNGERKDLQLSGLNSPGSCLEKKEKEEELEKEEGEKTDPILPIRKRVKIQTQKTKPRGLGGDAGTADGRGRTLQRKIMKRSLGRKSTAPPAPRMGRKEGQGNSDSDQPGPKKKFKAPQSKALAASFSEGKEVRTVPKNLGLSACKGACPSSAKEEPRHREPLTQEAGSVPLEDEASSDLDLEQLMEDVGRELGQSGELQHSNSDGEDFPVALFGK

SEQ ID NO: 758 - protein, 468 aa, Homo sapiens
MMTTLQNKEECGKGPKRIFAPPAQKSYSLLPCSPNSPKEETPGISSPETEARISLPKASLKKKEEKATMKNVPSREQEKKRKAQINKQAEKKEKEKSSLTNAEFEEIVQIVLQKSLQECLGMGSGLDFAETSCAQPVVSTQSDKEPGITASATDTDNANGEEVPHTQEISVSWEGEAAPEIRTSKLGQPDPAPSKKKSNRLTLSKRKKEAQDEKVEKTQGGHEHRQEDRLKKTVQDHSQIRDQQKGEISGFGQCLVWVQCSFPNCGKWRRLCGNIDPSVLPDNWSCDQNTADVQYNRCDIPEETWTGLESDVAYASYIPGSIIWAKQYGYPWWPGMIESDPDLGEYFLFTSHLDSLPSKYHVTFFGETVSRAWIPVNMLKNFQELSLELSVMKKRRNDCSQKLGVALMMAQEAEQISIQERVNLFGFWSRFNGSNSNGERKDLQLSGLNSPGSCTQNGKERRPREFRF

SEQ ID NO: 759 - protein, 403 aa, Homo sapiens
MGSGLDFAETSCAQPVVSTQSDKEPGITASATDTDNANGEEVPHTQEISVSWEGEAAPEIRTSKLGQPDPAPSKKKSNRLTLSKRKKEAQDEKVEKTQGGHEHRQEDRLKKTVQDHSQIRDQQKGEISGFGQCLVWVQCSFPNCGKWRRLCGNIDPSVLPDNWSCDQNTDVQYNRCDIPEETWTGLESDVAYASYIPGSIIWAKQYGYPWWPGMIESDPDLGEYFLFTSHLDSLPSKYHVTFFGETVSRAWIPVNMLKNFQELSLELSVMKKRRNDCSQKLGVALMMAQEAEQISIQERVNLFGFWSRFNGSNSNGERKDLQLSGLNSPGSCLEKKEKEEELEKEEGEKTALRKNLKLPRARPWQPAFQREKKLEQCQRTWAYQRVRGPAPHLRKKSPDTGNP

SEQ ID NO: 760 - protein, 477 aa, Homo sapiens
MGSGLDFAETSCAQPVVSTQSDKEPGITASATDTDNANGEEVPHTQEISVSWEGEAAPEIRTSKLGQPDPAPSKKKSNRLTLSKRKKEAQDEKVEKTQGGHEHRQEDRLKKTVQDHSQIRDQQKGEISGFGQCLVWVQCSFPNCGKWRRLCGNIDPSVLPDNWSCDQNTDVQYNRCDIPEETWTGLESDVAYASYIPGSIIWAKQYGYPWWPGMIESDPDLGEYFLFTSHLDSLPSKYHVTFFGETVSRAWIPVNMLKNFQELSLELSVMKKRRNDCSQKLGVALMMAQEAEQISIQERVNLFGFWSRFNGSNSNGERKDLQLSGLNSPGSCLEKKEKEEELEKEEGEKTDPILPIRKRVKIQTQKTKPRGPKKKFKAPQSKALAASFSEGKEVRTVPKNLGLSACKGACPSSAKEEPRHREPLTQEAGSVPLEDEASSDLDLEQLMEDVGRELGQSGELQHSNSDGEDFPVALFGK

SEQ ID NO: 761 - protein, 524 aa, Homo sapiens
MMTTLQNKEECGKGPKRIFAPPAQKSYSLLPCSPNSPKEETPGISSPETEARISLPKASLKKKEEKATMKNVPSREQEKKRKAQINKQAEKKEKEKSSLTNAEFEEIVQIVLQKSLQECLGMGSGLDFAETSCAQPVVSTQSDKEPGITASATDTDNANGEEVPHTQEISVSWEGEAAPEIRTSKLGQPDPAPSKKKSNRLTLSKRKKEAQDEKVEKTQGGHEHRQEDRLKKTVQDHSQIRDQQKGEISGFGQCLVWVQCSFPNCGKWRRLCGNIDPSVLPDNWSCDQNTDVQYNRCDIPEETWTGLESDVAYASYIPGSIIWAKQYGYPWWPGMIESDPDLGEYFLFTSHLDSLPSKYHVTFFGETVSRAWIPVNMLKNFQELSLELSVMKKRRNDCSQKLGVALMMAQEAEQISIQERVNLFGFWSRFNGSNSNGERKDLQLSGLNSPGSCLEKKEKEEELEKEEGEKTALRKNLKLPRARPWQPAFQREKKLEQCQRTWAYQRVRGPAPHLRKKSPDTGNP

SEQ ID NO: 762 - protein, 610 aa, Homo sapiens
MDSVAFEDVAVNFTQEEWALLGPSQKSLYRNVMQETIRNLDCIEMKWEDQNIGDQCQNAKRNLRSHTCEIKDDSQCGETFGQIPDSIVNKNTPRVNPCDSGECGEVVLGHSSLNCNIRVDTGHKSCEHQEYGEKPYTHKQRGKAISHQHSFQTHERPPTGKKPFDCKECAKTFSSLGNLRRHMAAHHGDGPYKCKLCGKAFVWPSLFHLHERTHTGEKPYECKQCSKAFPFYSSYLRHERIHTGEKAYECKQCSKAFPDYSTYLRHERTHTGEKPYKCTQCGKAFSCYYYTRLHERTHTGEQPYACKQCGKTFYHHTSFRRHMIRHTGDGPHKCKICGKGFDCPSSVRNHETTHTGEKPYECKQCGKVLSHSSSFRSHMITHTGDGPQKCKICGKAFGCPSLFQRHERTHTGEKPYQCKQCGKAFSLAGSLRRHEATHTGVKPYKCQCGKAFSDLSSFQNHETTHTGEKPYECKECGKAFSCFKYLSQHKRTHTVEKPYECKTCRKAFSHFSNLKVHERIHSGEKPYECKECGKAFSWLTCLLRHERIHTGEKPYECLQCGKAFTRSRFLRGHEKTHTGEKLYECKECGKALSSLRSLHRHKRTHWKDTL

SEQ ID NO: 763 - protein, 428 aa, Homo sapiens
MAAHHGDGPYKCKLCGKAFVWPSLFHLHERTHTGEKPYECKQCSKAFPFYSSYLRHERIHTGEKAYECKQCSKAFPDYSTYLRHERTHTGEKPYKCTQCGKAFSCYYYTRLHERTHTGEQPYACKQCGKTFYHHTSFRRHMIRHTGDGPHKCKICGKGFDCPSSVRNHETTHTGEKPYECKQCGKVLSHSSSFRSHMITHTGDGPQKCKICGKAFGCPSLFQRHERTHTGEKPYQCKQCGKAFSLAGSLRRHEATHTGVKPYKCQCGKAFSDLSSFQNHETTHTGEKPYECKECGKAFSCFKYLSQHKRTHTVEKPYECKTCRKAFSHFSNLKVHERIHSGEKPYECKECGKAFSWLTCLLRHERIHTGEKPYECLQCGKAFTRSRFLRGHEKTHTGEKLYECKECGKALSSLRSLHRHKRTHWKDTL

SEQ ID NO: 764 - protein, 236 aa, Homo sapiens
MVVREASAAQASLSQVLPQLRYLHIFLEQVHTHFQEQSVGERGAAIQLAEGLARQLCTDCQLNKLFYREEFVLATLLDPCFKGKIEAILPWGPTDIDHWKQVLVYKVKEIRVSEYSLNSPSPLQSPRGLCVDPTRVAKSSGVEGRSQGEPLQSSSHSGAFLLAQREKGLLESMGLLASERSGGSLSTKSHWASIIVKKYLWENETVGAQDDPLAYWEKKREAWPPSICLTPHRSLL

SEQ ID NO: 765 - protein, 298 aa, Homo sapiens
MVRMVPVLLSLLLLLGPAVPQENQDGRYSLTYIYTGLSKHVEDVPAFQALGSLNDLQFFRYNSKDRKSQPMGLWRQVEGMEDWKQDSQLQKAREDIFMETLKDIVEYYNDSNGSHVLQGRFGCEIENNRSSGAFWKYYYDGKDYIEFNKEIPAWVPFDPAAQITKQKWEAEPVYVQRAKAYLEEECPATLRKYLKYSKNILDRQDPPSVVVTSHQAPGEKKKLKCLAYDFYPGKIDVHWTRAGEVQEPELRGDVLHNGNGTYQSWVVVAVPPQDTAPYSCHVQHSSLAQPLVVPWEAS

SEQ ID NO: 766 - protein, 197 aa, Homo sapiens
MSSLTYHHRLHTGEKPYKCEECDKAFRHNSALQRHRRIHTGEKPHKCNECGKTFSQKSYLACHRSIHTGKKPYECEECDKAFSFKSNLESHRITHTGEKPYKCNDCGKTFSHMSTLTCHRRLHTGEKPYKCEECDEAFRFKSSLERHRRIHNGEKLYKCNECGKTFSQELSLTCHCRLHSGEKPCKCGECDKAYSFK

SEQ ID NO: 767 - protein, 761 aa, Homo sapiens
MDSGGGSLGLHTPDSRMAHTMIMQDFVAGMAGTAHIDGDHIVVSVPEAVLVSDVVTDDGITLDHGLAAEVVHGPDIITETDVVTEGVIVPEAVLEADVAIEEDLEEDDGDHILTSELITETVRVPEQVFVADLVTGPNGHLEHVVQDCVSGVDSPTMVSEEVLVTNSDTETVIQAAGGVPGSTVTIKTEDDDDDDVKSTSEDYLMISLDDVGEKLEHMGNTPLKIGSDGSQEDAKEDGFGSEVIKVYIFKAEAEDDVEIGGTEIVTESEYTSGHSVAGVLDQSRMQREKMVYMAVKDSSQEEDDIRDERRVSRRYEDCQASGNTLDSALESRSSTAAQYLQICDGINTNKVLKQKAKKRRRGETRQWQTAVIIGPDGQPLTVYPCHICTKKFKSRGFLKRHMKNHPDHLMRKKYQCTDCDFTTNKKVSFHNHLESHKLINKVDKTHEFTEYTRRYREASPLSSNKLILRDKEPKMHKCKYCDYETAEQGLLNRHLLAVHSKNFPHVCVECGKGFRHPSELKKHMRTHTGEKPYQCQYCIFRCADQSNLKTHIKSKHGNNLPYKCEHCPQAFGDERELQRHLDLFQGHKTHQCPHCDHKSTNSSDLKRHIISVHTKDFPHKCEVCDKGFHRPSELKKHSDIHKGRKIHQCRHCDFKTSDPFILSGHILSVHTKDQPLKCKRCKRGFRQQNELKKHMKTHTGRKIYQCEYCEYSTTDASGFKRHVISIHTKDYPHRCEFCKKGFRRPSEKNQHIMRHHKEALM

SEQ ID NO: 768 - protein, 791 aa, Homo sapiens
MDSGGGSLGLHTPDSRMAHTMIMQDFVAGMAGTAHIDGDHIVVSVPEAVLVSDVVTDDGITLDHGLAAEVVHGPDIITETDVVTEGVIVPEAVLEADVAIEEDLEEDDGDHILTSELITETVRVPEQVFVADLVTGPNGHLEHVVQDCVSGVDSPTMVSEEVLVTNSDTETVIQAAGGVPGSTVTIKTEDDDDDDVKSTSEDYLMISLDDVGEKLEHMGNTPLKIGSDGSQEDAKEDGFGSEVIKVYIFKAEAEDDVEIGGTEIVTESEYTSGHSVAGVLDQSRMQREKMVYMAVKDSSQEEDDISCAEIADEVYMEVIVGEEEGTSLPEIQLEDSDVNKTVVPVVWAAAYGNTLDSALESRSSTAAQYLQICDGINTNKVLKQKAKKRRRGETRQWQTAVIIGPDGQPLTVYPCHICTKKFKSRGFLKRHMKNHPDHLMRKKYQCTDCDFTTNKKVSFHNHLESHKLINKVDKTHEFTEYTRRYREASPLSSNKLILRDKEPKMHKCKYCDYETAEQGLLNRHLLAVHSKNFPHVCVECGKGFRHPSELKKHMRTHTGEKPYQCQYCIFRCADQSNLKTHIKSKHGNNLPYKCEHCPQAFGDERELQRHLDLFQGHKTHQCPHCDHKSTNSSDLKRHIISVHTKDFPHKCEVCDKGFHRPSELKKHSDIHKGRKIHQCRHCDFKTSDPFILSGHILSVHTKDQPLKCKRCKRGFRQQNELKKHMKTHTGRKIYQCEYCEYSTTDASGFKRHVISIHTKDYPHRCEFCKKGFRRPSEKNQHIMRHHKEALM

SEQ ID NO: 769 - protein, 807 aa, Homo sapiens
MDSGGGSLGLHTPDSRMAHTMIMQDFVAGMAGTAHIDGDHIVVSVPEAVLVSDVVTDDGITLDHGLAAEVVHGPDIITETDVVTEGVIVPEAVLEADVAIEEDLEEDDGDHILTSELITETVRVPEQVFVADLVTGPNGHLEHVVQDCVSGVDSPTMVSEEVLVTNSDTETVIQAAGGVPGSTVTIKTEDDDDDDVKSTSEDYLMISLDDVGEKLEHMGNTPLKIGSDGSQEDAKEDGFGSEVIKVYIFKAEAEDDVEIGGTEIVTESEYTSGHSVAGVLDQSRMQREKMVYMAVKDSSQEEDDISCAEIADEVYMEVIVGEEEGTSLPEIQLEDSDVNKTVVPVVWAAAYGDERRVSRRYEDCQASGNTLDSALESRSSTAAQYLQICDGINTNKVLKQKAKKRRRGETRQWQTAVIIGPDGQPLTVYPCHICTKKFKSRGFLKRHMKNHPDHLMRKKYQCTDCDFTTNKKVSFHNHLESHKLINKVDKTHEFTEYTRRYREASPLSSNKLILRDKEPKMHKCKYCDYETAEQGLLNRHLLAVHSKNFPHVCVECGKGFRHPSELKKHMRTHTGEKPYQCQYCIFRCADQSNLKTHIKSKHGNNLPYKCEHCPQAFGDERELQRHLDLFQGHKTHQCPHCDHKSTNSSDLKRHIISVHTKDFPHKCEVCDKGFHRPSELKKHSDIHKGRKIHQCRHCDFKTSDPFILSGHILSVHTKDQPLKCKRCKRGFRQQNELKKHMKTHTGRKIYQCEYCEYSTTDASGFKRHVISIHTKDYPHRCEFCKKGFRRPSEKNQHIMRHHKEALM

SEQ ID NO: 770 - protein, 783 aa, Homo sapiens
MVAKPPVMSFHFAQDLWPEQNIKDSFQKVTLRRYGKCEYENLQLRKGCKHVDECTGHKGGHNTVNQCLTATPSKIFQCNKYVKVFDKFSNSNRYKRRHTGNKHFKCKECSKSFCVLSQLTQHRRIHTRVNSYKCEECGKAFNWFSTLTKHKRIHTGEKPYKCEECGKAFNQSSQLTRHKIIHTEEKPNKCEECGKAFKQASHLTIHKIIHTGEKPYKYEECGKVFSQSSHLTTQKILHTGENLYKCKECGKAFNLFSNLTNHKRIHAGEKPYKCKECGRAFNISSNLNKQEKIHTGGKLNKCEECDKAFNRSLKLTAHKKILMEEKPYKCEECGKVFNQFSTLTRHKIIHTGEKPYKCKECGKAFNQSSNLTEHKKIHTAEKSYKCEECGKAFNQHSNLINHRKIYSGEKPYKCEECGKAFNRSSTLTRHKKIHTGEKPYKCEECDRAFSQSSNLTEHKKIHTGEKPYKCEECGKAFNRFSTLTKHKRIHTGEKPYKCEECGKAFNQSYQLTRHKIVHTKEKLNKCEEFGKAFKQSSHRTIHKIIHTGEKPYKCEEHGKVFNQSSNLTTQKIIHTGENLYKFEEHGKAFNLFSNITNHKIIYTGEKPHKCEECGKAYNRFSNLTIHKRIHTGEKPYQCAECGKAFNCSSTLNRHKIIHTGEKPYKCKECGKAFNLSSTLTAHKKIHTGEKPYKCEECGKAFNQSSNLTTHKKIHTSEKPYKCEECGKSFNQFSSLNIHKIIHTGEKPYKCGDYGRAFNLSSNLTTHKKIHTGEKPYKCEYGKT

SEQ ID NO: 771 - protein, 773 aa, Homo sapiens
MFSLSSTVQPQVTVPLSHLINAFHTPKNTSVSLSGVSVSQNQHRDVVPEHEAPSSECMFSDFLTKLNIVSIGKGKIFEGYRSMFMEPAKRMKKSLDTTDNWHIRPEPFSLSIPPSLNLRDLGLSELKIGQIDQLVENLLPGFCKGKNISSHWHTSHVSAQSFFENKYGNLDIFSTLRSSCLYRHHSRALQSICSDLQYWPVFIQSRGFKTLKSRTRRLQSTSERLAETQNIAPSFVKGFLLRDRGSDVESLDKLMKTKNIPEAHQDAFKTGFAEGFLKAQALTQKTNDSLRRTRLILFVLLLFGIYGLLKNPFLSVRFRTTTGLDSAVDPVQMKNVTFEHVKGVEEAKQELQEVVEFLKNPQKFTILGGKLPKGILLVGPPGTGKTLLARAVAGEADVPFYYASGSEFDEMFVGVGASRIRNLFREAKANAPCVIFIDELDSVGGKRIESPMHPYSRQTINQLLAEMDGFKPNEGVIIIGATNFPEALDNALIRPGRFDMQVTVPRPDVKGRTEILKWYLNKIKFDQSVDPEIIARGTVGFSGAELENLVNQAALKAAVDGKEMVTMKELEFSKDKILMGPERRSVEIDNKNKTITAYHESGHAIIAYYTKDAMPINKATIMPRGPTLGHVSLLPENDRWNETRAQLLAQMDVSMGGRVAEELIFGTDHITTGASSDFDNATKIAKRMVTKFGMSEKLGVMTYSDTGKLSPETQSAIEQEIRILLRDSYERAKHILKTHAKEHKNLAEALLTYETLDAKEIQIVLEGKKLEVR

SEQ ID NO: 772 - protein, 716 aa, Homo sapiens
MFSLSSTVQPQVTVPLSHLINAFHTPKNTSVSLSGVSVSQNQHRDVVPEHEAPSSEPSLNLRDLGLSELKIGQIDQLVENLLPGFCKGKNISSHWHTSHVSAQSFFENKYGNLDIFSTLRSSCLYRHHSRALQSICSDLQYWPVFIQSRGFKTLKSRTRRLQSTSERLAETQNIAPSFVKGFLLRDRGSDVESLDKLMKTKNIPEAHQDAFKTGFAEGFLKAQALTQKTNDSLRRTRLILFVLLLFGIYGLLKNPFLSVRFRTTTGLDSAVDPVQMKNVTFEHVKGVEEAKQELQEVVEFLKNPQKFTILGGKLPKGILLVGPPGTGKTLLARAVAGEADVPFYYASGSEFDEMFVGVGASRIRNLFREAKANAPCVIFIDELDSVGGKRIESPMHPYSRQTINQLLAEMDGFKPNEGVIIIGATNFPEALDNALIRPGRFDMQVTVPRPDVKGRTEILKWYLNKIKFDQSVDPEIIARGTVGFSGAELENLVNQAALKAAVDGKEMVTMKELEFSKDKILMGPERRSVEIDNKNKTITAYHESGHAIIAYYTKDAMPINKATIMPRGPTLGHVSLLPENDRWNETRAQLLAQMDVSMGGRVAEELIFGTDHITTGASSDFDNATKIAKRMVTKFGMSEKLGVMTYSDTGKLSPETQSAIEQEIRILLRDSYERAKHILKTHAKEHKNLAEALLTYETLDAKEIQIVLEGKKLEVR

SEQ ID NO: 773 - protein, 683 aa, Homo sapiens
MFSLSSTVQPQVTVPLSHLINAFHTPKNTSVSLSGVSVSQNQHRDVVPEHEAPSSEPSLNLRDLGLSELKIGQIDQLVENLLPGFCKGKNISSHWHTSHVSAQSFFENKYVFIQSRGFKTLKSRTRRLQSTSERLAETQNIAPSFVKGFLLRDRGSDVESLDKLMKTKNIPEAHQDAFKTGFAEGFLKAQALTQKTNDSLRRTRLILFVLLLFGIYGLLKNPFLSVRFRTTTGLDSAVDPVQMKNVTFEHVKGVEEAKQELQEVVEFLKNPQKFTILGGKLPKGILLVGPPGTGKTLLARAVAGEADVPFYYASGSEFDEMFVGVGASRIRNLFREAKANAPCVIFIDELDSVGGKRIESPMHPYSRQTINQLLAEMDGFKPNEGVIIIGATNFPEALDNALIRPGRFDMQVTVPRPDVKGRTEILKWYLNKIKFDQSVDPEIIARGTVGFSGAELENLVNQAALKAAVDGKEMVTMKELEFSKDKILMGPERRSVEIDNKNKTITAYHESGHAIIAYYTKDAMPINKATIMPRGPTLGHVSLLPENDRWNETRAQLLAQMDVSMGGRVAEELIFGTDHITTGASSDFDNATKIAKRMVTKFGMSEKLGVMTYSDTGKLSPETQSAIEQEIRILLRDSYERAKHILKTHAKEHKNLAEALLTYETLDAKEIQIVLEGKKLEVR

SEQ ID NO: 774 - protein, 536 aa, Homo sapiens
MILLSFVSDSNVGTGEKKVTEAWISEDENSHRTTSDRLTVMELPSPESEEVHEPRLGELLGNPEGQSLGSSPSQDRGCKQVTVTHWKIQTGETAQVCTKSGRNHILNSDLLLLQRELIEGEANPCDICGKTFTFNSDLVRHRISHAGEKPYTCDQCGKGFGQSSHLMEHQRIHTGERLYVCNVCGKDFIHYSGLIEHQRVHSGEKPFKCAQCGKAFCHSSDLIRHQRVHTRERPFECKECGKGFSQSSLLIRHQRIHTGERPYECNECGKSFIRSSSLIRHYQIHTEVKQYECKECGKAFRHRSDLIEHQRIHTGERPFECNECGKAFIRSSKLIQHQRIHTGERPYVCNECGKRFSQTSNFTQHQRIHTGEKLYECNECGKAFFLSSYLIRHQKIHTGERVYECKECGKAFLQKAHLTEHQKIHSGDRPFECKDCGKAFIQSSKLLLHQIIHTGEKPYVCSYCGKGFIQRSNFLQHQKIHTEEKLYECSQYGRDFNSTTNVKNNQRVHQEGLSLSKAPIHLGERSVDKGEHTGNL

SEQ ID NO: 775 - protein, 496 aa, Homo sapiens
MELPSPESEEVHEPRLGELLGNPEGQSLGSSPSQDRGCKQVTVTHWKIQTGETAQVCTKSGRNHILNSDLLLLQRELIEGEANPCDICGKTFTFNSDLVRHRISHAGEKPYTCDQCGKGFGQSSHLMEHQRIHTGERLYVCNVCGKDFIHYSGLIEHQRVHSGEKPFKCAQCGKAFCHSSDLIRHQRVHTRERPFECKECGKGFSQSSLLIRHQRIHTGERPYECNECGKSFIRSSSLIRHYQIHTEVKQYECKECGKAFRHRSDLIEHQRIHTGERPFECNECGKAFIRSSKLIQHQRIHTGERPYVCNECGKRFSQTSNFTQHQRIHTGEKLYECNECGKAFFLSSYLIRHQKIHTGERVYECKECGKAFLQKAHLTEHQKIHSGDRPFECKDCGKAFIQSSKLLLHQIIHTGEKPYVCSYCGKGFIQRSNFLQHQKIHTEEKLYECSQYGRDFNSTTNVKNNQRVHQEGLSLSKAPIHLGERSVDKGEHTGNL

SEQ ID NO: 776 - protein, 357 aa, Homo sapiens
MLKLVIIENMAEIMLFSLDLLLFSTDILCFNFPSKMIKLPGFITIQIFFYPQASFGISANTILLLFHIFTFVFSHRSKSIDMIISHLSLIHILLLFTQAILVSLDFFGSQNTQDDLRYKVIVFLNKVMRGLSICTPCLLSVLQAIISPSIFSLAKLKHPSASHILGFFLFSWVLNMFIGVIFCCTLRLPPVKRGQSSVCHTALFLFAHELHPQETVFHTNDFEGCHLYRVHGPLKRLHGDYFIQTIRGYLSAFTQPACPRVSPVKRASQAILLLVSFVFTYWVDFTFSFSGGVTWINDSLLVWLQVIVANSYAAISPLMLIYADNQIFKTLQMLWFKYLSPPKLMLKFNRQCGSTKK

SEQ ID NO: 777 - protein, 269 aa, Homo sapiens
MARASSGNGSEEAWGALRAPQQQLRELCPGVNNQPYLCESGHCCGETGCCTYYYELWWFWLLWTVLILFSCCCAFRHRRAKLRLQQQQRQREINLLAYHGACHGAGPFPTGSLLDLRFLSTFKPPAYEDVVHRPGTPPPPYTVAPGRPLTASSEQTCCSSSSSCPAHFEGTNVEGVSSHQSAPPHQEGEPGAGVTPASTPPSCRYRRLTGDSGIELCPCPASGEGEPVKEVRVSATLPDLEDYSPCALPPESVPQIFPMGLSSSEGDIP

SEQ ID NO: 778 - protein, 145 aa, Homo sapiens
MGPWPRDWLGKGWRLGSCEARAGAKEVSVIRHGAPNPAQSHLHVQARAQVHSEDGHSLPPVVDGEDEVLSLLVFVQDSQECCRQAVQGRQGRGVTWGLGLPSYHLRTLLSPVCVPARDQRAPRKCCEAVLACPLVETLVTTLLTR

SEQ ID NO: 779 - protein, 355 aa, Homo sapiens
MGTKGLPLYPDPSRVPGTKTQNNLESDYLARDGPSSNSSFHSSEEEGTDLEGDMLDCSGSRPLLMESEEEDESCRPPPGKLGGAVPFAPPEVSPEQAKTVQGGRKNQFQAFTQPATDGLSEPDVFAIAPFRSSRVPNDDMDIFSKAPFVSKSSMAPSQPEESDVFLRAPFTKKKSMEELTVIQCTSQELPAQTGLLSQTGDVPLPAGRERAVYTSVQAQYSTAGFVQQSNLLSHSVQAADHLDSISPRGSCLESGGHSNDRNKGPQLQKEAVSGPMAGKPFRPQSLSKYSRHYSPEDEPSPEAQPIAAYKIVSQTNKQSIAGSVSITSLSSRTTELPAADPFALAPFPSKSGKKP

SEQ ID NO: 780 - protein, 606 aa, Homo sapiens
MAVTFEDVTIIFTWEEWKFLDSSQKRLYREVMWENYTNVMSVENWNESYKSQEEKFRYLEYENFSYWQGWWNAGAQMYENQNYGETVQGTDSKDLTQQDRSQCQEWLILSTQVPGYGNYELTFESKSLRNLKYKNFMPWQSLETKTTQDYGREIYMSGSHGFQGGRYRLGISRKNLSMEKEQKLIVQHSYIPVEEALPQYVGVICQEDLLRDSMEEKYCGCNKCKGIYYWNSRCVFHKRNQPGENLCQCSICKACFSQRSDLYRHPRNHIGKKLYGCDEVDGNFHQSSGVHFHQRVHIGEVPYSCNACGKSFSQISSLHNHQRVHTEEKFYKIECDKDLSRNSLLHIHQRLHIGEKPFKCNQCGKSFNRSSVLHVHQRVHTGEKPYKCDECGKGFSQSSNLRIHQLVHTGEKSYKCEDCGKGFTQRSNLQIHQRVHTGEKPYKCDDCGKDFSHSSDLRIHQRVHTGEKPYTCPECGKGFSKSSKLHTHQRVHTGEKPYKCEECGKGFSQRSHLLIHQRVHTGEKPYKCHDCGKGFSHSSNLHIHQRVHTGEKPYQCAKCGKGFSHSSALRIHQRVHAGEKPYKCREYYKGFDHNSHLHNNHRRGNL

SEQ ID NO: 781 - protein, 365 aa, Homo sapiens
MAPWTLWRCCQRVVGWVPVLFITFVVVWSYYAYVVELCVFTIFGNEENGKTVVYLVAFHLFFVMFVWSYWMTIFTSPASPSKEFYLSNSEKERYEKEFSQERQQEILRRAARALPIYTTSASKTIRYCEKCQLIKPDRAHHCSACDSCILKMDHHCPWVNNCVGFSNYKFFLLFLLYSLLYCLFVAATVLEYFIKFWTNELTDTRAKFHVLFLFFVSAMFFISVLSLFSYHCWLVGKNRTTIESFRAPTFSYGPDGNGFSLGCSKNWRQVFGDEKKYWLLPIFSSLGDGCSFPTRLVGMDPEQASVTNQNEYARSSGSNQPFPIKPLSESKNRLLDSESQWLENGAEEGIVKSGTNNHVTVAIEN

SEQ ID NO: 782 - protein, 130 aa, Homo sapiens
MAPWTLWRCCQRVVGWVPVLFITFVVVWSYYAYVVELCVFTIFGNEENGKTVVYLVAFHLFFVMFVWSYWMTIFTSPASPSKEFYLSNSEKERYEKEFSQERQQEILRRAARALPIYTTSASKSLMQSTK

SEQ ID NO: 783 - protein, 354 aa, Homo sapiens
MAPWTLWRCCQRVVGWVPVLFITFVVVWSYYAYVVELCVFTIFGNEENGKTVVYLVAFHLFFVMFVWSYWMTIFTSPASPSKEFYLSNSEKERYEKEFSQERQQEILRRAARALPIYTTSASKTIRYCEKCQLIKPDRAHHCSACDSCILKMDHHCPWVNNCVGFSNYKFFLLFLLYSLLYCLFVAATVLEYFIKFWTNELTDTRAKFHVLFLFFVSAMFFISVLSLFSYHCWLVGKNRTTIESFRAPTFSYGPDGNGFSLGCSKNWRQVFGDEKKYWLLPIFSSLGDGCSFPTRLVGMDPEQASVTNQNEYARSGSNQPFPIKPLSESKNRLLDSESQWLENGAEEGIVKSGV

SEQ ID NO: 784 - protein, 320 aa, Homo sapiens
MAPWTLWRCCQRVVGWVPVLFITFVVVWSYYAYVVELCVFTIFGNEENGKTVVYLVAFHLFFVMFVWSYWMTIFTSPASPSKEFYLSNSEKERYEKEFSQERQQEILRRAARALPIYTTSASKTIRYCEKCQLIKPDRAHHCSACDSCILKMDHHCPWVNNCVGFSNYKFFLLFLLYSLLYCLFVAATVLEYFIKFWTNELTDTRAKFHVLFLFFVSAMFFISVLSLFSYHCWLVGKNRTTIESFRAPTFSYGPDGNGFSLGCSKNWRQVFGDEKKYWLLPIFSSLGDGCSFPTRLVGMDPEQASVTNQNEYARRSKLQR

SEQ ID NO: 785 - protein, 523 aa, Homo sapiens
MALPQGLLTFRDVAIEFSQEEWKCLDPAQRTLYRDVMLENYRNLVSLDISSKCMMKEFSSTAQGNREVFHAGTSQRHESHHNGDFCFQDIDKDIHDIEFQWQEDERNGHEALMTKIKKLTGSTERYDQNYAGNKPVKYQLGFSFHSHLPELHIFHTEEKIDNQVVKSIHDASLVSTAQRISCRPETHISNDYGNNFLNSSLFTQKQEVHMREKSFQCNDSGKAYNCSSLLRKHQLIHLGEKQYKCDICGKVFNSKRYVARHRRCHTGEKPYKCNECGKTFSQTYYLTCHRRLHTGEKPYKCEECDKAFHFKSKLQIHRRIHTGEKPYKCNECGKTFSQKSYLTCHRRLHTGEKPYKCNECGKTFSRKSHFTCHHRVHTGEKPYKCNECSKTFSHKSSLTYHRRLHTEEKPYKCNECGKTFNQQLTLNICRLHSGEKPYKCEECDKAYSFKSNLEIHQKIHTEENPYKCNECGKTFSRTSSLTYHHRLHTGQKPYKCEDCDEAFSFKSNLERHRRIYTGEKLHV

SEQ ID NO: 786 - protein, 60 aa, Homo sapiens
MALPQGLLTFRDVAIEFSQEEWKCLDPAQRTLYRDVMLENYRNLVSLELSGECPLAAPAS

SEQ ID NO: 787 - protein, 127 aa, Homo sapiens
MALPQGLLTFRDVAIEFSQEEWKCLDPAQRTLYRDVMLENYRNLVSLEFWSVIPAKVQWCHLRSLQPPLPRFKQFSCLSLPSTWDYRYLFQMHVEDVVVNRARQYRSDPHRDIAQTSKSSHWRILFP

SEQ ID NO: 788 - protein, 573 aa, Homo sapiens
MDAKSLTAWSRTLVTFKDVFVDFTREEWKLLDTAQQIVYRNVMLENYKNLVSLGYQLTKPDVILRLEKGEEPWLVEREIHQETHPDSETAFEIKSSVSSRSIFKDKQSCDIKMEGMARNDLWYLSLEEVWKCRDQLDKYQENPERHLRQVAFTQKKVLTQERVSESGKYGGNCLLPAQLVLREYFHKRDSHTKSLKHDLVLNGHQDSCASNSNECGQTFCQNIHLIQFARTHTGDKSYKCPDNDNSLTHGSSLGISKGIHREKPYECKECGKFFSWRSNLTRHQLIHTGEKPYECKECGKSFSRSSHLIGHQKTHTGEEPYECKECGKSFSWFSHLVTHQRTHTGDKLYTCNQCGKSFVHSSRLIRHQRTHTGEKPYECPECGKSFRQSTHLILHQRTHVRVRPYECNECGKSYSQRSHLVVHHRIHTGLKPFECKDCGKCFSRSSHLYSHQRTHTGEKPYECHDCGKSFSQSSALIVHQRIHTGEKPYECCQCGKAFIRKNDLIKHQRIHVGEETYKCNQCGIIFSQNSPFIVHQIAHTGEQFLTCNQCGTALVNTSNLIGYQTNHIRENAY

SEQ ID NO: 789 - protein, 194 aa, Homo sapiens
MAAKSTQDSLPRDTGEPSALPVQGRAEGRSSEGRKERTAECALRGKQASEPALRKRNFLPGPNSDTVRPAAETELVPCSLRHPRQDLCGEHPSFPVMQPSLETQAKPERDRAVLIPPKGPWPPAQGLAMRTHCPTGPPSKAYCRGGSSSTSRNQVASLAYRTQNTAASQPRQPGGRGKEDTAGYGSCSPRSLAV

SEQ ID NO: 790 - protein, 187 aa, Homo sapiens
MVMHSEDEPYKCKFCGKAFDNLHLYLTHERTHTGEKPYECNKCGKAFSCSSSIRKHARIHTGEKPYICKQCGKAFRYSSSIRNHENTHTGEKPCECKQCGKAFSYSSYFRIHERIHTGEQVYKCKECGKTFTYPSAFHKHKSTHTSQKLYECKECGKAFDCFSSFHSHEGVHTGEKPYECRTWKSLQ

SEQ ID NO: 791 - protein, 371 aa, Homo sapiens
MDMAQEPVTFRDVAIYFSREEWACLEPSQRALYRDVMLDNFSSVAALGFCSPRPDLVSRLEQWEEPWVEDRERPEFQAVQRGPRPGARKSADPKRPCDHPAWAHKKTHVRRERAREGSSFRKGFRLDTDDGQLPRAAPERTDAKPTAFPCQVLTQRCGRRPGRRERRKQRAVELSFICGTCGKALSCHSRLLAHQTVHTGTKAFECPECGQTFRWASNLQRHQKNHTREKPFCCEACGQAFSLKDRLAQHRKVHTEHRPYSCGDCGKAFKQKSNLLRHQLVHTGERPFYCADCGKAFRTKENLSHHQRVHSGEKPYTCAECGKSFRWPKGFSIHRRLHLTKRFYECGHCGKGFRHLGFFTRHQRTHRHGEV

SEQ ID NO: 792 - protein, 1548 aa, Homo sapiens
MAEREVESGPRKRFEQKSGAVFDEIVENCGGIMDTEMSEDIDHNLTPTLDSMSYGMPNQTGSENSLLDEDDYFLNSGDLAGIPVVGSDNEDEQDFSSKDNLVSSIHTDDSLEVERRVTQHESDNENEIQIQNKLKKDFPKQFDQVSVFKSIRKDFSLVRENSKETFSGKEKNRDLTYEREKRLDKPHKDLDSRLKSSFFDKAANQVEETLHTHLPQTPETNFRDSSYPFANKESIGSELGNSFASNIRIKEEPLDDEYDKAMAPQQGLLDKIKDEPDNAQEYSHGQQQKTQEGELKISAVFSVSGSPLAPQLTTGFQPSLASSGMNKMLPSVPATAVRVSCSGCKKILQKGQTAYQRKGSTQLFCSTLCLTGYTVPPARPPPPLTKKTCSSCSKDILNPKDVISAQFENTTTSKDFCSQSCLSTYELKKKPIVTINTNSISTKCSMCQKNAVIRHEVNYQNVVHKLCSDACFSKFRSANNLTMNCCENCGGYCYSGSGQCHMLQIEGQSKKFCSSSCITAYKQKSAKITPCALCKSLRSSAEMIENTNSLGKTELFCSVNCLSAYRVKMVTSAGVQVQCNSCKTSAIPQYHLAMSDGSIRNFCSYSCVVAFQNLFNKPTGMNSSVVPLSQGQVIVSIPTGSTVSAGGGSTSAVSPTSISSSAAAGLQRLAAQSQHVGFARSVVKLKCQHCNRLFATKPELLDYKGKMFQFCGKNCSDEYKKINNVMAMCEYCKIEKIVKETVRFSGADKSFCSEGCKLLYKHDLAKRWGNHCKMCSYCLQTSPKLVQNNLGGKVEEFCCEECMSKYTVLFYQMAKCDACKRQGKLSESLKWRGEMKHFCNLLCILMFCNQQSVCDPPSQNNAANISMVQAASAGPPSLRKDSTPVIANVVSLASAPAAQPTVNSNSVLQGAVPTVTAKIIGDASTQTDALKLPPSQPPRLLKNKALLCKPITQTKATSCKPHTQNKECQTEDTPSQPQIIVVPVPVPVFVPIPLHLYTQYAPVPFGIPVPMPVPMLIPSSMDSEDKVTESIEDIKEKLPTHPFEADLLEMAEMIAEDEEKKTLSQGESQTSEHELFLDTKIFEKDQGSTYSGDLESEAVSTPHSWEEELNHYALKSNAVQEADSELKQFSKGETEQDLEADFPSDSFDPLNKGQGIQARSRTRRRHRDGFPQPRRRGRKKSIVAVEPRSLIQGAFQGCSVSGMTLKYMYGVNAWKNWVQWKNAKEEQGDLKCGGVEQASSSPRSDPLGSTQDHALSQESSEPGCRVRSIKLKEDILSCTFAELSLGLCQFIQEVRRPNGEKYDPDSILYLCLGIQQYLFENGRIDNIFTEPYSRFMIELTKLLKIWEPTILPNGYMFSRIEEEHLWECKQLGAYSPIVLLNTLLFFNTKYFQLKNVTEHLKLSFAHVMRRTRTLKYSTKMTYLRFFPPLQKQESEPDKLTVGKRKRNEDDEVPVGVEMAENTDNPLRCPVRLYEFYLSKCSESVKQRNDVFYLQPERSCVPNSPMWYSTFPIDPGTLDTMLTRILMVREVHEELAKAKSEDSDVELSD

SEQ ID NO: 793 - protein, 1459 aa, Homo sapiens
MAEREVESGPRKRFEQKSGAVFDEIVENCGGIMDTEMSEDIDHNLTPTLDSMSYGMPNQTGSENSLLDEDDYFLNSGDLAGIPVVGSDNEDEQDFSSKDNLVSSIHTDDSLEVERRVTQHESDNENEIQIQNKLKKDFPKQFDQVSVFKSIRKDFSLVRENSKETFSGKEKNRDLTYEREKRLDKPHKDLDSRLKSSFFDKAANQVEETLHTHLPQTPETNFRDSSYPFANKESIGSELGNSFASNIRIKEEPLDDEYDKAMAPQQGLLDKIKDEPDNAQEYSHGQQQKTQEGELKISAVFSVSGSPLAPQLTTGFQPSLASSGMNKMLPSVPATAVRVSCSGCKKILQKGQTAYQRKGSTQLFCSTLCLTGYTVPPARPPPPLTKKTCSSCSKDILNPKDVISAQFENTTTSKDFCSQSCLSTYELKKKPIVTINTNSISTKCSMCQKNAVIRHEVNYQNVVHKLCSDACFSKFRSANNLTMNCCENCGGYCYSGSGQCHMLQIEGQSKKFCSSSCITAYKQNLFNKPTGMNSSVVPLSQGQVIVSIPTGSTVSAGGGSTSAVSPTSISSSAAAGLQRLAAQSQHVGFARSVVKLKCQHCNRLFATKPELLDYKGKMFQFCGKNCSDEYKKINNVMAMCEYCKIEKIVKETVRFSGADKSFCSEGCKLLYKHDLAKRWGNHCKMCSYCLQTSPKLVQNNLGGKVEEFCCEECMSKYTVLFYQMAKCDACKRQGKLSESLKWRGEMKHFCNLLCILMFCNQQSVCDPPSQNNAANISMVQAASAGPPSLRKDSTPVIANVVSLASAPAAQPTVNSNSVLQGAVPTVTAKIIGDASTQTDALKLPPSQPPRLLKNKALLCKPITQTKATSCKPHTQNKECQTEDTPSQPQIIVVPVPVPVFVPIPLHLYTQYAPVPFGIPVPMPVPMLIPSSMDSEDKVTESIEDIKEKLPTHPFEADLLEMAEMIAEDEEKKTLSQGESQTSEHELFLDTKIFEKDQGSTYSGDLESEAVSTPHSWEEELNHYALKSNAVQEADSELKQFSKGETEQDLEADFPSDSFDPLNKGQGIQARSRTRRRHRDGFPQPRRRGRKKSIVAVEPRSLIQGAFQGCSVSGMTLKYMYGVNAWKNWVQWKNAKEEQGDLKCGGVEQASSSPRSDPLGSTQDHALSQESSEPGCRVRSIKLKEDILSCTFAELSLGLCQFIQEVRRPNGEKYDPDSILYLCLGIQQYLFENGRIDNIFTEPYSRFMIELTKLLKIWEPTILPNGYMFSRIEEEHLWECKQLGAYSPIVLLNTLLFFNTKYFQLKNVTEHLKLSFAHVMRRTRTLKYSTKMTYLRFFPPLQKQESEPDKLTVGKRKRNEDDEVPVGVEMAENTDNPLRCPVRLYEFYLSKCSESVKQRNDVFYLQPERSCVPNSPMWYSTFPIDPGTLDTMLTRILMVREVHEELAKAKSEDSDVELSD

SEQ ID NO: 794 - protein, 1224 aa, Homo sapiens
MNKMLPSVPATAVRVSCSGCKKILQKGQTAYQRKGSTQLFCSTLCLTGYTVPPARPPPPLTKKTCSSCSKDILNPKDVISAQFENTTTSKDFCSQSCLSTYELKKKPIVTINTNSISTKCSMCQKNAVIRHEVNYQNVVHKLCSDACFSKFRSANNLTMNCCENCGGYCYSGSGQCHMLQIEGQSKKFCSSSCITAYKQKSAKITPCALCKSLRSSAEMIENTNSLGKTELFCSVNCLSAYRVKMVTSAGVQVQCNSCKTSAIPQYHLAMSDGSIRNFCSYSCVVAFQNLFNKPTGMNSSVVPLSQGQVIVSIPTGSTVSAGGGSTSAVSPTSISSSAAAGLQRLAAQSQHVGFARSVVKLKCQHCNRLFATKPELLDYKGKMFQFCGKNCSDEYKKINNVMAMCEYCKIEKIVKETVRFSGADKSFCSEGCKLLYKHDLAKRWGNHCKMCSYCLQTSPKLVQNNLGGKVEEFCCEECMSKYTVLFYQMAKCDACKRQGKLSESLKWRGEMKHFCNLLCILMFCNQQSVCDPPSQNNAANISMVQAASAGPPSLRKDSTPVIANVVSLASAPAAQPTVNSNSVLQGAVPTVTAKIIGDASTQTDALKLPPSQPPRLLKNKALLCKPITQTKATSCKPHTQNKECQTEDTPSQPQIIVVPVPVPVFVPIPLHLYTQYAPVPFGIPVPMPVPMLIPSSMDSEDKVTESIEDIKEKLPTHPFEADLLEMAEMIAEDEEKKTLSQGESQTSEHELFLDTKIFEKDQGSTYSGDLESEAVSTPHSWEEELNHYALKSNAVQEADSELKQFSKGETEQDLEADFPSDSFDPLNKGQGIQARSRTRRRHRDGFPQPRRRGRKKSIVAVEPRSLIQGAFQGCSVSGMTLKYMYGVNAWKNWVQWKNAKEEQGDLKCGGVEQASSSPRSDPLGSTQDHALSQESSEPGCRVRSIKLKEDILSCTFAELSLGLCQFIQEVRRPNGEKYDPDSILYLCLGIQQYLFENGRIDNIFTEPYSRFMIELTKLLKIWEPTILPNGYMFSRIEEEHLWECKQLGAYSPIVLLNTLLFFNTKYFQLKNVTEHLKLSFAHVMRRTRTLKYSTKMTYLRFFPPLQKQESEPDKLTVGKRKRNEDDEVPVGVEMAENTDNPLRCPVRLYEFYLSKCSESVKQRNDVFYLQPERSCVPNSPMWYSTFPIDPGTLDTMLTRILMVREVHEELAKAKSEDSDVELSD

SEQ ID NO: 795 - protein, 1516 aa, Homo sapiens
MDTEMSEDIDHNLTPTLDSMSYGMPNQTGSENSLLDEDDYFLNSGDLAGIPVVGSDNEDEQDFSSKDNLVSSIHTDDSLEVERRVTQHESDNENEIQIQNKLKKDFPKQFDQVSVFKSIRKDFSLVRENSKETFSGKEKNRDLTYEREKRLDKPHKDLDSRLKSSFFDKAANQVEETLHTHLPQTPETNFRDSSYPFANKESIGSELGNSFASNIRIKEEPLDDEYDKAMAPQQGLLDKIKDEPDNAQEYSHGQQQKTQEGELKISAVFSVSGSPLAPQLTTGFQPSLASSGMNKMLPSVPATAVRVSCSGCKKILQKGQTAYQRKGSTQLFCSTLCLTGYTVPPARPPPPLTKKTCSSCSKDILNPKDVISAQFENTTTSKDFCSQSCLSTYELKKKPIVTINTNSISTKCSMCQKNAVIRHEVNYQNVVHKLCSDACFSKFRSANNLTMNCCENCGGYCYSGSGQCHMLQIEGQSKKFCSSSCITAYKQKSAKITPCALCKSLRSSAEMIENTNSLGKTELFCSVNCLSAYRVKMVTSAGVQVQCNSCKTSAIPQYHLAMSDGSIRNFCSYSCVVAFQNLFNKPTGMNSSVVPLSQGQVIVSIPTGSTVSAGGGSTSAVSPTSISSSAAAGLQRLAAQSQHVGFARSVVKLKCQHCNRLFATKPELLDYKGKMFQFCGKNCSDEYKKINNVMAMCEYCKIEKIVKETVRFSGADKSFCSEGCKLLYKHDLAKRWGNHCKMCSYCLQTSPKLVQNNLGGKVEEFCCEECMSKYTVLFYQMAKCDACKRQGKLSESLKWRGEMKHFCNLLCILMFCNQQSVCDPPSQNNAANISMVQAASAGPPSLRKDSTPVIANVVSLASAPAAQPTVNSNSVLQGAVPTVTAKIIGDASTQTDALKLPPSQPPRLLKNKALLCKPITQTKATSCKPHTQNKECQTEDTPSQPQIIVVPVPVPVFVPIPLHLYTQYAPVPFGIPVPMPVPMLIPSSMDSEDKVTESIEDIKEKLPTHPFEADLLEMAEMIAEDEEKKTLSQGESQTSEHELFLDTKIFEKDQGSTYSGDLESEAVSTPHSWEEELNHYALKSNAVQEADSELKQFSKGETEQDLEADFPSDSFDPLNKGQGIQARSRTRRRHRDGFPQPRRRGRKKSIVAVEPRSLIQGAFQGCSVSGMTLKYMYGVNAWKNWVQWKNAKEEQGDLKCGGVEQASSSPRSDPLGSTQDHALSQESSEPGCRVRSIKLKEDILSCTFAELSLGLCQFIQEVRRPNGEKYDPDSILYLCLGIQQYLFENGRIDNIFTEPYSRFMIELTKLLKIWEPTILPNGYMFSRIEEEHLWECKQLGAYSPIVLLNTLLFFNTKYFQLKNVTEHLKLSFAHVMRRTRTLKYSTKMTYLRFFPPLQKQESEPDKLTVGKRKRNEDDEVPVGVEMAENTDNPLRCPVRLYEFYLSKCSESVKQRNDVFYLQPERSCVPNSPMWYSTFPIDPGTLDTMLTRILMVREVHEELAKAKSEDSDVELSD

SEQ ID NO: 796 - protein, 422 aa, Homo sapiens
MFQTAWRQEPVTFEDVAVYFTQNEWASLDSVQRALYREVMLENYANVASLAFPFTTPVLVSQLEQGELPWGLDPWEPMGREALRGICPGDEARTEKEGLTPKDHVSKETESFRLMVGGLPGNVSQHLDFGSSLEQPQGHWIIKTKSKRRHFTDTSARHHEAYEVKNGEKFEKLGKNISVSTQLTTNQTNPSGQISYECGQCGRYFIQMADFHRHEKCHTGEKSFECKECGKYFRYNSLLIRHQIIHTGKKPFKCKECGKGLSSDTALIQHQRIHTGEKPYECKECGKAFSSSSVFLQHQRFHTGEKLYECNECWKTFSCSSSFTVHQRMHTGEKPYECKECGKRLSSNTALTQHQRIHTGEKPFECKECGKAFNQKITLIQHQRVHTGEKPYECKVCGKTFSWCGRFILHQKLHTQKTPVQA

SEQ ID NO: 797 - protein, 308 aa, Homo sapiens
MVGGLPGNVSQHLDFGSSLEQPQGHWIIKTKSKRRHFTDTSARHHEAYEVKNGEKFEKLGKNISVSTQLTTNQTNPSGQISYECGQCGRYFIQMADFHRHEKCHTGEKSFECKECGKYFRYNSLLIRHQIIHTGKKPFKCKECGKGLSSDTALIQHQRIHTGEKPYECKECGKAFSSSSVFLQHQRFHTGEKLYECNECWKTFSCSSSFTVHQRMHTGEKPYECKECGKRLSSNTALTQHQRIHTGEKPFECKECGKAFNQKITLIQHQRVHTGEKPYECKVCGKTFSWCGRFILHQKLHTQKTPVQA

SEQ ID NO: 798 - protein, 1512 aa, Homo sapiens
MSVNISTAGKGVDPNTVDTYDSGDDWEIGVGNLIIDLDADLEKDRQKFEMNNSTTTTSSSNSKDCGGPASSGAGATAALADGLKFASVQASAPQGNSHKETSKSKVKRSKTSKDANKSLPSAALYGIPEISSTGKRQEVQGRPGEATGMNSALGQSVSSGGSGNPNSNSTSTSTSAATAGAGSCGKSKEEKPGKSQSSRGAKRDKDAGKSRKDKHDLLQGHQNGSGSQAPSGGHLYGFGAKSNGGGASPFHCGGTGSGSVAAAGEVSKSAPDSGLMGNSMLVKKEEEEEESHRRIKKLKTEKVDPLFTVPAPPPPISSSLTPQILPSYFSPSSSNIAAPVEQLLVRTRSVGVNTCEVGVVTEPECLGPCEPGTSVNLEGIVWHETEEGVLVVNVTWRNKTYVGTLLDCTKHDWAPPRFCESPTSDLEMRGGRGRGKRARSAAAAPGSEASFTESRGLQNKNRGGANGKGRRGSLNASGRRTPPNCAAEDIKASPSSTNKRKNKPPMELDLNSSSEDNKPGKRVRTNSRSTPTTPQGKPETTFLDQGCSSPVLIDCPHPNCNKKYKHINGLRYHQAHAHLDPENKLEFEPDSEDKISDCEEGLSNVALECSEPSTSVSAYDQLKAPASPGAGNPPGTPKGKRELMSNGPGSIIGAKAGKNSGKKKGLNNELNNLPVISNMTAALDSCSAADGSLAAEMPKLEAEGLIDKKNLGDKEKGKKATNCKTDKNLSKLKSARPIAPAPAPTPPQLIAIPTATFTTTTTGTIPGLPSLTTTVVQATPKSPPLKPIQPKPTIMGEPITVNPALVSLKDKKKKEKRKLKDKEGKETGSPKMDAKLGKLEDSKGASKDLPGHFLKDHLNKNEGLANGLSESQESRMASIKAEADKVYTFTDNAPSPSIGSASRLECSTLVNGQAPMAPLHVLTQNGAESSAAKTSSPAYSDISDAADDGGSDSRSEGMRSKASSPSDIISSKDSVVKGHSSTTAQSSQLKESHSPYYHSYDPYYSPSYMHPGQVGAPAAGNSGSTQGMKIKKESEEDAEKKDKAEQLDSKKVDHNSASLQPQHQSVITQRHPALAQSLYYGQYAYGLYMDQKSLMATSPAYRQQYEKYYEDQRLAEQKMAQTGRGDCERKSELPLKELGKEETKQKNMPSATISKAPSTPEPNKNHSKLGPSVPNKTEETGKSQLLSNHQQQLQADSFKAKQMENHQLIKEAVEMKSVMDSMKQTGVDPTSRFKQDPDSRTWHHYVYQPKYLDQQKSEELDREKKLKEDSPRKTPNKESGVPSLPVSLTSIKEEPKEAKHPDSQSMEESKLKNDDRKTPVNWKDSRGTRVAVSSPMSQHQSYIQYLHAYPYPQMYDPSHPAYRAVSPVLMHSYPGAYLSPGFHYPVYGKMSGREETEKVNTSPSVNTKTTTESKALDLLQQHANQYRSKSPAPVEKATAEREREAERERDRHSPFGQRHLHTHHHTHVGMGYPLIPGQYDPFQGLTSAALVASQQVAAQASASGMFPGQRRE

SEQ ID NO: 799 - protein, 1085 aa, Homo sapiens
MRGGRGRGKRARSAAAAPGSEASFTESRGLQNKNRGGANGKGRRGSLNASGRRTPPNCAAEDIKASPSSTNKRKNKPPMELDLNSSSEDNKPGKRVRTNSRSTPTTPQGKPETTFLDQGCSSPVLIDCPHPNCNKKYKHINGLRYHQAHAHLDPENKLEFEPDSEDKISDCEEGLSNVALECSEPSTSVSAYDQLKAPASPGAGNPPGTPKGKRELMSNGPGSIIGAKAGKNSGKKKGLNNELNNLPVISNMTAALDSCSAADGSLAAEMPKLEAEGLIDKKNLGDKEKGKKATNCKTDKNLSKLKSARPIAPAPAPTPPQLIAIPTATFTTTTTGTIPGLPSLTTTVVQATPKSPPLKPIQPKPTIMGEPITVNPALVSLKDKKKKEKRKLKDKEGKETGSPKMDAKLGKLEDSKGASKDLPGHFLKDHLNKNEGLANGLSESQESRMASIKAEADKVYTFTDNAPSPSIGSASRLECSTLVNGQAPMAPLHVLTQNGAESSAAKTSSPAYSDISDAADDGGSDSRSEGMRSKASSPSDIISSKDSVVKGHSSTTAQSSQLKESHSPYYHSYDPYYSPSYMHPGQVGAPAAGNSGSTQGMKIKKESEEDAEKKDKAEQLDSKKVDHNSASLQPQHQSVITQRHPALAQSLYYGQYAYGLYMDQKSLMATSPAYRQQYEKYYEDQRLAEQKMAQTGRGDCERKSELPLKELGKEETKQKNMPSATISKAPSTPEPNKNHSKLGPSVPNKTEETGKSQLLSNHQQQLQADSFKAKQMENHQLIKEAVEMKSVMDSMKQTGVDPTSRFKQDPDSRTWHHYVYQPKYLDQQKSEELDREKKLKEDSPRKTPNKESGVPSLPVSLTSIKEEPKEAKHPDSQSMEESKLKNDDRKTPVNWKDSRGTRVAVSSPMSQHQSYIQYLHAYPYPQMYDPSHPAYRAVSPVLMHSYPGAYLSPGFHYPVYGKMSGREETEKVNTSPSVNTKTTTESKALDLLQQHANQYRSKSPAPVEKATAEREREAERERDRHSPFGQRHLHTHHHTHVGMGYPLIPGQYDPFQGLTSAALVASQQVAAQASASGMFPGQRRE

SEQ ID NO: 800 - protein, 588 aa, Homo sapiens
MAAPALALVSFEDVVVTFTGEEWGHLDLAQRTLYQEVMLETCRLLVSLGHPVPKPELIYLLEHGQELWTVKRGLSQSTCAGEKAKPKITEPTASQLAFSEESSFQELLAQRSSRDSRLGQARDEEKLIKIQEGNLRPGTNPHKEICPEKLSYKHDDLEPDDSLGLRVLQERVTPQDALHECDSQGPGKDPMTDARNNPYTCTECGKGFSKKWALVRHQQIHAGVKPYECNECGKACRYMADVIRHMRLHTGEKPYKCIECGKAFKRRFHLTEHQRIHTGDKPYECKECGKAFTHRSSFIQHNMTHTREKPFLCKECGKAFYYSSSFAQHMRIHTGKKLYECGECGKAFTHRSTFIQHNVTHTGEKPFLCKECGKTFCLNSSFTQHMRIHTGEKPYECGECGKAFTHRSTFIRHKRTHTGEKPFECKECGKAFCDSSSLIQHMRIHTGEKPYECSECGKAFTHHSVFIRHNRTHSGQKPLECKECAKAFYYSSSFTRHMRIHTGEKPYVCRECGKAFTQPANFVRHNRIHTGEKPFECKECEKAFCDNFALTQHMRTHTGEKPFECNECGKTFSHSSSFTHHRKIHTRV

SEQ ID NO: 801 - protein, 95 aa, Homo sapiens
MAAPALALVSFEDVVVTFTGEEWGHLDLAQRTLYQEVMLETCRLLVSLGHPVPKPELIYLLEHGQELWTVKRGLSQSTCAASFSLLWKSYHPGHG

SEQ ID NO: 802 - protein, 516 aa, Homo sapiens
MHGRKDDAQKQPVKNQLGLNPQSHLPELQLFQAEGKIYKYDHMEKSVNSSSLVSPPQRISSTVKTHISHTYECNFVDSLFTQKEKANIGTEHYKCSERGKAFHQGLHFTIHQIIHTKETQFKCDICGKIFNKKSNLASHQRIHTGEKPYKCNECGKVFHNMSHLAQHRRIHTGEKPYKCNECGKVFNQISHLAQHQRIHTGEKPYKCNECGKVFHQISHLAQHRTIHTGEKPYECNKCGKVFSRNSYLVQHLIIHTGEKPYRCNVCGKVFHHISHLAQHQRIHTGEKPYKCNECGKVFSHKSSLVNHWRIHTGEKPYKCNECGKVFSHKSSLVNHWRIHTGEKPYKCNECGKVFSRNSYLAQHLIIHAGEKPYKCDECDKAFSQNSHLVQHHRIHTGEKPYKCDECGKVFSQNSYLAYHWRIHTGEKAYKCNECGKVFGLNSSLAHHRKIHTGEKPFKCNECGKAFSMRSSLTNHHAIHTGEKHFKCNECGKLFRDNSYLVRHQRFHAGKKSNTCN

SEQ ID NO: 803 - protein, 488 aa, Homo sapiens
MHGRKDDAQKQPVKNQLGLNPQSHLPELQLFQAEGKIYKYDHMEKSVNSSSLVSPPQRISSTVKTHISHTYECNFVDSLFTQKEKANIGTEHYKCSERGKAFHQGLHFTIHQIIHTKETQFKCDICGKIFNKKSNLASHQRIHTGEKPYKCNECGKVFHNMSHLAQHRRIHTGEKPYKCNECGKVFNQISHLAQHQRIHTGEKPYKCNECGKVFHQISHLAQHRTIHTGEKPYECNKCGKVFSRNSYLVQHLIIHTGEKPYRCNVCGKVFSHKSSLVNHWRIHTGEKPYKCNECGKVFSHKSSLVNHWRIHTGEKPYKCNECGKVFSRNSYLAQHLIIHAGEKPYKCDECDKAFSQNSHLVQHHRIHTGEKPYKCDECGKVFSQNSYLAYHWRIHTGEKAYKCNECGKVFGLNSSLAHHRKIHTGEKPFKCNECGKAFSMRSSLTNHHAIHTGEKHFKCNECGKLFRDNSYLVRHQRFHAGKKSNTCN

SEQ ID NO: 804 - protein, 227 aa, Homo sapiens
MGGKQSTAARSRGPFPGVSTDDSAVPPPGGAPHFGHYRTGGGAMGLRSRSVSSVAGMGMDPSTAGGVPFGLYTPASRGTGDSERAPGGGGSASDSTYAHGNGYQETGGGHHRDGMLYLGSRASLADALPLHIAPRWFSSHSGFKCPICSKSVASDEMEMHFIMCLSKPRLSYNDDVLTKDAGECVICLEELLQGDTIARLPCLCIYHKSCIDSWFEVNRSCPEHPAD

SEQ ID NO: 805 - protein, 278 aa, Homo sapiens
MGGKQSTAARSRGPFPGVSTDDSAVPPPGGAPHFGHYRTGGGAMGLRSRSVSSVAGMGMDPSTAGGVPFGLYTPASRGTGDSERAPGGGGSASDSTYAHGNGYQETGGGHHRDGMLYLGSRASLADALPLHIAPRWFSSHSGFKCPICSKSVASDEMEMHFIMCLSKPRLSYNGRIQRSLRGAQPEKTWLSGRTLQEQPWRTECSWAPMAQMQSYPHCPVENREDDVLTKDAGECVICLEELLQGDTIARLPCLCIYHKSCIDSWFEVNRSCPEHPAD

SEQ ID NO: 806 - protein, 311 aa, Homo sapiens
MEMENCTRVKEFIFLGLTQNREVSLVLFLFLLLVYVTTLLGNLLIMVTVTCESRLHTPMYFLLHNLSIADICFSSITVPKVLVDLLSERKTISFNHCFTQMFLFHLIGGVDVFSLSVMALDRYVAISKPLHYATIMSRDHCIGLTVAAWLGGFVHSIVQISLLLPLPFCGPNVLDTFYCDVHRVLKLAHTDIFILELLMISNNGLLTTLWFFLLLVSYIVILSLPKSQAGEGRRKAISTCTSHITVVTLHFVPCIYVYARPFTALPMDKAISVTFTVISPLLNPLIYTLRNHEMKSAMRRLKRRLVPSDRK

SEQ ID NO: 807 - protein, 226 aa, Homo sapiens
MEGCVSNLMVCNLAYSGKLEELKESILADKSLATRTDQDSRTALHWACSAGHTEIVEFLLQLGVPVNDKDDAGWSPLHIAASAGRDEIVKALLGKGAQVNAVNQNGCTPLHYAASKNRHEIAVMLLEGGANPDAKDHYEATAMHRAAAKGNLKMIHILLYYKASTNIQDTEGNTPLHLACDEERVEEAKLLVSQGASIYIENKEEKTPLQVAKGGLGLILKRMVEG

SEQ ID NO: 808 - protein, 151 aa, Homo sapiens
MEGCVSNLMVCNLAYSGKLEELKESILADKSLATRTDQDSRTALHWACSAGHTEIVEFLLQLGVPVNDKDDAGWSPLHIAASAGRDEIVKALLGKGAQVNAVNQNGCTPLHYAASKNRHEIAVMLLEGGANPDAKDHYEATAMHRAAAKDT

SEQ ID NO: 809 - protein, 426 aa, Homo sapiens
MAGLGFWGHPAGPLLLLLLLVLPPRALPEGPLVFVALVFRHGDRAPLASYPMDPHKEVASTLWPRGLGQLTTEGVRQQLELGRFLRSRYEAFLSPEYRREEVYIRSTDFDRTLESAQANLAGLFPEAAPGSPEARWRPIPVHTVPVAEDKLLRFPMRSCPRYHELLREATEAAEYQEALEGWTGFLSRLENFTGLSLVGEPLRRAWKVLDTLMCQQAHGLPLPAWASPDVLRTLAQISALDIGAHVGPPRAAEKAQLTGGILLNAILANFSRVQRLGLPLKMVMYSAHDSTLLALQGALGLYDGHTPPYAACLGFEFRKHLGNPAKDGGNVTVSLFYRNDSAHLPLPLSLPGCPAPCPLGRFYQLTAPARPPAHGVSCHGPYEAAIPPAPVVPLLAGAVAVLVALSLGLGLLAWRPGCLRALGGPV

SEQ ID NO: 810 - protein, 333 aa, Homo sapiens
MAGLGFWGHPAGPLLLLLLLVLPPRALPEGPLVFVALVFRHGDRAPLASYPMDPHKEVASTLWPRGLGQLTTEGVRQQLELGRFLRSRYEGFLSRLENFTGLSLVGEPLRRAWKVLDTLMCQQAHGLPLPAWASPDVLRTLAQISALDIGAHVGPPRAAEKAQLTGGILLNAILANFSRVQRLGLPLKMVMYSAHDSTLLALQGALGLYDGHTPPYAACLGFEFRKHLGNPAKDGGNVTVSLFYRNDSAHLPLPLSLPGCPAPCPLGRFYQLTAPARPPAHGVSCHGPYEAAIPPAPVVPLLAGAVAVLVALSLGLGLLAWRPGCLRALGGPV

SEQ ID NO: 811 - protein, 92 aa, Homo sapiens
MAGLGFWGHPAGPLLLLLLLVLPPRALPEGPLVFVALVRRPHPGLPLAPPGLALTSPVPRYSAMATGPRWPPTPWTHTRRWPPPCGHEAWAS

SEQ ID NO: 812 - protein, 1024 aa, Homo sapiens
MAQGAMRFCSEGDCAISPPRCPRRWLPEGPVPQSPPASMYGSTGSLLRRVAGPGPRGRELGRVTAPCTPLRGPPSPRVAPSPWAPSSPTGQPPPGAQSSVVIFRFVEKASVRPLNGLPAPGGLSRSWDLGGVSPPRPTPALGPGSNRKLRLEASTSDPLPARGGSALPGSRNLVHGPPAPPQVGADGLYSSLPNGLGGPPERLATLFGGPADTGFLNQGDTWSSPREVSSHAQRIARAKWEFFYGSLDPPSSGAKPPEQAPPSPPGVGSRQGSGVAVGRAAKYSETDLDTVPLRCYRETDIDEVLAEREEADSAIESQPSSEGPPGTAYPPAPRPGPLPGPHPSLGSGNEDEDDDEAGGEEDVDDEVFEASEGARPGSRMPLKSPVPFLPGTSPSADGPDSFSCVFEAILESHRAKGTSYTSLASLEALASPGPTQSPFFTFELPPQPPAPRPDPPAPAPLAPLEPDSGTSSAADGPWTQRGEEEEAEARAKLAPGREPPSPCHSEDSLGLGAAPLGSEPPLSQLVSDSDSELDSTERLALGSTDTLSNGQKADLEAAQRLAKRLYRLDGFRKADVARHLGKNNDFSKLVAGEYLKFFVFTGMTLDQALRVFLKELALMGETQERERVLAHFSQRYFQCNPEALSSEDGAHTLTCALMLLNTDLHGHNIGKRMTCGDFIGNLEGLNDGGDFPRELLKALYSSIKNEKLQWAIDEEELRRSLSELADPNPKVIKRISGGSGSGSSPFLDLTPEPGAAVYKHGALVRKVHADPDCRKTPRGKRGWKSFHGILKGMILYLQKEEYKPGKALSETELKNAISIHHALATRASDYSKRPHVFYLRTADWRVFLFQAPSLEQMQSWITRINVVAAMFSAPPFPAAVSSQKKFSRPLLPSAATRLSQEEQVRTHEAKLKAMASELREHRAAQLGKKGRGKEAEEQRQKEAYLEFEKSRYSTYAALLRVKLKAGSEELDAVEAALAQAGSTEDGLPPSHSSPSLQPKPSSQPRAQRHSSEPRPGAGSGRRKP

SEQ ID NO: 813 - protein, 645 aa, Homo sapiens
MPLKSPVPFLPGTSPSADGPDSFSCVFEAILESHRAKGTSYTSLASLEALASPGPTQSPFFTFELPPQPPAPRPDPPAPAPLAPLEPDSGTSSAADGPWTQRGEEEEAEARAKLAPGREPPSPCHSEDSLGLGAAPLGSEPPLSQLVSDSDSELDSTERLALGSTDTLSNGQKADLEAAQRLAKRLYRLDGFRKADVARHLGKNNDFSKLVAGEYLKFFVFTGMTLDQALRVFLKELALMGETQERERVLAHFSQRYFQCNPEALSSEDGAHTLTCALMLLNTDLHGHNIGKRMTCGDFIGNLEGLNDGGDFPRELLKALYSSIKNEKLQWAIDEEELRRSLSELADPNPKVIKRISGGSGSGSSPFLDLTPEPGAAVYKHGALVRKVHADPDCRKTPRGKRGWKSFHGILKGMILYLQKEEYKPGKALSETELKNAISIHHALATRASDYSKRPHVFYLRTADWRVFLFQAPSLEQMQSWITRINVVAAMFSAPPFPAAVSSQKKFSRPLLPSAATRLSQEEQVRTHEAKLKAMASELREHRAAQLGKKGRGKEAEEQRQKEAYLEFEKSRYSTYAALLRVKLKAGSEELDAVEAALAQAGSTEDGLPPSHSSPSLQPKPSSQPRAQRHSSEPRPGAGSGRRKP

SEQ ID NO: 814 - protein, 592 aa, Homo sapiens
MAPGQLALFSVSDKTGLVEFARNLTALGLNLVASGGTAKALRDAGLAVRDVSELTGFPEMLGGRVKTLHPAVHAGILARNIPEDNADMARLDFNLIRVVACNLYPFVKTVASPGVTVEEAVEQIDIGGVTLLRAAAKNHARVTVVCEPEDYVVVSTEMQSSESKDTSLETRRQLALKAFTHTAQYDEAISDYFRKQYSKGVSQMPLRYGMNPHQTPAQLYTLQPKLPITVLNGAPGFINLCDALNAWQLVKELKEALGIPAAASFKHVSPAGAAVGIPLSEDEAKVCMVYDLYKTLTPISAAYARARGADRMSSFGDFVALSDVCDVPTAKIISREVSDGIIAPGYEEEALTILSKKKNGNYCVLQMDQSYKPDENEVRTLFGLHLSQKRNNGVVDKSLFSNVVTKNKDLPESALRDLIVATIAVKYTQSNSVCYAKNGQVIGIGAGQQSRIHCTRLAGDKANYWWLRHHPQVLSMKFKTGVKRAEISNAIDQYVTGTIGEDEDLIKWKALFEEVPELLTEAEKKEWVEKLTEVSISSDAFFPFRDNVDRAKRSGVAYIAAPSGSAADKVVIEACDELGIILAHTNLRLFHH

SEQ ID NO: 815 - protein, 591 aa, Homo sapiens
MSSLSALFSVSDKTGLVEFARNLTALGLNLVASGGTAKALRDAGLAVRDVSELTGFPEMLGGRVKTLHPAVHAGILARNIPEDNADMARLDFNLIRVVACNLYPFVKTVASPGVTVEEAVEQIDIGGVTLLRAAAKNHARVTVVCEPEDYVVVSTEMQSSESKDTSLETRRQLALKAFTHTAQYDEAISDYFRKQYSKGVSQMPLRYGMNPHQTPAQLYTLQPKLPITVLNGAPGFINLCDALNAWQLVKELKEALGIPAAASFKHVSPAGAAVGIPLSEDEAKVCMVYDLYKTLTPISAAYARARGADRMSSFGDFVALSDVCDVPTAKIISREVSDGIIAPGYEEEALTILSKKKNGNYCVLQMDQSYKPDENEVRTLFGLHLSQKRNNGVVDKSLFSNVVTKNKDLPESALRDLIVATIAVKYTQSNSVCYAKNGQVIGIGAGQQSRIHCTRLAGDKANYWWLRHHPQVLSMKFKTGVKRAEISNAIDQYVTGTIGEDEDLIKWKALFEEVPELLTEAEKKEWVEKLTEVSISSDAFFPFRDNVDRAKRSGVAYIAAPSGSAADKVVIEACDELGIILAHTNLRLFHH

SEQ ID NO: 816 - protein, 552 aa, Homo sapiens
MDGVVTDLITVGLKRGSDELLSSGIINGPFTMNSSTPSTANGNDSKKFKRDRPPCSPSRVLHLRKIPCDVTEAEIISLGLPFGKVTNLLMLKGKSQAFLEMASEEAAVTMVNYYTPITPHLRSQPVYIQYSNHRELKTDNLPNQARAQAALQAVSAVQSGSLALSGGPSNEGTVLPGQSPVLRIIIENLFYPVTLEVLHQIFSKFGTVLKIITFTKNNQFQALLQYADPVNAHYAKMALDGQNIYNACCTLRIDFSKLTSLNVKYNNDKSRDFTRLDLPTGDGQPSLEPPMAAAFGAPGIISSPYAGAAGFAPAIGFPQATGLSVPAVPGALGPLTITSSAVTGRMAIPGASGIPGNSVLLVTNLNPDLITPHGLFILFGVYGDVHRVKIMFNKKENALVQMADANQAQLAMNHLSGQRLYGKVLRATLSKHQAVQLPREGQEDQGLTKDFSNSPLHRFKKPGSKNFQNIFPPSATLHLSNIPPSVTVDDLKNLFIEAGCSVKAFKFFQKDRKMALIQLGSVEEAIQALIELHNHDLGENHHLRVSFSKSTI

SEQ ID NO: 817 - protein, 521 aa, Homo sapiens
MNSSTPSTANGNDSKKFKRDRPPCSPSRVLHLRKIPCDVTEAEIISLGLPFGKVTNLLMLKGKSQAFLEMASEEAAVTMVNYYTPITPHLRSQPVYIQYSNHRELKTDNLPNQARAQAALQAVSAVQSGSLALSGGPSNEGTVLPGQSPVLRIIIENLFYPVTLEVLHQIFSKFGTVLKIITFTKNNQFQALLQYADPVNAHYAKMALDGQNIYNACCTLRIDFSKLTSLNVKYNNDKSRDFTRLDLPTGDGQPSLEPPMAAAFGAPGIISSPYAGAAGFAPAIGFPQATGLSVPAVPGALGPLTITSSAVTGRMAIPGASGIPGNSVLLVTNLNPDLITPHGLFILFGVYGDVHRVKIMFNKKENALVQMADANQAQLAMNHLSGQRLYGKVLRATLSKHQAVQLPREGQEDQGLTKDFSNSPLHRFKKPGSKNFQNIFPPSATLHLSNIPPSVTVDDLKNLFIEAGCSVKAFKFFQKDRKMALIQLGSVEEAIQALIELHNHDLGENHHLRVSFSKSTI

SEQ ID NO: 818 - protein, 547 aa, Homo sapiens
MNSSTPSTGVYANGNDSKKFKRDRPPCSPSRVLHLRKIPCDVTEAEIISLGLPFGKVTNLLMLKGKSQAFLEMASEEAAVTMVNYYTPITPHLRSQPVYIQYSNHRELKTDNLPNQARAQAALQAVSAVQSGSLALSGGPSNEGTVLPGQSPVLRIIIENLFYPVTLEVLHQIFSKFGTVLKIITFTKNNQFQALLQYADPVNAHYAKMALDGQNIYNACCTLRIDFSKLTSLNVKYNNDKSRDFTRLDLPTGDGQPSLEPPMAAAFGAPGIISSPYAGAAGFAPAIGFPQATGLSVPAVPGALGPLTITSSAVTGRMAIPGASGIPGNSVLLVTNLNPDLITPHGLFILFGVYGDVHRVKIMFNKKENALVQMADANQAQLAMNHLSGQRLYGKVLRATLSKHQAVQLPREGQEDQGLTKDFSNSPLHRFKKPGSKNFQNIFPPSATLHLSNIPPSVTVDDLKNLFIEAGCSVKAFKFFQGLANSWAQVILLLPPPHSAGITGMSHHAWLSVLFSVSVPSVSSAYMFSILSCSFSSVPTRYFWTKN

SEQ ID NO: 819 - protein, 558 aa, Homo sapiens
MDASPSPFSLPKKLNELSARRGSDELLSSGIINGPFTMNSSTPSTANGNDSKKFKRDRPPCSPSRVLHLRKIPCDVTEAEIISLGLPFGKVTNLLMLKGKSQAFLEMASEEAAVTMVNYYTPITPHLRSQPVYIQYSNHRELKTDNLPNQARAQAALQAVSAVQSGSLALSGGPSNEGTVLPGQSPVLRIIIENLFYPVTLEVLHQIFSKFGTVLKIITFTKNNQFQALLQYADPVNAHYAKMALDGQNIYNACCTLRIDFSKLTSLNVKYNNDKSRDFTRLDLPTGDGQPSLEPPMAAAFGAPGIISSPYAGAAGFAPAIGFPQATGLSVPAVPGALGPLTITSSAVTGRMAIPGASGIPGNSVLLVTNLNPDLITPHGLFILFGVYGDVHRVKIMFNKKENALVQMADANQAQLAMNHLSGQRLYGKVLRATLSKHQAVQLPREGQEDQGLTKDFSNSPLHRFKKPGSKNFQNIFPPSATLHLSNIPPSVTVDDLKNLFIEAGCSVKAFKFFQKDRKMALIQLGSVEEAIQALIELHNHDLGENHHLRVSFSKSTI

SEQ ID NO: 820 - protein, 555 aa, Homo sapiens
MDGVVTDLITVGLKRGSDELLSSGIINGPFTMNSSTPSTGVYANGNDSKKFKRDRPPCSPSRVLHLRKIPCDVTEAEIISLGLPFGKVTNLLMLKGKSQAFLEMASEEAAVTMVNYYTPITPHLRSQPVYIQYSNHRELKTDNLPNQARAQAALQAVSAVQSGSLALSGGPSNEGTVLPGQSPVLRIIIENLFYPVTLEVLHQIFSKFGTVLKIITFTKNNQFQALLQYADPVNAHYAKMALDGQNIYNACCTLRIDFSKLTSLNVKYNNDKSRDFTRLDLPTGDGQPSLEPPMAAAFGAPGIISSPYAGAAGFAPAIGFPQATGLSVPAVPGALGPLTITSSAVTGRMAIPGASGIPGNSVLLVTNLNPDLITPHGLFILFGVYGDVHRVKIMFNKKENALVQMADANQAQLAMNHLSGQRLYGKVLRATLSKHQAVQLPREGQEDQGLTKDFSNSPLHRFKKPGSKNFQNIFPPSATLHLSNIPPSVTVDDLKNLFIEAGCSVKAFKFFQKDRKMALIQLGSVEEAIQALIELHNHDLGENHHLRVSFSKSTI

SEQ ID NO: 821 - protein, 524 aa, Homo sapiens
MNSSTPSTGVYANGNDSKKFKRDRPPCSPSRVLHLRKIPCDVTEAEIISLGLPFGKVTNLLMLKGKSQAFLEMASEEAAVTMVNYYTPITPHLRSQPVYIQYSNHRELKTDNLPNQARAQAALQAVSAVQSGSLALSGGPSNEGTVLPGQSPVLRIIIENLFYPVTLEVLHQIFSKFGTVLKIITFTKNNQFQALLQYADPVNAHYAKMALDGQNIYNACCTLRIDFSKLTSLNVKYNNDKSRDFTRLDLPTGDGQPSLEPPMAAAFGAPGIISSPYAGAAGFAPAIGFPQATGLSVPAVPGALGPLTITSSAVTGRMAIPGASGIPGNSVLLVTNLNPDLITPHGLFILFGVYGDVHRVKIMFNKKENALVQMADANQAQLAMNHLSGQRLYGKVLRATLSKHQAVQLPREGQEDQGLTKDFSNSPLHRFKKPGSKNFQNIFPPSATLHLSNIPPSVTVDDLKNLFIEAGCSVKAFKFFQKDRKMALIQLGSVEEAIQALIELHNHDLGENHHLRVSFSKSTI

SEQ ID NO: 822 - protein, 457 aa, Homo sapiens
MAFLEMASEEAAVTMVNYYTPITPHLRSQPVYIQYSNHRELKTDNLPNQARAQAALQAVSAVQSGSLALSGGPSNEGTVLPGQSPVLRIIIENLFYPVTLEVLHQIFSKFGTVLKIITFTKNNQFQALLQYADPVNAHYAKMALDGQNIYNACCTLRIDFSKLTSLNVKYNNDKSRDFTRLDLPTGDGQPSLEPPMAAAFGAPGIISSPYAGAAGFAPAIGFPQATGLSVPAVPGALGPLTITSSAVTGRMAIPGASGIPGNSVLLVTNLNPDLITPHGLFILFGVYGDVHRVKIMFNKKENALVQMADANQAQLAMNHLSGQRLYGKVLRATLSKHQAVQLPREGQEDQGLTKDFSNSPLHRFKKPGSKNFQNIFPPSATLHLSNIPPSVTVDDLKNLFIEAGCSVKAFKFFQKDRKMALIQLGSVEEAIQALIELHNHDLGENHHLRVSFSKSTI

SEQ ID NO: 823 - protein, 198 aa, Homo sapiens
MSTVDLARVGACILKHAVTGEAVELRSLWREHACVVAGLRRFGCVVCRWIAQDLSSLAGLLDQHGVRLVGVGPEALGLQEFLDGDYFAGELYLDESKQLYKELGFKRYNSLSILPAALGKPVRDVAAKAKAVGIQGNLSGDLLQSGGLLVVSKGGDKVLLHFVQKSPGDYVPKEHILQVLGISAEVCASDPPQCDREV

SEQ ID NO: 824 - protein, 183 aa, Homo sapiens
MSTVDLARVGACILKHAVTGEAVELRSLWREHACVVAGLRRFGCVVCRWIAQDLSSLAGLLDQHGVRLVGVGPEALGLQEFLDGDYFAGELYLDESKQLYKELGFKRYNSLSILPAALGKPVRDVAAKAKAVGIQGNLSGDLLQSGGLLVVSKEVPRRLRPQGAHPAGPGHLCGGLCQRPASV

SEQ ID NO: 825 - protein, 216 aa, Homo sapiens
MSTVDLARVGACILKHAVTGEAVELRSLWREHACVVAGLRRFGCVVCRWIAQDLSSLAGLLDQHGVRLVGVGPEALGLQEFLDGDYFAGELYLDESKQLYKELGFKRLWTQASPEFGQATWCLRRYNSLSILPAALGKPVRDVAAKAKAVGIQGNLSGDLLQSGGLLVVSKGGDKVLLHFVQKSPGDYVPKEHILQVLGISAEVCASDPPQCDREV

SEQ ID NO: 826 - protein, 162 aa, Homo sapiens
MSTVDLARVGACILKHAVTGEAVELRSLWREHACVVAGLRRFGCVVCRWIAQDLSSLAGLLDQHGVRLVGVGPEALGLQEFLDGDYFAGELYLDESKQLYKELGFKRYNSLSILPAALGKPVRDVAAKKSPGDYVPKEHILQVLGISAEVCASDPPQCDREV

SEQ ID NO: 827 - protein, 194 aa, Homo sapiens
MSTVDLARVGACILKHAVTGEAVELRSLWREHACVVAGLRRFGCVVCRWIAQDLSSLAGLLDQHGVRLVGVGPEALGLQEFLDGDYFAGELYLDESKQLYKELGFKRYNSLSILPAALGKPVRDVAAKAVPTPDRPRLLASRGTCLGTCCRAEGCWWSAKKSPGDYVPKEHILQVLGISAEVCASDPPQCDREV

SEQ ID NO: 828 - protein, 201 aa, Homo sapiens
MSTVDLARVGACILKHAVTGEAVELRSLWREHACVVAGLRRFGCVVCRWIAQDLSSLAGLLDQHGVRLVGVGPEALGLQEFLDGDYFAGELYLDESKQLYKELGFKRLWTQASPEFGQATWCLRRYNSLSILPAALGKPVRDVAAKAKAVGIQGNLSGDLLQSGGLLVVSKEVPRRLRPQGAHPAGPGHLCGGLCQRPASV

SEQ ID NO: 829 - protein, 33 aa, Homo sapiens
MATVLLALLVYLGALVDAYPIKPEAPGEDAFLG

SEQ ID NO: 830 - protein, 89 aa, Homo sapiens
MGTKREAILKVLENLTPEELKKFKMKLGTVPLREGFERIPRGALGQLDIVDLTDKLVASYYEDYAAELVVAVLRDMRMLEEAARLQRAA

SEQ ID NO: 831 - protein, 661 aa, Homo sapiens
MEMTEMTGVSLKRGALVVEDNDSGVPVEETKKQKLSECSLTKGQDGLQNDFLSISEDVPRPPDTVSTGKGGKNSEAQLEDEEEEEEDGLSEECEEEESESFADMMKHGLTEADVGITKFVSSHQGFSGILKERYSDFVVHEIGKDGRISHLNDLSIPVDEEDPSEDIFTVLTAEEKQRLEELQLFKNKETSVAIEVIEDTKEKRTIIHQAIKSLFPGLETKTEDREGKKYIVAYHAAGKKALANPRKHSWPKSRGSYCHFVLYKENKDTMDAINVLSKYLRVKPNIFSYMGTKDKRAITVQEIAVLKITAQRLAHLNKCLMNFKLGNFSYQKNPLKLGELQGNHFTVVLRNITGTDDQVQQAMNSLKEIGFINYYGMQRFGTTAVPTYQVGRAILQNSWTEVMDLILKPRSGAEKGYLVKCREEWAKTKDPTAALRKLPVKRCVEGQLLRGLSKYGMKNIVSAFGIIPRNNRLMYIHSYQSYVWNNMVSKRIEDYGLKPVPGDLVLKGATATYIEEDDVNNYSIHDVVMPLPGFDVIYPKHKIQEAYREMLTADNLDIDNMRHKIRDYSLSGAYRKIIIRPQNVSWEVVAYDDPKIPLFNTDVDNLEGKTPPVFASEGKYRALKMDFSLPPSTYATMAIREVLKMDTSIKNQTQLNTTWLR

SEQ ID NO: 832 - protein, 667 aa, Homo sapiens
MEMTEMTGVSLKRGALVVEDNDSGVPVEETKKQKLSECSLTKGQDGLQNDFLSISEDVPRPPDTVSTGKGGKNSEAQLEDEEEEEEDGLSEECEEEESESFADMMKHGLTEADVGITKFVSSHQGFSGILKERYSDFVVHEIGKDGRISHLNDLSIPVDEEDPSEDIFTVLTAEEKQRLEELQLFKNKETSVAIEVIEDTKEKRTIIHQAIKSLFPGLETKTEDREGKKYIVAYHAAGKKALAKVRTAADPRKHSWPKSRGSYCHFVLYKENKDTMDAINVLSKYLRVKPNIFSYMGTKDKRAITVQEIAVLKITAQRLAHLNKCLMNFKLGNFSYQKNPLKLGELQGNHFTVVLRNITGTDDQVQQAMNSLKEIGFINYYGMQRFGTTAVPTYQVGRAILQNSWTEVMDLILKPRSGAEKGYLVKCREEWAKTKDPTAALRKLPVKRCVEGQLLRGLSKYGMKNIVSAFGIIPRNNRLMYIHSYQSYVWNNMVSKRIEDYGLKPVPGDLVLKGATATYIEEDDVNNYSIHDVVMPLPGFDVIYPKHKIQEAYREMLTADNLDIDNMRHKIRDYSLSGAYRKIIIRPQNVSWEVVAYDDPKIPLFNTDVDNLEGKTPPVFASEGKYRALKMDFSLPPSTYATMAIREVLKMDTSIKNQTQLNTTWLR

SEQ ID NO: 833 - protein, 481 aa, Homo sapiens
MAYNDTDRNQTEKLLKRVRELEQEVQRLKKEQAKNKEDSNIRENSAGAGKTKRAFDFSAHGRRHVALRIAYMGWGYQGFASQENTNNTIEEKLFEALTKTRLVESRQTSNYHRCGRTDKGVSAFGQVISLDLRSQFPRGRDSEDFNVKEEANAAAEEIRYTHILNRVLPPDIRILAWAPVEPSFSARFSCLERTYRYFFPRADLDIVTMDYAAQKYVGTHDFRNLCKMDVANGVINFQRTILSAQVQLVGQSPGEGRWQEPFQLCQFEVTGQAFLYHQVRCMMAILFLIGQGMEKPEIIDELLNIEKNPQKPQYSMAVEFPLVLYDCKFENVKWIYDQEAQEFNITHLQQLWANHAVKTHMLYSMLQGLDTVPVPCGIGPKMDGMTEWGNVKPSVIKQTSAFVEGVKMRTYKPLMDRPKCQGLESRIQHFVRRGRIEHPHLFHEEETKAKRDCNDTLEEENTNLETPTKRVCVDTEIKSII

SEQ ID NO: 834 - protein, 971 aa, Homo sapiens
MATVRASLRGALLLLLAVAGVAEVAGGLAPGSAGALCCNHSKDNQMCRDVCEQIFSSKSESRLKHLLQRAPDYCPETMVEIWNCMNSSLPGVFKKSDGWVGLGCCELAIALECRQACKQASSKNDISKVCRKEYENALFSCISRNEMGSVCCSYAGHHTNCREYCQAIFRTDSSPGPSQIKAVENYCASISPQLIHCVNNYTQSYPMRNPTDSLYCCDRAEDHACQNACKRILMSKKTEMEIVDGLIEGCKTQPLPQDPLWQCFLESSQSVHPGVTVHPPPSTGLDGAKLHCCSKANTSTCRELCTKLYSMSWGNTQSWQEFDRFCEYNPVEVSMLTCLADVREPCQLGCRNLTYCTNFNNRPTELFRSCNAQSDQGAMNDMKLWEKGSIKMPFINIPVLDIKKCQPEMWKAIACSLQIKPCHSKSRGSIICKSDCVEILKKCGDQNKFPEDHTAESICELLSPTDDLKNCIPLDTYLRPSTLGNIVEEVTHPCNPNPCPANELCEVNRKGCPSGDPCLPYFCVQGCKLGEASDFIVRQGTLIQVPSSAGEVGCYKICSCGQSGLLENCMEMHCIDLQKSCIVGGKRKSHGTSFSIDCNVCSCFAGNLVCSTRLCLSEHSSEDDRRTFTGLPCNCADQFVPVCGQNGRTYPSACIARCVGLQDHQFEFGSCMSKDPCNPNPCQKNQRCIPKPQVCLTTFDKFGCSQYECVPRQLACDQVQDPVCDTDHMEHNNLCTLYQRGKSLSYKGPCQPFCRATEPVCGHNGETYSSVCAAYSDRVAVDYYGDCQAVGVLSEHSSVAECASVKCPSLLAAGCKPIIPPGACCPLCAGMLRVLFDKEKLDTIAKVTNKKPITVLEILQKIRMHVSVPQCDVFGYFSIESEIVILIIPVDHYPKALQIEACNKEAEKIESLINSDSPTLASHVPLSALIISQVQVSSSVPSAGVRARPSCHSLLLPLSLGLALHLLWTYN

SEQ ID NO: 835 - protein, 495 aa, Homo sapiens
MDSLAESRWPPGLAVMKTIDDLLRCGICFEYFNIAMIIPQCSHNYCSLCIRKFLSYKTQCPTCCVTVTEPDLKNNRILDELVKSLNFARNHLLQFALESPAKSPASSSSKNLAVKVYTPVASRQSLKQGSRLMDNFLIREMSGSTSELLIKENKSKFSPQKEASPAAKTKETRSVEEIAPDPSEAKRPEPPSTSTLKQVTKVDCPVCGVNIPESHINKHLDSCLSREEKKESLRSSVHKRKPLPKTVYNLLSDRDLKKKLKEHGLSIQGNKQQLIKRHQEFVHMYNAQCDALHPKSAAEIVREIENIEKTRMRLEASKLNESVMVFTKDQTEKEIDEIHSKYRKKHKSEFQLLVDQARKGYKKIAGMSQKTVTITKEDESTEKLSSVCMGQEDNMTSVTNHFSQSKLDSPEELEPDREEDSSSCIDIQEVLSSSESDSCNSSSSDIIRDLLEEEEAWEASHKNDLQDTEISPRQNRRTRAAESAEIEPRNKRNRN

SEQ ID NO: 836 - protein, 221 aa, Homo sapiens
MSDGDYDYLIKFLALGDSGVGKTSVLYQYTDGKFNSKFITTVGIDFREKRVVYRASGPDGATGRGQRIHLQLWDTAGQERFRSLTTAFFRDAMGFLLLFDLTNEQSFLNVRNWISQLQMHAYCENPDIVLCGNKSDLEDQRVVKEEEAIALAEKYGIPYFETSAANGTNISQAIEMLLDLIMKRMERCVDKSWIPEGVVRSNGHASTDQLSEEKEKGACGC

SEQ ID NO: 837 - protein, 213 aa, Homo sapiens
MSDGDYDYLIKFLALGDSGVGKTSVLYQYTDGKFNSKFITTVGIDFREKRVVYRASGPDGATGRGQRIHLQLWDTAGQERFRSLTTAFFRDAMGFLLLFDLTNEQSFLNVRNWISQLQMHAYCENPDIVLCGNKSDLEDQRVVKEKYGIPYFETSAANGTNISQAIEMLLDLIMKRMERCVDKSWIPEGVVRSNGHASTDQLSEEKEKGACGC

SEQ ID NO: 838 - protein, 257 aa, Homo sapiens
MSSAPNGRKKRPSRSTRSSIFQISKPPLQSGDWERRGSGSESAHKTQRALDDCKMLVQEFNTQVALYRELVISIGDVSVSCPSLRAEMHKTRTKGCEMARQAHQKLAAISGPEDGEIHPEICRLYIQLQCCLEMYTTEMLKSICLLGSLQFHRKGKEPGGGTKSLDCKIEESAETPALEDSSSSPVDSQQHSWQVSTDIENTERDMREMKNLLSKLRETMPLPLKNQDDSSLLNLTPYPLVRRRKRRFFGLCCLISS

SEQ ID NO: 839 - protein, 218 aa, Homo sapiens
MEAEGCRYQFRVALLGDAAVGKTSLLRSYVAGAPGAPEPEPEPEPTVGAECYRRALQLRAGPRVKLQLWDTAGHERFRCITRSFYRNVVGVLLVFDVTNRKSFEHIQDWHQEVMATQGPDKVIFLLVGHKSDLQSTRCVSAQEAEELAASLGMAFVETSVKNNCNVDLAFDTLADAIQQALQQGDIKLEEGWGGVRLIHKTQIPRSPSRKQHSGPCQC

SEQ ID NO: 840 - protein, 105 aa, Homo sapiens
MATQGPDKVIFLLVGHKSDLQSTRCVSAQEAEELAASLGMAFVETSVKNNCNVDLAFDTLADAIQQALQQGDIKLEEGWGGVRLIHKTQIPRSPSRKQHSGPCQC

SEQ ID NO: 841 - protein, 229 aa, Homo sapiens
MAEEMESSLEASFSSSGAVSGASGFLPPARSRIFKIIVIGDSNVGKTCLTYRFCAGRFPDRTEATIGVDFRERAVEIDGERIKIQLWDTAGQERFRKSMVQHYYRNVHAVVFVYDMTNMASFHSLPSWIEECKQHLLANDIPRILVGNKCDLRSAIQVPTDLAQKFADTHSMPLFETSAKNPNDNDHVEAIFMTLAHKLKSHKPLMLSQPPDNGIILKPEPKPAMTCWC

SEQ ID NO: 842 - protein, 1069 aa, Homo sapiens
MDDKASVGKISVSSDSVSTLNSEDFVLVSRQGDETPSTNNGSDDEKTGLKIVGNGSEQQLQKELADVLMDPPMDDQPGEKELVKRSQLDGEGDGPLSNQLSASSTINPVPLVGLQKPEMSLPVKPGQGDSEASSPFTPVADEDSVVFSKLTYLGCASVNAPRSEVEALRMMSILRSQCQISLDVTLSVPNVSEGIVRLLDPQTNTEIANYPIYKILFCVRGHDGTPESDCFAFTESHYNAELFRIHVFRCEIQEAVSRILYSFATAFRRSAKQTPLSATAAPQTPDSDIFTFSVSLEIKEDDGKGYFSAVPKDKDRQCFKLRQGIDKKIVIYVQQTTNKELAIERCFGLLLSPGKDVRNSDMHLLDLESMGKSSDGKSYVITGSWNPKSPHFQVVNEETPKDKVLFMTTAVDLVITEVQEPVRFLLETKVRVCSPNERLFWPFSKRSTTENFFLKLKQIKQRERKNNTDTLYEVVCLESESERERRKTTASPSVRLPQSGSQSSVIPSPPEDDEEEDNDEPLLSGSGDVSKECAEKILETWGELLSKWHLNLNVRPKQLSSLVRNGVPEALRGEVWQLLAGCHNNDHLVEKYRILITKESPQDSAITRDINRTFPAHDYFKDTGGDGQDSLYKICKAYSVYDEEIGYCQGQSFLAAVLLLHMPEEQAFSVLVKIMFDYGLRELFKQNFEDLHCKFYQLERLMQEYIPDLYNHFLDISLEAHMYASQWFLTLFTAKFPLYMVFHIIDLLLCEGISVIFNVALGLLKTSKDDLLLTDFEGALKFFRVQLPKRYRSEENAKKLMELACNMKISQKKLKKYEKEYHTMREQQAQQEDPIERFERENRRLQEANMRLEQENDDLAHELVTSKIALRKDLDNAEEKADALNKELLMTKQKLIDAEEEKRRLEEESAQLKEMCRRELDKAESEIKKNSSIIGDYKQICSQLSERLEKQQTANKVEIEKIRQKVDDCERCREFFNKEGRVKGISSTKEVLDEDTDEEKETLKNQLREMELELAQTKLQLVEAECKIQDLEHHLGLALNEVQAAKKTWFNRTLSSIKTATGVQGKETC

SEQ ID NO: 843 - protein, 599 aa, Homo sapiens
MDPPMDDQPGEKELVKRSQLDGEGDGPLSNQLSASSTINPVPLVGLQKPEMSLPVKPGQGDSEASSPFTPVADEDSVVFSKLTYLGCASVNAPRSEVEALRMMSILRSQCQISLDVTLSVPNVSEGIVRLLDPQTNTEIANYPIYKILFCVRGHDGTPESDCFAFTESHYNAELFRIHVFRCEIQEAVSRILYSFATAFRRSAKQTPLSATAAPQTPDSDIFTFSVSLEIKEDDGKGYFSAVPKDKDRQCFKLRQGIDKKIVIYVQQTTNKELAIERCFGLLLSPGKDVRNSDMHLLDLESMGKSSDGKSYVITGSWNPKSPHFQVVNEETPKDKVLFMTTAVDLVITEVQEPVRFLLETKVRVCSPNERLFWPFSKRSTTENFFLKLKQIKQRERKNNTDTLYEVVCLESESERERRKTTASPSVRLPQSGSQSSVIPSPPEDDEEEDNDEPLLSGSGDVSKECAEKILETWGELLSKWHLNLNVRPKQLSSLVRNGVPEALRGEVWQLLAGCHNNDHLVEKYRILITKESPQDSAITRDINRTFPAHDYFKDTGGDGQDSLYKICKVFHVKKKKDSILSGGSTLKLHKKQLQSVICI

SEQ ID NO: 844 - protein, 479 aa, Homo sapiens
MDDKASVGKISVSSDSVSTLNSEDFVLVSRQGDETPSTNNGSDDEKTGLKIVGNGSEQQLQKELADVLMDPPMDDQPGEKELVKRSQLDGEGDGPLSNQLSASSTINPVPLVGLQKPEMSLPVKPGQGDSEASSPFTPVADEDSVVFSKLTYLGCASVNAPRSEVEALRMMSILRSQCQISLDVTLSVPNVSEGIVRLLDPQTNTEIANYPIYKILFCVRGHDGTPESDCFAFTESHYNAELFRIHVFRCEIQEAVSRILYSFATAFRRSAKQTPLSATAAPQTPDSDIFTFSVSLEIKEDDGKGYFSAVPKDKDRQCFKLRQGIDKKIVIYVQQTTNKELAIERCFGLLLSPGKDVRNSDMHLLDLESMGKSSDGKSYVITGSWNPKSPHFQVVNEETPKDKVLFMTTAVDLVITEVQEPVRFLLETKVRVCSPNERLFWPFSKRSTTENFFLKLKQIKQRERKNNTDTLYEVVCLES

SEQ ID NO: 845 - protein, 265 aa, Homo sapiens
MDDKASVGKISVSSDSVSTLNSEDFVLVSRQGDETPSTNNGSDDEKTGLKIVGNGSEQQLQKELADVLMDPPMDDQPGEKELVKRSQLDGEGDGPLSNQLSASSTINPVPLVGLQKPEMSLPVKPGQGDSEASSPFTPVADEDSVVFSKLTYLGCASVNAPRSEVEALRMMSILRSQCQISLDVTLSVPNVSEGIVRLLDPQTNTEIANYPIYKILFCVRGHDGTPESDCFAFTESHYNAELFRIHVFRCEIQEAVSPQEKTLCK

SEQ ID NO: 846 - protein, 320 aa, Homo sapiens
MSKSASPKEPEQLRKLFIGGLSFETTDESLRSHFEQWGTLTDCVVMRDPNTKRSRGFGFVTYATVEEVDAAMNTTPHKVDGRVVEPKRAVSREDSQRPGAHLTVKKIFVGGIKEDTEEHHLRDYFEQYGKIEVIEIMTDRGSGKKRGFAFVTFDDHDSVDKIVIQKYHTVKGHNCEVRKALPKQEMASASSSQRGRRGSGNFGGGRGDGFGGNDNFGRGGNFSGRGGFGGSCGGGGYGGSGDGYNGFGNDGSNFGGGGSYNDFGNYNNQSSNFGPMKGGNFGGRSSGPYGGGGQYFAKPQNQGGYGVSSSSSSYGSGRRF

SEQ ID NO: 847 - protein, 281 aa, Homo sapiens
MGSQGSPVKSYDYLLKFLLVGDSDVGKGEILESLQDGAAESPYAYSNGIDYKTTTILLDGRRVKLELWDTSGQGRFCTIFRSYSRGAQGILLVYDITNRWSFDGIDRWIKEIDEHAPGVPRILVGNRLHLAFKRQVPTEQARAYAEKNCMTFFEVSPLCNFNVIESFTELSRIVLMRHGMEKIWRPNRVFSLQDLCCRAIVSCTPVHLIDKLPLPVTIKSHLKSFSMANGMNAVMMHGRSYSLASGAGGGGSKGNSLKRSKSIRPPQSPPQNCSRSNCKIS

SEQ ID NO: 848 - protein, 262 aa, Homo sapiens
MGSQGSPVKSYDYLLKFLLVGDSDVGKGEILESLQDGAAESPYAYSNGIDYKTTTILLDGRRVKLELWDTSGQGRFCTIFRSYSRGAQGILLVYDITNRWSFDGIDRWIKEIDERQVPTEQARAYAEKNCMTFFEVSPLCNFNVIESFTELSRIVLMRHGMEKIWRPNRVFSLQDLCCRAIVSCTPVHLIDKLPLPVTIKSHLKSFSMANGMNAVMMHGRSYSLASGAGGGGSKGNSLKRSKSIRPPQSPPQNCSRSNCKIS

SEQ ID NO: 849 - protein, 316 aa, Homo sapiens
MLVTLGLLTSFFSFLYMVAPSIRKFFAGGVCRTNVQLPGKVVVITGANTGIGKETARELASRGARVYIACRDVLKGESAASEIRVDTKNSQVLVRKLDLSDTKSIRAFAEGFLAEEKQLHILINNAGVMMCPYSKTADGFETHLGVNHLGHFLLTYLLLERLKVSAPARVVNVSSVAHHIGKIPFHDLQSEKRYSRGFAYCHSKLANVLFTRELAKRLQGTGVTTYAVHPGVVRSELVRHSSLLCLLWRLFSPFVKTAREGAQTSLHCALAEGLEPLSGKYFSDCKRTWVSPRARNNKTAERLWNVSCELLGIRWE

SEQ ID NO: 850 - protein, 976 aa, Homo sapiens
MSNSNTTQETLEIMKESEKKLVEESVNKNKFISKTPSKEEIEKECEDTSLRQETQRRTSNHGHARKRAKSNSKLKLVRSLAVCEESSTPFADGPLETQDIIQLHISCPSDKEEEKSTKDVSEKEDKDKNKEKIPRKMLSRDSSQEYTDSTGIDLHEFLVNTLKKNPRDRMMLLKLEQEILEFINDNNNQFKKFPQMTSYHRMLLHRVAAYFGMDHNVDQTGKAVIINKTSNTRIPEQRFSEHIKDEKNTEFQQRFILKRDDASMDRDDNQTGQNGYLNDIRLSKEAFSSSSHKRRQIFRGNREGLSRTSSSRQSSTDSELKSLEPRPWSSTDSDGSVRSMRPPVTKASSFSGISILTRGDSIGSSKGGSAGRISRPGMALGAPEVCNQVTSSQSVRGLLPCTAQQQQQQQQQQLPALPPTPQQQPPLNNHMISQADDLSNPFGQMSLSRQGSTEAADPSAALFQTPLISQHPQQTSFIMASTGQPLPTSNYSTSSHAPPTQQVLPPQGYMQPPQQIQVSYYPPGQYPNSNQQYRPLSHPVAYSPQRGQQLPQPSQQPGLQPMMPNQQQAAYQGMIGVQQPQNQGLLSSQRSSMGGQMQGLVVQYTPLPSYQVPVGSDSQNVVQPPFQQPMLVPVSQSVQGGLPAAGVPVYYSMIPPAQQNGTSPSVGFLQPPGSEQYQMPQSPSPCSPPQMPQQYSGVSPSGPGVVVMQLNVPNGPQPPQNPSMVQWSHCKYYSMDQRGQKPGDLYSPDSSPQANTQMSSSPVTSPTQSPAPSPVTSLSSVCTGLSPLPVLTQFPRPGGPAQGDGRYSLLGQPLQYNLSICPPLLHGQSTYTVHQGQSGLKHGNRGKRQALKSASTDLGTADVVLGRVLEVTDLPEGITRTEADKLFTQLAMSGAKIQWLKDAQGLPGGGGGDNSGTAENGRHSDLAALYTIVAVFPSPLAAQNASLRLNNSVSRFKLRMAKKNYDLRILERASSQ

SEQ ID NO: 851 - protein, 681 aa, Homo sapiens
MITRGNREGLSRTSSSRQSSTDSELKSLEPRPWSSTDSDGSVRSMRPPVTKASSFSGISILTRGDSIGSSKGGSAGRISRPGMALGAPEVCNQVTSSQSVRGLLPCTAQQQQQQQQQQLPALPPTPQQQPPLNNHMISQADDLSNPFGQMSLSRQGSTEAADPSAALFQTPLISQHPQQTSFIMASTGQPLPTSNYSTSSHAPPTQQVLPPQGYMQPPQQIQVSYYPPGQYPNSNQQYRPLSHPVAYSPQRGQQLPQPSQQPGLQPMMPNQQQAAYQGMIGVQQPQNQGLLSSQRSSMGGQMQGLVVQYTPLPSYQVPVGSDSQNVVQPPFQQPMLVPVSQSVQGGLPAAGVPVYYSMIPPAQQNGTSPSVGFLQPPGSEQYQMPQSPSPCSPPQMPQQYSGVSPSGPGVVVMQLNVPNGPQPPQNPSMVQWSHCKYYSMDQRGQKPGDLYSPDSSPQANTQMSSSPVTSPTQSPAPSPVTSLSSVCTGLSPLPVLTQFPRPGGPAQGDGRYSLLGQPLQYNLSICPPLLHGQSTYTVHQGQSGLKHGNRGKRQALKSASTDLGTADVVLGRVLEVTDLPEGITRTEADKLFTQLAMSGAKIQWLKDAQGLPGGGGGDNSGTAENGRHSDLAALYTIVAVFPSPLAAQNASLRLNNSVSRFKLRMAKKNYDLRILERASSQ

SEQ ID NO: 852 - protein, 671 aa, Homo sapiens
MRPPVTKASSFSGISILTRGDSIGSSKGGSAGRISRPGMALGAPEVCNQVTSSQSVRGLLPCTAQQQQQQQQQQLPALPPTPQQQPPLNNHMISQPVPALQPSPQPVQFSPSSCPQVLLPVSPPQQYNMADDLSNPFGQMSLSRQGSTEAADPSAALFQTPLISQHPQQTSFIMASTGQPLPTSNYSTSSHAPPTQQVLPPQGYMQPPQQIQVSYYPPGQYPNSNQQYRPLSHPVAYSPQRGQQLPQPSQQPGLQPMMPNQQQAAYQGMIGVQQPQNQGLLSSQRSSMGGQMQGLVVQYTPLPSYQVPVGSDSQNVVQPPFQQPMLVPVSQSVQGGLPAAGVPVYYSMIPPAQQNGTSPSVGFLQPPGSEQYQMPQSPSPCSPPQMPQQYSGVSPSGPGVVVMQLNVPNGPQPPQNPSMVQWSHCKYYSMDQRGQKPGDLYSPDSSPQANTQMSSSPVTSPTQSPAPSPVTSLSSVCTGLSPLPVLTQFPRPGGPAQGDGRYSLLGQPLQYNLSICPPLLHGQSTYTVHQGQSGLKHGNRGKRQALKSASTDLGTADVVLGRVLEVTDLPEGITRTEADKLFTQLAMSGAKIQWLKDAQGLPGGGGGDNSGTAENGRHSDLAALYTIVAVFPSPLAAQNASLRLNNSVSRFKLRMAKKNYDLRILERASSQ

SEQ ID NO: 853 - protein, 376 aa, Homo sapiens
MAEERPGAWFGFGFCGFGQELGSGRGRQVHSPSPLRAGVDICRVSASWSYTAFVTRGGRLELSGSASGAAGRCKDAWASEGLLAVLRAGPGPEALLQVWAAESALRGEPLWAQNVVPEAEGEDDPAGEAQAGRLPLLPCARAYVSPRAPFYRPLAPELRARQLELGAEHALLLDAAGQVFSWGGGRHGQLGHGTLEAELEPRLLEALQGLVMAEVAAGGWHSVCVSETGDIYIWGWNESGQLALPTRNLAEDGETVAREATELNEDGSQVKRTGGAEDGAPAPFIAVQPFPALLDLPMGSDAVKASCGSRHTAVVTRTGELYTWGWGKYGQLGHEDTTSLDRPRRVEYFVDKQLQVKAVTCGPWNTYVYAVEKGKS

SEQ ID NO: 854 - protein, 203 aa, Homo sapiens
MSGQRVDVKVVMLGKEYVGKTSLVERYVHDRFLVGPYQNTIGAAFVAKVMSVGDRTVTLGIWDTAGSERYEAMSRIYYRGAKAAIVCYDLTDSSSFERAKFWVKELRSLEEGCQIYLCGTKSDLLEEDRRRRRVDFHDVQDYADNIKAQLFETSSKTGQSVDELFQKVAEDYVSVAAFQVMTEDKGVDLGQKPNPYFYSCCHH

SEQ ID NO: 855 - protein, 220 aa, Homo sapiens
MASATDSRYGQKESSDQNFDYMFKILIIGNSSVGKTSFLFRYADDSFTPAFVSTVGIDFKVKTIYRNDKRIKLQIWDTAGQERYRTITTAYYRGAMGFILMYDITNEESFNAVQDWSTQIKTYSWDNAQVLLVGNKCDMEDERVVSSERGRQLADHLGFEFFEASAKDNINVKQTFERLVDVICEKMSESLDTADPAVTGAKQGPQLSDQQVPPHQDCAC

SEQ ID NO: 856 - protein, 255 aa, Homo sapiens
MVSWMISRAVVLVFGMLYPAYYSYKAVKTKNVKEYVRWMMYWIVFALYTVIETVADQTVAWFPLYYELKIAFVIWLLSPYTKGASLIYRKFLHPLLSSKEREIDDYIVQAKERGYETMVNFGRQGLNLAATAAVTAAVKSQGAITERLRSFSMHDLTTIQGDEPVGQRPYQPLPEAKKKSKPAPSESAGYGIPLKDGDEKTDEEAEGPYSDNEMLTHKGLRRSQSMKSVKTTKGRKEVRYGSLKYKVKKRPQVYF

SEQ ID NO: 857 - protein, 146 aa, Homo sapiens
MVSWMISRAVVLVFGMLYPAYYSYKAVKTKNVKEYVRWMMYWIVFALYTVIETVADQTVAWFPLYYELKIAFVIWLLSPYTKGASLIYRKFLHPLLSSKEREIDDYIVQAKERGYETMVNFGRQGLNLAATAAVTAAVKVIVHLPF

SEQ ID NO: 858 - protein, 201 aa, Homo sapiens
MVSWIISRLVVLIFGTLYPAYYSYKAVKSKDIKEYVKWMMYWIIFALFTTAETFTDIFLCWFPFYYELKIAFVAWLLSPYTKGSSLLYRKFVHPTLSSKEKEIDDCLVQAKDRSYDALVHFGKRGLNVAATAAVMAASKGQGALSERLRSFSMQDLTTIRGDGAPAPSGPPPPGSGRASGKHGQPKMSRSASESASSSGTA

SEQ ID NO: 859 - protein, 174 aa, Homo sapiens
MDHLQAGGVKWMMYWIIFALFTTAETFTDIFLCWFPFYYELKIAFVAWLLSPYTKGSSLLYRKFVHPTLSSKEKEIDDCLVQAKDRSYDALVHFGKRGLNVAATAAVMAASKGQGALSERLRSFSMQDLTTIRGDGAPAPSGPPPPGSGRASGKHGQPKMSRSASESASSSGTA

SEQ ID NO: 860 - protein, 208 aa, Homo sapiens
MQKVLSNGQTEEVRSGSRLIFGTLYPAYYSYKAVKSKDIKEYVKWMMYWIIFALFTTAETFTDIFLCWFPFYYELKIAFVAWLLSPYTKGSSLLYRKFVHPTLSSKEKEIDDCLVQAKDRSYDALVHFGKRGLNVAATAAVMAASKGQGALSERLRSFSMQDLTTIRGDGAPAPSGPPPPGSGRASGKHGQPKMSRSASESASSSGTA

SEQ ID NO: 861 - protein, 143 aa, Homo sapiens
MVSWIISRLVVLIFGTLYPAYYSYKAVKSKDIKEYVKWMMYWIIFALFTTAETFTDIFLCWDRVPYRRDCGASACRTSPPSGETAPLLPRAPHHRGLGGPAANTASLRCPGVLLRALAAQAPPRILRSRFRKKSTSSSATETT

SEQ ID NO: 862 - protein, 386 aa, Homo sapiens
MHARGPHGQLSPALPLASSVLMLLMSTLWLVGAGPGLVLAPELLLDPWQVHRLLTHALGHTALPGLLLSLLLLPTVGWQQECHLGTLRFLHASALLALASGLLAVLLAGLGLSSAAGSCGYMPVHLAMLAGEGHRPRRPRGALPPWLSPWLLLALTPLLSSEPPFLQLLCGLLAGLAYAAGAFRWLEPSERRLQVLQEGVLCRTLAGCWPLRLLATPGSLAELPVTHPAGVRPPIPGPPYVASPDLWSHWEDSALPPPSLRPVQPTWEGSSEAGLDWAGASFSPGTPMWAALDEQMLQEGIQASLLDGPAQEPQSAPWLSKSSVSSLRLQQLERMGFPTEQAVVALAATGRVEGAVSLLVGGQVGTETLVTHGKGGPAHSEGPGPP

SEQ ID NO: 863 - protein, 115 aa, Homo sapiens
MNAPPAFESFLLFEGEKITINKDTKVPNACLFTMNKEDHTLGNIIKSQLLKDPQVLFAGYKVPHPLEHKIIIRVQTTPDYSPQEAFTNAITDLISELSLLEERFRTCLLPLRLLP

SEQ ID NO: 864 - protein, 889 aa, Homo sapiens
MAADVVGDVYVLVEHPFEYTGKDGRRVAIRPNERYRLLRRSTEHWWHVRREPGGRPFYLPAQYVRELPALGNPAAAAPPGPHPSPAAPEPLAYDYRFVSAAATAGPDGAPEESGGRASSLCGPAQRGAATQRSSLAPGLPACLYLRPAAPVRPAQSLNDLACAAVSPPAGLLGSSGSFKACSVAGSWVCPRPLARSDSENVYEVIQDLHVPPPEESAEQVDDPPEPVYANIERQPRATSPGAAAAPLPSPVWETHTDAGTGRPYYYNPDTGVTTWESPFEAAEGAASPATSPASVDSHVSLETEWGQYWDEESRRVFFYNPLTGETAWEDEAENEPEEELEMQPGLSPGSPGDPRPPTPETDYPESLTSYPEEDYSPVGSFGEPGPTSPLTTPPGWSCHVSQDKQMLYTNHFTQEQWVRLEDPHGKPYFYNPEDSSVRWELPQVPVPAPRSIHKSSQDGDTPAQASPPEEKVPAELDEVGSWEEVSPATAAVRTKTLDKAGVLHRTKTADKGKRLRKKHWSASWTVLEGGVLTFFKDSKTSAAGGLRQPSKFSTPEYTVELRGATLSWAPKDKSSRKNVLELRSRDGSEYLIQHDSEAIISTWHKAIAQGIQELSAELPPEESESSRVDFGSSERLGSWQEKEEDARPNAAAPALGPVGLESDLSKVRHKLRKFLQRRPTLQSLREKGYIKDQVFGCALAALCERERSRVPRFVQQCIRAVEARGLDIDGLYRISGNLATIQKLRYKVDHDERLDLDDGRWEDVHVITGALKLFFRELPEPLFPFSHFRQFIAAIKLQDQARRSRCVRDLVRSLPAPNHDTLRMLFQHLCRVIEHGEQNRMSVQSVAIVFGPTLLRPEVEETSMPMTMVFQNQVVELILQQCADIFPPH

SEQ ID NO: 865 - protein, 548 aa, Homo sapiens
MQPGLSPGSPGDPRPPTPETDYPESLTSYPEEDYSPVGSFGEPGPTSPLTTPPGWSCHVSQDKQMLYTNHFTQEQWVRLEDPHGKPYFYNPEDSSVRWELPQVPVPAPRSIHKSSQDGDTPAQASPPEEKVPAELDEVGSWEEVSPATAAVRTKTLDKAGVLHRTKTADKGKRLRKKHWSASWTVLEGGVLTFFKDSKTSAAGGLRQPSKFSTPEYTVELRGATLSWAPKDKSSRKNVLELRSRDGSEYLIQHDSEAIISTWHKAIAQGIQELSAELPPEESESSRVDFGSSERLGSWQEKEEDARPNAAAPALGPVGLESDLSKVRHKLRKFLQRRPTLQSLREKGYIKDQVFGCALAALCERERSRVPRFVQQCIRAVEARGLDIDGLYRISGNLATIQKLRYKVDHDERLDLDDGRWEDVHVITGALKLFFRELPEPLFPFSHFRQFIAAIKLQDQARRSRCVRDLVRSLPAPNHDTLRMLFQHLCRVIEHGEQNRMSVQSVAIVFGPTLLRPEVEETSMPMTMVFQNQVVELILQQCADIFPPH

SEQ ID NO: 866 - protein, 862 aa, Homo sapiens
MAADVVGDVYVLVEHPFEYTGKDGRRVAIRPNERYRLLRRSTEHWWHVRREPGGRPFYLPAQYVRELPALGNPAAAAPPGPHPSPAAPEPLAYDYRFVSAAATAGPDGAPEESGGRASSLCGPAQRGAATQRSSLAPGLPACLYLRPAAPVRPAQSLNDLACAAVSPPAGLLGSSGSFKACSVAGSWVCPRPLARSDSENVYEVIQDLHVPPPEESAEQVDDPPEPVYANIERQPRATSPGAAAAPLPSPVWETHTDAGTGRPYYYNPDTGVTTWESPFEAAEGAASPATSPASVDSHVSLETEWGQYWDEESRRVFFYNPLTGETAWEDEAENEPEEELEMQPGLSPGSPGDPRPPTPETDYPESLTSYPEEDYSPVGSFGEPGPTSPLTTPPGWSCHVSQDKQMLYTNHFTQEQVPVPAPRSIHKSSQDGDTPAQASPPEEKVPAELDEVGSWEEVSPATAAVRTKTLDKAGVLHRTKTADKGKRLRKKHWSASWTVLEGGVLTFFKDSKTSAAGGLRQPSKFSTPEYTVELRGATLSWAPKDKSSRKNVLELRSRDGSEYLIQHDSEAIISTWHKAIAQGIQELSAELPPEESESSRVDFGSSERLGSWQEKEEDARPNAAAPALGPVGLESDLSKVRHKLRKFLQRRPTLQSLREKGYIKDQVFGCALAALCERERSRVPRFVQQCIRAVEARGLDIDGLYRISGNLATIQKLRYKVDHDERLDLDDGRWEDVHVITGALKLFFRELPEPLFPFSHFRQFIAAIKLQDQARRSRCVRDLVRSLPAPNHDTLRMLFQHLCRVIEHGEQNRMSVQSVAIVFGPTLLRPEVEETSMPMTMVFQNQVVELILQQCADIFPPH

SEQ ID NO: 867 - protein, 263 aa, Homo sapiens
MAADVVGDVYVLVEHPFEYTGKDGRRVAIRPNERYRLLRRSTEHWWHVRREPGGRPFYLPAQYVRELPALGNPAAAAPPGPHPSPAAPEPLAYDYRFVSAAATAGPDGAPEESGGRASSLCGPAQRGAATQRSSLAPGLPACLYLRPAAPVRPAQSLNDLACAAVSPPAGLLGSSGSFKACSVAGSWVCPRPLARSDSENVYEVIQDLHVPPPEESAEQVPPRALGRGGGWRARDRARTEPGRKETRSAQRRARRPPLSEDFG

SEQ ID NO: 868 - protein, 437 aa, Homo sapiens
MGLRAAPSSAAAAAAEVEQRRSPGLCPPPLELLLLLLFSLGLLHAGDCQQPAQCRIQKCTTDFVSLTSHLNSAVDGFDSEFCKALRAYAGCTQRTSKACRGNLVYHSAVLGISDLMSQRNCSKDGPTSSTNPEVTHDPCNYHSHAGAREHRRGDQNPPSYLFCGLFGDPHLRTFKDNFQTCKVEGAWPLIDNNYLSVQVTNVPVVPGSSATATNKITIIFKAHHECTDQKVYQAVTDDLPAAFVDGTTSGGDSDAKSLRIVERESGHYVEMHARYIGTTVFVRQVGRYLTLAIRMPEDLAMSYEESQDLQLCVNGCPLSERIDDGQGQVSAILGHSLPRTSLVQAWPGYTLETANTQCHEKMPVKDIYFQSCVFDLLTTGDANFTAAAHSALEDVEALHPRKERWHIFPSSGNGTPRGGSDLSVSLGLTCLILIVFL

SEQ ID NO: 869 - protein, 128 aa, Homo sapiens
MENAGGAEGTESGAAACAATDGPTRRAGADSGYAGFWRPWVDAGGKKEEETPNHAAEAMPDGPGMTAASGKLYQFRHPVRLFWPKSKCYDYLYQEAEALLKNFPIQATISFYEDSDSEDEIEDLTCEN

SEQ ID NO: 870 - protein, 70 aa, Homo sapiens
MPDGPGMTAASGKLYQFRHPVRLFWPKSKCYDYLYQEAEALLKNFPIQATISFYEDSDSEDEIEDLTCEN

SEQ ID NO: 871 - protein, 452 aa, Homo sapiens
MELALRRSPVPRWLLLLPLLLGLNAGAVIDWPTEEGKEVWDYVTVRKDAYMFWWLYYATNSCKNFSELPLVMWLQGGPGGSSTGFGNFEEIGPLDSDLKPRKTTWLQAASLLFVDNPVGTGFSYVNGSGAYAKDLAMVASDMMVLLKTFFSCHKEFQTVPFYIFSESYGGKMAAGIGLELYKAIQRGTIKCNFAGVALGDSWISPVDSVLSWGPYLYSMSLLEDKGLAEVSKVAEQVLNAVNKGLYREATELWGKAEMIIEQNTDGVNFYNILTKSTPTSTMESSLEFTQSHLVCLCQRHVRHLQRDALSQLMNGPIRKKLKIIPEDQSWGGQATNVFVNMEEDFMKPVISIVDELLEAGINVTVYNGQLDLIVDTMGQEAWVRKLKWPELPKFSQLKWKALYSDPKSLETSAFVKSYKNLAFYWILKAGHMVPSDQGDMALKMMRLVTQQE

SEQ ID NO: 872 - protein, 296 aa, Homo sapiens
MELALRRSPVPRWLLLLPLLLGLNAGAVIDWPTEEGKEVWDYVTVRKDAYMFWWLYYATNSCKNFSELPLVMWLQGGPGGSSTGFGNFEEIGPLDSDLKPRKTTWLQAASLLFVDNPVGTGFSYVNGSGAYAKDLAMVASDMMVLLKTFFSCHKEFQTVPFYIFSESYGGKMAAGIGLELYKAIQRGTIKCNFAGVALGDSWISPVDSVLSWGPYLYSMSLLEDKGLAEVSKVAEQVLNAVNKGLYREATELWGKAEMIIEQNTDGVNFYNILTKSTPTSTMESSLEFTQSHLVWF

SEQ ID NO: 873 - protein, 145 aa, Homo sapiens
MKFNPFVTSDRSKNRKRHFNAPSHVRRKIMSSPLSKELRQKYNVRSMPIRKDDEVQVVRGHYKGQQIGKVVQVYRKKYVIYIERVQREKANGTTVHVGIHPSKVVITRLKLDKDRKKILERKAKSRQVGKEKGKYKEELIEKMQE

SEQ ID NO: 874 - protein, 140 aa, Homo sapiens [sequence omitted]

SEQ ID NO: 875 - protein, 779 aa, Homo sapiens
MLTNLRIFAMSHQTIPSVYINNICCYKIRASLKRLKPHVPLGRNCSSLPGLIGNDIKSLHSIINPPIAKIRNIGIMAHIDAGKTTTTERILYYSGYTRSLGDVDDGDTVTDFMAQERERGITIQSAAVTFDWKGYRVNLIDTPGHVDFTLEVERCLRVLDGAVAVFDASAGVEAQTLTVWRQADKHNIPRICFLNKMDKTGASFKYAVESIREKLKAKPLLLQLPIGEAKTFKGVVDVVMKEKLLWNCNSNDGKDFERKPLLEMNDPELLKETTEARNALIEQVADLDDEFADLVLEEFSENFDLLPAEKLQTAIHRVTLAQTAVPVLCGSALKNKGIQPLLDAVTMYLPSPEERNYEFLQWYKDDLCALAFKVLHDKQRGPLVFMRIYSGTIKPQLAIHNINGNCTERISRLLLPFADQHVEIPSLTAGNIALTVGLKHTATGDTIVSSKSSALAAARRAEREGEKKHRQNNEAERLLLAGVEIPEPVFFCTIEPPSLSKQPDLEHALKCLQREDPSLKVRLDPDSGQTVLCGMGELHIEIIHDRIKREYGLETYLGPLQVAYRETILNSVRATDTLDRTLGDKRHLVTVEVEARPIETSSVMPVIEFEYAESINEGLLKVSQEAIENGIHSACLQGPLLGSPIQDVAITLHSLTIHPGTSTTMISACVSRCVQKALKKADKQVLEPLMNLEVTVARDYLSPVLADLAQRRGNIQEIQTRQDNKVVIGFVPLAEIMGYSTVLRTLTSGSATFALELSTYQAMNPQDQNTLLNRRSGLT

SEQ ID NO: 876 - protein, 732 aa, Homo sapiens
MLTNLRIFAMSHQTIPSVYINNICCYKIRASLKRLKPHVPLGRNCSSLPGLIGNDIKSLHSIINPPIAKIRNIGIMAHIDAGKTTTTERILYYSGYTRSLGDVDDGDTVTDFMAQERERGITIQSAAVTFDWKGYRVNLIDTPGHVDFTLEVERCLRVLDGAVAVFDASAGVEAQTLTVWRQADKHNIPRICFLNKMDKTGASFKYAVESIREKLKAKPLLLQLPIGEAKTFKGVVDVVMKEKLLWNCNSNDGKDFERKPLLEMNDPELLKETTEARNALIEQVADLDDEFADLVLEEFSENFDLLPAEKLQTAIHRVTLAQTAVPVLCGSALKNKGIQPLLDAVTMYLPSPEERNYEFLERISRLLLPFADQHVEIPSLTAGNIALTVGLKHTATGDTIVSSKSSALAAARRAEREGEKKHRQNNEAERLLLAGVEIPEPVFFCTIEPPSLSKQPDLEHALKCLQREDPSLKVRLDPDSGQTVLCGMGELHIEIIHDRIKREYGLETYLGPLQVAYRETILNSVRATDTLDRTLGDKRHLVTVEVEARPIETSSVMPVIEFEYAESINEGLLKVSQEAIENGIHSACLQGPLLGSPIQDVAITLHSLTIHPGTSTTMISACVSRCVQKALKKADKQVLEPLMNLEVTVARDYLSPVLADLAQRRGNIQEIQTRQDNKVVIGFVPLAEIMGYSTVLRTLTSGSATFALELSTYQAMNPQDQNTLLNRRSGLT

SEQ ID NO: 877 - protein, 777 aa, Homo sapiens
MLTNLRIFAMSHQTIPSVYINNICCYKIRASLKRLKPHVPLGRNCSSLPGLIGNDIKSLHSIINPPIAKIRNIGIMAHIDAGKTTTTERILYYSGYTRSLGDVDDGDTVTDFMAQERERGITIQSAAVTFDWKGYRVNLIDTPGHVDFTLEVERCLRVLDGAVAVFDASAGVEAQTLTVWRQADKHNIPRICFLNKMDKTGASFKYAVESIREKLKAKPLLLQLPIGEAKTFKGVVDVVMKEKLLWNCNSNDGKDFERKPLLEMNDPELLKETTEARNALIEQVADLDDEFADLVLEEFSENFDLLPAEKLQTAIHRVTLAQTAVPVLCGSALKNKGIQPLLDAVTMYLPSPEERNYEFLQWYKDDLCALAFKVLHDKQRGPLVFMRIYSGTIKPQLAIHNINGNCTERISRLLLPFADQHVEIPSLTAGNIALTVGLKHTATGDTIVSSKSSALAAARRAEREGEKKHRQNNEAERLLLAGVEIPEPVFFCTIEPPSLSKQPDLEHALKCLQREDPSLKVRLDPDSGQTVLCGMGELHIEIIHDRIKREYGLETYLGPLQVAYRETILNSVRATDTLDRTLGDKRHLVTVEVEARPIETSSVMPVIEYAESINEGLLKVSQEAIENGIHSACLQGPLLGSPIQDVAITLHSLTIHPGTSTTMISACVSRCVQKALKKADKQVLEPLMNLEVTVARDYLSPVLADLAQRRGNIQEIQTRQDNKVVIGFVPLAEIMGYSTVLRTLTSGSATFALELSTYQAMNPQDQNTLLNRRSGLT

SEQ ID NO: 878 - protein, 601 aa, Homo sapiens
MLTNLRIFAMSHQTIPSVYINNICCYKIRASLKRLKPHVPLGRNCSSLPGLIGNDIKSLHSIINPPIAKIRNIGIMAHIDAGKTTTTERILYYSGYTRSLGDVDDGDTVTDFMAQERERGITIQSAAVTFDWKGYRVNLIDTPGHVDFTLEVERCLRVLDGAVAVFDASAGVEAQTLTVWRQADKHNIPRICFLNKMDKTGASFKYAVESIREKLKAKPLLLQLPIGEAKTFKGVVDVVMKEKLLWNCNSNDGKDFERKPLLEMNDPELLKETTEARNALIEQVADLDDEFADLVLEEFSENFDLLPAEKLQTAIHRVTLAQTAVPVLCGSALKNKGIQPLLDAVTMYLPSPEERNYEFLQWYKDDLCALAFKVLHDKQRGPLVFMRIYSGTIKPQLAIHNINGNCTERISRLLLPFADQHVEIPSLTAGNIALTVGLKHTATGDTIVSSKSSALAAARRAEREGEKKHRQNNEAERLLLAGVEIPEPVFFCTIEPPSLSKQPDLEHALKCLQREDPSLKVRLDPDSGQIPQRRGNIQEIQTRQDNKVVIGFVPLAEIMGYSTVLRTLTSGSATFALELSTYQAMNPQDQNTLLNRRSGLT

SEQ ID NO: 879 - protein, 513 aa, Homo sapiens
MLTNLRIFAMSHQTIPSVYINNICCYKIRASLKRLKPHVPLGRNCSSLPGLIGNDIKSLHSIINPPIAKIRNIGIMAHIDAGKTTTTERILYYSGYTRSLGDVDDGDTVTDFMAQERERGITIQSAAVTFDWKGYRVNLIDTPGHVDFTLEVERCLRVLDGAVAVFDASAGVEAQTLTVWRQADKHNIPRICFLNKMDKTGASFKYAVESIREKLKAKPLLLQLPIGEAKTFKGVVDVVMKEKLLWNCNSNDGKDFERKPLLEMNDPELLKETTEARNALIEQVADLDDEFADLVLEEFSENFDLLPAEKLQTAIHRVTLAQTAVPVLCGSALKNKGIQPLLDAVTMYLPSPEERNYEFLQWYKDDLCALAFKVLHDKQRGPLVFMRIYSGTIKPQLAIHNINGNCTERISRLLLPFADQHVEIPSLTAGNIALTVGLKHTATGDTIVSSKSSALAAARRAEREGEKKHRQNNEAERLLLAGVEIPEPVFFCTIEPPSLSKQPGINGLSVSTN

SEQ ID NO: 880 - protein, 262 aa, Homo sapiens
MALGLKCFRMVHPTFRNYLAASIRPVSEVTLKTVHERQHGHRQYMAYSAVPVRHFATKKAKAKGKGQSQTRVNINAALVEDIINLEEVNEEMKSVIEALKDNFNKTLNIRTSPGSLDKIAVVTADGKLALNQISQISMKSPQLILVNMASFPECTAAAIKAIRESGMNLNPEVEGTLIRVPIPQVTREHREMLVKLAKQNTNKAKDSLRKVRTNSMNKLKKSKDTVSEDTIRLIEKQISQMADDTVAELDRHLAVKTKELLG

SEQ ID NO: 881 - protein, 201 aa, Homo sapiens
MALGLKCFRMVHPTFRNYLAASIRPVSEVTLKTVHERQHGHRQYMAYSAVPVRHFATKKAKAKGKGQSQTRVNINAALVEDIINLEEVNEEMKSVIEALKDNFNKTLNIRTSPGSLDKIAVVTADGKLALNQISQISMKSPQLILVNMASFPECTAAAIKAIRESGMNLNPEVEGTLIRVPIPQSAKWPMTQWQNWTGIWQ

SEQ ID NO: 882 - protein, 218 aa, Homo sapiens
MAYSAVPVRHFATKKAKAKGKGQSQTRVNINAALVEDIINLEEVNEEMKSVIEALKDNFNKTLNIRTSPGSLDKIAVVTADGKLALNQISQISMKSPQLILVNMASFPECTAAAIKAIRESGMNLNPEVEGTLIRVPIPQVTREHREMLVKLAKQNTNKAKDSLRKVRTNSMNKLKKSKDTVSEDTIRLIEKQISQMADDTVAELDRHLAVKTKELLG

SEQ ID NO: 883 - protein, 176 aa, Homo sapiens
MALGLKCFRMVHPTFRNYLAASIRPVSEVTLKTVHERQHGHRQYMAYSAVPVRHFATKKAKAKGKGQSQTRVNINAALVEDIINLEEVNEEMKSVIEALKDNFNKTLNIRTSPGSLDKIAVVTADGKLALNQISQISMKSPQLILVNMASFPEELAWIRSLRVPGIRSHLYHQLAV

SEQ ID NO: 884 - protein, 158 aa, Homo sapiens
MALGLKCFRMVHPTFRNYLAASIRPVSEVTLKTVHERQHGHRQYMAYSAVPVRHFATKKAKAKGKGQSQTRVNINAALVEDIINLEEVNEEMKSVIEALKDNFNKTLNIRTSPGSLDKIAVVTADGKLALNQISQISMKSPQLILVNMASFPEVRWPC

SEQ ID NO: 885 - protein, 168 aa, Homo sapiens
MALGLKCFRMVHPTFRNYLAASIRPVSEVTLKTVHERQHGHRQYMAYSAVPVRHFATKKAKAKGKGQSQTRVNINAALVEDIINLEEVNEEMKSVIEALKDNFNKTLNIRTSPGSLDKIAVVTADGKLALNQISQISMKSPQLILVNMASFPETMKQIKQYFNGPNVA

SEQ ID NO: 886 - protein, 124 aa, Homo sapiens
MAYSAVPVRHFATKKAKAKGKGQSQTRVNINAALVEDIINLEEVNEEMKSVIEALKDNFNKTLNIRTSPGSLDKIAVVTADGKLALNQISQISMKSPQLILVNMASFPETMKQIKQYFNGPNVA

SEQ ID NO: 887 - protein, 210 aa, Homo sapiens
MALGLKCFRMVHPTFRNYLAASIRPVSEVTLKTVHERQHGHRQYMAYSAVPVRHFATKKAKGSLDKIAVVTADGKLALNQISQISMKSPQLILVNMASFPECTAAAIKAIRESGMNLNPEVEGTLIRVPIPQVTREHREMLVKLAKQNTNKAKDSLRKVRTNSMNKLKKSKDTVSEDTIRLIEKQISQMADDTVAELDRHLAVKTKELLG

SEQ ID NO: 888 - protein, 225 aa, Homo sapiens; identical to SEQ ID NO: 266

SEQ ID NO: 889 - protein, 344 aa, Homo sapiens
MATPYVPVPMPIGNSASSFTTNRNQRSSSFGSVSTSSNSSKGQLEDSNMGNFKQTSVPDQMDNTSSVCSSPLIRTKFTGTASSIEYSTRPRDTEEQNPETVNWEDRPSTPTILGYEVMEERAKFTVYKILVKKTPEESWVVFRRYTDFSRLNDKLKEMFPGFRLALPPKRWFKDNYNADFLEDRQLGLQAFLQNLVAHKDIANCLAVREFLCLDDPPGPFDSLEESRAFCETLEETNYRLQKELLEKQKEMESLKKLLSEKQLHIDTLENRIRTLSLEPEESLDVSETEGEQILKVESSALEVDQDVLDEESRADNKPCLSFSEPENAVSEIEVAEVAYDAEED

SEQ ID NO: 890 - protein, 315 aa, Homo sapiens
MATPYVPVPMPIGNSASSFTTNRNQRSSSFGSVSTSSNSSKGQLEDSNMGNFKQTSVPDQMDNTSSVCSSPLIRTKFTGTASSIEYSTRPRDTEEQNPETVNWEDRPSTPTILGYEVMEERAKFTLKEMFPGFRLALPPKRWFKDNYNADFLEDRQLGLQAFLQNLVAHKDIANCLAVREFLCLDDPPGPFDSLEESRAFCETLEETNYRLQKELLEKQKEMESLKKLLSEKQLHIDTLENRIRTLSLEPEESLDVSETEGEQILKVESSALEVDQDVLDEESRADNKPCLSFSEPENAVSEIEVAEVAYDAEED

SEQ ID NO: 891 - protein, 490 aa, Homo sapiens
MTIGRMENVEVFTAEGKGRGLKATKEFWAADIIFAERAYSAVVFDSLVNFVCHTCFKRQEKLHRCGQCKFAHYCDRTCQKDAWLNHKNECSAIKRYGKVPNENIRLAARIMWRVEREGTGLTEGCLVSVDDLQNHVEHFGEEEQKDLRVDVDTFLQYWPPQSQQFSMQYISHIFGVINCNGFTLSDQRGLQAVGVGIFPNLGLVNHDCWPNCTVIFNNGNHEAVKSMFHTQMRIELRALGKISEGEELTVSYIDFLNVSEERKRQLKKQYYFDCTCEHCQKKLKDDLFLGVKDNPKPSQEVVKEMIQFSKDTLEKIDKARSEGLYHEVVKLCRECLEKQEPVFADTNIYMLRMLSIVSEVLSYLQAFEEASFYARRMVDGYMKLYHPNNAQLGMAVMRAGLTNWHAGNIEVGHGMICKAYAILLVTHGPSHPITKDLEAMRVQTEMELRMFRQNEFMYYKMREAALNNQPMQVMAEPSNEPSPALFHKKQ

SEQ ID NO: 892 - protein, 917 aa, Homo sapiens
MADEALAGLDEGALRKLLEVTADLAERRRIRSAIRELQRQELEREEEALASKRFRAERQDNKENWLHSQQREAEQRAALARLAGQLESMNDVEELTALLRSAGEYEERKLIRAAIRRVRAQEIEAATLAGRLYSGRPNSGSREDSKGLAAHRLEQCEVPEREEQEQQAEVSKPTPTPEGTSQDVTTVTLLLRAPPGSTSSSPASPSSSPTPASPEPPLEPAEAQCLTAEVPGSPEPPPSPPKTTSPEPQESPTLPSTEGQVVNKLLSGPKETPAAQSPTRGPSDTKRADVAGPRPCQRSLSVLSPRQPAQNRESTPLASGPSSFQRAGSVRDRVHKFTSDSPMAARLQDGTPQAALSPLTPARLLGPSLTSTTPASSSSGSSSRGPSDTSSRFSKEQRGVAQPLAQLRSCPQEEGPRGRGLAARPLENRAGGPVARSEEPGAPLPVAVGTAEPGGSMKTTFTIEIKDGRGQASTGRVLLPTGNQRAELTLGLRAPPTLLSTSSGGKSTITRVNSPGTLARLGSVTHVTSFSHAPPSSRGGCSIKMEAEPAEPLAAAVEAANGAEQTRVNKAPEGRSPLSAEELMTIEDEGVLDKMLDQSTDFEERKLIRAALRELRQRKRDQRDKERERRLQEARGRPGEGRGNTATETTTRHSQRAADGSAVSTVTKTERLVHSNDGTRTARTTTVESSFVRRSENGSGSTMMQTKTFSSSSSSKKMGSIFDREDQASPRAGSLAALEKRQAEKKKELMKAQSLPKTSASQARKAMIEKLEKEGAAGSPGGPRAAVQRSTSFGVPNANSIKQMLLDWCRAKTRGYEHVDIQNFSSSWSDGMAFCALVHNFFPEAFDYGQLSPQNRRQNFEVAFSSAEMLVDCVPLVEVDDMMIMGKKPDPKCVFTYVQSLYNHLRRHELRLRGKNV

SEQ ID NO: 893 - protein, 461 aa, Homo sapiens
MKTTFTIEIKDGRGQASTGRVLLPTGNQRAELTLGLRAPPTLLSTSSGGKSTITRVNSPGTLARLGSVTHVTSFSHAPPSSRGGCSIKMEAEPAEPLAAAVEAANGAEQTRVNKAPEGRSPLSAEELMTIEDEGVLDKMLDQSTDFEERKLIRAALRELRQRKRDQRDKERERRLQEARGRPGEGRGNTATETTTRHSQRAADGSAVSTVTKTERLVHSNDGTRTARTTTVESSFVRRSENGSGSTMMQTKTFSSSSSSKKMGSIFDREDQASPRAGSLAALEKRQAEKKKELMKAQSLPKTSASQARKAMIEKLEKEGAAGSPGGPRAAVQRSTSFGVPNANSIKQMLLDWCRAKTRGYEHVDIQNFSSSWSDGMAFCALVHNFFPEAFDYGQLSPQNRRQNFEVAFSSAEMLVDCVPLVEVDDMMIMGKKPDPKCVFTYVQSLYNHLRRHELRLRGKNV

SEQ ID NO: 894 - protein, 915 aa, Homo sapiens
MADEALAGLDEGALRKLLEVTADLAERRRIRSAIRELQRQELEREEEALASKRFRAERQDNKENWLHSQQREAEQRAALARLAGQLESMNDVEELTALLRSAGEYEERKLIRAAIRRVRAQEIEAATLAGRLYSGRPNSGSREDSKGLAAHRLEQCEVPEREEQEQQAEVSKPTPTPEGTSQDVTTVTLLLRAPPGSTSSSPASPSSSPTPASPEPPLEPAEAQCLTAEVPGSPEPPPSPPKTTSPEPQESPTLPSTEGQVVNKLLSGPKETPAAQSPTRGPSDTKRADVAGPRPCQRSLSVLSPRQPAQNRESTPLASGPSSFQRAGSVRDRVHKFTSDSPMAARLQDGTPQAALSPLTPARLLGPSLTSTTPASSSSGSSSRGPSDTSSRFSKEQRGVAQPLAQLRSCPQEEGPRGRGLAARPLENRAGGPVARSEEPGAPLPVAVGTAEPGGSMKTTFTIEIKDGRGQASTGRVLLPTGNQRAELTLGLRAPPTLLSTSSGGKSTITRVNSPGTLARLGSVTHVTSFSHAPPSSRGGCSIKMEAEPAEPLAAAVEAANGAEQTRVNKAPEGRSPLSAEELMTIEDEGVLDKMLDQSTDFEERKLIRAALRELRQRKRDQRDKERERRLQEARGRPGEGRGNTATETTTRHSQRAADGSAVSTVTKTERLVHSNDGTRTARTTTVESSFVRRSENGSGSTMMQTKTFSSSSSSKKMGSIFDREDQASPRAGSLAALEKRQAEKKKELMKAQSLPKTSASQARKAMIEKLEKEGAAGSPGGPRAAVQRSTSFGVPNANSIKQMLLDWCRAKTRGYEHVDIQNFSSSWSDGMAFCALVHNFFPEAFDYGQLSPQNRRQNFEVAFSSAETHADCPQLLDTEDMVRLREPDWKCVYTYIQEFYRCLVQKGLVKTKKS

SEQ ID NO: 895 - protein, 940 aa, Homo sapiens
MADEALAGLDEGALRKLLEVTADLAERRRIRSAIRELQRQELEREEEALASKRFRAERQDNKENWLHSQQREAEQRAALARLAGQLESMNDVEELTALLRSAGEYEERKLIRAAIRRVRAQEIEAATLAGRLYSGRPNSGSREDSKGLAAHRLEQCEVPEREEQEQQAEVSKPTPTPEGTSQDVTTVTLLLRAPPGSTSSSPASPSSSPTPASPEPPLEPAEAQCLTAEVPGSPEPPPSPPKTTSPEPQESPTLPSTEGQVVNKLLSGPKETPAAQSPTRGPSDTKRADVAGPRPCQRSLSVLSPRQPAQNRESTPLASGPSSFQRAGSVRDRVHKFTSDSPMAARLQDGTPQAALSPLTPARLLGPSLTSTTPASSSSGSSSRGPSDTSSRFSKEQRGVAQPLAQLRSCPQEEGPRGRGLAARPLENRAGGPVARSEEPGAPLPVAVGTAEPGGSMKTTFTIEIKDGRGQASTGRVLLPTGNQRAELTLGLRAPPTLLSTSSGGKSTITRVNSPGTLARLGSVTHVTSFSHAPPSSRGGCSIKMEAEPAEPLAAAVEAANGAEQTRVNKAPEGRSPLSAEELMTIEDEGVLDKMLDQSTDFEERKLIRAALRELRQRKRDQRDKERERRLQEARGRPGEGRGNTATETTTRHSQRAADGSAVSTVTKTERLVHSNDGTRTARTTTVESSFVRRSENGSGSTMMQTKTFSSSSSSKKMGSIFDREDQASPRAGSLAALEKRQAEKKKELMKAQSLPKTSASQARKAMIEKLEKEGAAGSPGGPRAAVQRSTSFGVPNANSIKQMLLDWCRAKTRGYEHVDIQNFSSSWSDGMAFCALVHNFFPEAFDYGQLSPQNRRQNFEVAFSSAETHADCPQLLDTEDMVRLREPDWKMLVDCVPLVEVDDMMIMGKKPDPKCVFTYVQSLYNHLRRHELRLRGKNV

SEQ ID NO: 896 - protein, 796 aa, Homo sapiens
MAETKDVFGQEPHPVEDDLYKERTRKRRKSDRDQRFRAFPSMEQSALKEYEKLESRTRRVLSNTYQKLIQSVFLDDSIPNGVKYLINRLLALIEKPTVDPIYIALFGSTGAGKSSLINAIIQQAMFLPVSGESICTSCIVQVSSGCCVQYEAKIHLLSDQEWREELKNLTKLLHRTEELSREEADAWNRDEAVEEATWKLQMIYGNGAESKNYEELLRAKPKRKIPTSRVITLKAEEAEELSIKLDPYIRTQRRDWDGEAAEMRIWPLIKHVEVTLPKSDLIPEGVVLVDIPGTGDFNSKRDEMWKKTIDKCSVIWVISDIERVSGGQAHEDLLNESIKACQRGFCRDVALVVTKMDKLHLPEYLRERKAGNQAIQSQREAVLERNEMIKLQRTRILKEKLKRKLPADFKVLEASDLVYTVSAQEYWQQALLTEEETEIPKLREYIRKSLLDKKKRTVTKYVTEAFGLLLLTDSFNSTQNLPNEHLHMSVLRRFAEEKVELLEKAIAQCFACMEQPLQEGVRTARTSYRCILRACLVRSKGNQGFHQTLKAVCLKNGIYASRTLARIDLNEALTQPVYDQIDPVFGSIFRTGKPTGSALMPHIDAFKQSLQEKMTEIGIRSGWKYDSCKKNFLIQEISAILGGLEDHILRRKRRIYESLTASVQSDLKLCYEEAAQITGKKACERMKDAIRRGVDRQVAEGMFERAQERMQHQFQQLKTGIVEKVKGSITTMLALASSQGDGLYKELADVGSEYKEMEKLHRSLREVAENARLRKGMQEFLLRASPSKAGPPGTSL

SEQ ID NO: 897 - protein, 1590 aa, Homo sapiens
MSTPTDPGAMPHPGPSPGPGPSPGPILGPSPGPGPSPGSVHSMMGPSPGPPSVSHPMPTMGSTDFPQEGMHQMHKPIDGIHDKGIVEDIHCGSMKGTGMRPPHPGMGPPQSPMDQHSQGYMSPHPSPLGAPEHVSSPMSGGGPTPPQMPPSQPGALIPGDPQAMSQPNRGPSPFSPVQLHQLRAQILAYKMLARGQPLPETLQLAVQGKRTLPGLQQQQQQQQQQQQQQQQQQQQQQQPQQQPPQPQTQQQQQPALVNYNRPSGPGPELSGPSTPQKLPVPAPGGRPSPAPPAAAQPPAAAVPGPSVPQPAPGQPSPVLQLQQKQSRISPIQKPQGLDPVEILQEREYRLQARIAHRIQELENLPGSLPPDLRTKATVELKALRLLNFQRQLRQEVVACMRRDTTLETALNSKAYKRSKRQTLREARMTEKLEKQQKIEQERKRRQKHQEYLNSILQHAKDFKEYHRSVAGKIQKLSKAVATWHANTEREQKKETERIEKERMRRLMAEDEEGYRKLIDQKKDRRLAYLLQQTDEYVANLTNLVWEHKQAQAAKEKKKRRRRKKKAEENAEGGESALGPDGEPIDESSQMSDLPVKVTHTETGKVLFGPEAPKASQLDAWLEMNPGYEVAPRSDSEESDSDYEEEDEEEESSRQETEEKILLDPNSEEVSEKDAKQIIETAKQDVDDEYSMQYSARGSQSYYTVAHAISERVEKQSALLINGTLKHYQLQGLEWMVSLYNNNLNGILADEMGLGKTIQTIALITYLMEHKRLNGPYLIIVPLSTLSNWTYEFDKWAPSVVKISYKGTPAMRRSLVPQLRSGKFNVLLTTYEYIIKDKHILAKIRWKYMIVDEGHRMKNHHCKLTQVLNTHYVAPRRILLTGTPLQNKLPELWALLNFLLPTIFKSCSTFEQWFNAPFAMTGERVDLNEEETILIIRRLHKVLRPFLLRRLKKEVESQLPEKVEYVIKCDMSALQKILYRHMQAKGILLTDGSEKDKKGKGGAKTLMNTIMQLRKICNHPYMFQHIEESFAEHLGYSNGVINGAELYRASGKFELLDRILPKLRATNHRVLLFCQMTSLMTIMEDYFAFRNFLYLRLDGTTKSEDRAALLKKFNEPGSQYFIFLLSTRAGGLGLNLQAADTVVIFDSDWNPHQDLQAQDRAHRIGQQNEVRVLRLCTVNSVEEKILAAAKYKLNVDQKVIQAGMFDQKSSSHERRAFLQAILEHEEENEEEDEVPDDETLNQMIARREEEFDLFMRMDMDRRREDARNPKRKPRLMEEDELPSWIIKDDAEVERLTCEEEEEKIFGRGSRQRRDVDYSDALTEKQWLRAIEDGNLEEMEEEVRLKKRKRRRNVDKDPAKEDVEKAKKRRGRPPAEKLSPNPPKLTKQMNAIIDTVINYKDRCNVEKVPSNSQLEIEGNSSGRQLSEVFIQLPSRKELPEYYELIRKPVDFKKIKERIRNHKYRSLGDLEKDVMLLCHNAQTFNLEGSQIYEDSIVLQSVFKSARQKIAKEEESEDESNEEEEEEDEEESESEAKSVKVKIKLNKKDDKGRDKGKGKKRPNRGKAKPVVSDFDSDEEQDEREQSEGSGTDDE

SEQ ID NO: 898 - protein, 1572 aa, Homo sapiens
MSTPTDPGAMPHPGPSPGPGPSPGPILGPSPGPGPSPGSVHSMMGPSPGPPSVSHPMPTMGSTDFPQEGMHQMHKPIDGIHDKGIVEDIHCGSMKGTGMRPPHPGMGPPQSPMDQHSQGYMSPHPSPLGAPEHVSSPMSGGGPTPPQMPPSQPGALIPGDPQAMSQPNRGPSPFSPVQLHQLRAQILAYKMLARGQPLPETLQLAVQGKRTLPGLQQQQQQQQQQQQQQQQQQQQQQQPQQQPPQPQTQQQQQPALVNYNRPSGPGPELSGPSTPQKLPVPAPGGRPSPAPPAAAQPPAAAVPGPSVPQPAPGQPSPVLQLQQKQSRISPIQKPQGLDPVEILQEREYRLQARIAHRIQELENLPGSLPPDLRTKATVELKALRLLNFQRQLRQEVVACMRRDTTLETALNSKAYKRSKRQTLREARMTEKLEKQQKIEQERKRRQKHQEYLNSILQHAKDFKEYHRSVAGKIQKLSKAVATWHANTEREQKKETERIEKERMRRLMAEDEEGYRKLIDQKKDRRLAYLLQQTDEYVANLTNLVWEHKQAQAAKEKKKRRRRKKKAEENAEGGESALGPDGEPIDESSQMSDLPVKVTHTETGKVLFGPEAPKASQLDAWLEMNPGYEVAPRSDSEESDSDYEEEDEEEESSRQETEEKILLDPNSEEVSEKDAKQIIETAKQDVDDEYSMQYSARGSQSYYTVAHAISERVEKQSALLINGTLKHYQLQGLEWMVSLYNNNLNGILADEMGLGKTIQTIALITYLMEHKRLNGPYLIIVPLSTLSNWTYEFDKWAPSVVKISYKGTPAMRRSLVPQLRSGKFNVLLTTYEYIIKDKHILAKIRWKYMIVDEGHRMKNHHCKLTQVLNTHYVAPRRILLTGTPLQNKLPELWALLNFLLPTIFKSCSTFEQWFNAPFAMTGERVDLNEEETILIIRRLHKVLRPFLLRRLKKEVESQLPEKVEYVIKCDMSALQKILYRHMQAKGILLTDGSEKDKKGKGGAKTLMNTIMQLRKICNHPYMFQHIEESFAEHLGYSNGVINGAELYRASGKFELLDRILPKLRATNHRVLLFCQMTSLMTIMEDYFAFRNFLYLRLDGTTKSEDRAALLKKFNEPGSQYFIFLLSTRAGGLGLNLQAADTVVIFDSDWNPHQDLQAQDRAHRIGQQNEVRVLRLCTVNSVEEKILAAAKYKLNVDQKVIQAGMFDQKSSSHERRAFLQAILEHEEENEEEDEVPDDETLNQMIARREEEFDLFMRMDMDRRREDARNPKRKPRLMEEDELPSWIIKDDAEVERLTCEEEEEKIFGRGSRQRRDVDYSDALTEKQWLRAIEDGNLEEMEEEVRLKKRKRRRNVDKDPAKEDVEKAKKRRGRPPAEKLSPNPPKLTKQMNAIIDTVINYKDSSGRQLSEVFIQLPSRKELPEYYELIRKPVDFKKIKERIRNHKYRSLGDLEKDVMLLCHNAQTFNLEGSQIYEDSIVLQSVFKSARQKIAKEEESEDESNEEEEEEDEEESESEAKSVKVKIKLNKKDDKGRDKGKGKKRPNRGKAKPVVSDFDSDEEQDEREQSEGSGTDDE

SEQ ID NO: 899 - protein, 301 aa, Homo sapiens
MARHGLPLLPLLSLLVGAWLKLGNGQATSMVQLQGGRFLMGTNSPDSRDGDGPVREATVKPFAIDIFPVTNKDFRDFVREKKYRTEAEMFGWSFVFEDFVSDELRNKATQPMKSVLWWLPVEKAFWRQPAGPGSGIRERLEHPVLHVSWNDARAYCAWRGKRLPTEEEWEFAARGGLKGQVYPWGNWFQPNRTNLWQGKFPKGDKAEDGFHGVSPVNAFPAQNNYGLYDLLGNVWEWTASPYQAAEQDMRVLRGASWIDTADGSANHRARVTTRMGNTPDSASDNLGFRCAADAGRPPGEL

SEQ ID NO: 900 - protein, 213 aa, Homo sapiens
MFGWSFVFEDFVSDELRNKATQPMKSVLWWLPVEKAFWRQPAGPGSGIRERLEHPVLHVSWNDARAYCAWRGKRLPTEEEWEFAARGGLKGQVYPWGNWFQPNRTNLWQGKFPKGDKAEDGFHGVSPVNAFPAQNNYGLYDLLGNVWEWTASPYQAAEQDMRVLRGASWIDTADGSANHRARVTTRMGNTPDSASDNLGFRCAADAGRPPGEL

SEQ ID NO: 901 - protein, 339 aa, Homo sapiens
MARHGLPLLPLLSLLVGAWLKLGNGQATSMVQLQGGRFLMGTNSPDSRDGDGPVREATVKPFAIDIFPVTNKDFRDFVREKKYRTEAEMFGWSFVFEDFVSDELRNKATQPMKSVLWWLPVEKAFWRQPAGPGSGIRERLEHPVLHVSWNDARAYCAWRGKRLPTEEEWEFAARGGLKGQVYPWGNWFQPNRTNLWQGKFPKGDKAEDGFHGVSPVNAFPAQNNYGWATLQIQPQTTSVSAVLQTQAGRQGSCKQPGGDKEKSLLGSLSFPGHVANSAIPSSRASASGKNFPFPVSHPSVAGASHQGRRGLSLLCFGEGAQCVLTMAGGQVFLLEAKYY

SEQ ID NO: 902 - protein, 217 aa, Homo sapiens
MARHGLPLLPLLSLLVGAWLKLGNGQATSMVQLQGGRFLMGTNSPDSRDGDGPVREATVKPFAIDIFPVTNKDFRDFVREKKYRTEAEMFGWSFVFEDFVSDELRNKATQPMKGKFPKGDKAEDGFHGVSPVNAFPAQNNYGLYDLLGNVWEWTASPYQAAEQDMRVLRGASWIDTADGSANHRARVTTRMGNTPDSASDNLGFRCAADAGRPPGEL

SEQ ID NO: 903 - protein, 321 aa, Homo sapiens
MARHGLPLLPLLSLLVGAWLKLGNGQATSMVQLQGGRFLMGTNSPDSRDGDGPVREATVKPFAIDIFPVTNKDFRDFVREKKYRTEAEMFGWSFVFEDFVSDELRNKATQPMKVKFTHGGTGSSQTAPTCGRESSPRETKLRMASMESPQMLSPPRTTTGSMTSWGTCGSGQHHRTRLLSRTCASSGGHPGSTQLMALPITGPGSPPGWATLQIQPQTTSVSAVLQTQAGRQGSCKQPGGDKEKSLLGSLSFPGHVANSAIPSSRASASGKNFPFPVSHPSVAGASHQGRRGLSLLCFGEGAQCVLTMAGGQVFLLEAKYY

SEQ ID NO: 904 - protein, 134 aa, Homo sapiens
MIFSMLRKLPKVTCRDVLPEIRAICIEEIGCWMQSYSTSFLTDSYLKYIGWTLHDKHREVRVKCVKALKGLYGNRDLTARLELFTGCFKDWMVSMIMDREYSVAVEAVRLLILILKNMEGVLMDVDCESVYPIV

SEQ ID NO: 905 - protein, 116 aa, Homo sapiens
MIFSMLRKLPKVTCRDVLPEIRAICIEEIGCWMQSYSTSFLTDSYLKYIGWTLHDKHREVRVKCVKALKGLYGNRDLTARLELFTGCFKDWMVSMIMDREYSVAVEAVRLLILILK

SEQ ID NO: 906 - protein, 926 aa, Homo sapiens
MKKTRSTTLRRAWPSSDFSDRASDRMRSRSEKDYRLHKRFPAAFAPQASRGYMTSGDVSPISMSPISQSQFIPLGEILCLAISAMNSARKPVTQEALMEHLTTCFPGVPTPSQEILRHTLNTLVRERKIYPTPDGYFIVTPQTYFITPSLIRTNSKWYHLDERIPDRSQCTSPQPGTITPSASGCVRERTLPRNHCDSCHCCREDVHSTHAPTLQRKSAKDCKDPYCPPSLCQVPPTEKSKSTVNFSYKTETLSKPKDSEKQSKKFGLKLFRLSFKKDKTKQLANFSAQFPPEEWPLRDEDTPATIPREVEMEIIRRINPDLTVENVMRHTALMKKLEEEKAQRSKAGSSAHHSGRSKKSRTHRKSHGKSRSHSKTRVSKGDPSDGSHLDIPAEREYDFCDPLTRVPREGCFIIEHKGDNFIMHSNTNVLESHFPMTPEWDVSGELAKRRTEMPFPEPSRGSSHSKVHRSHSHTQDRRSRNERSNKAKERSRSMDNSKGPLGASSLGTPEDLAEGCSQDDQTPSQSYIDDSTLRPAQTVSLQRAHISSTSYKEVCIPEIVSGSKEPSSACSLLEPGKPPESLPSYGELNSCPTKTATDDYFQCNTSSETVLTAPSPLGKNKEDHDTLTLAEGVKKLSPSDRQVPHSSREPVGHKEESPKGPGGGPAASGGVAEGIANGRLVQHHGAEPSSLDKRKEIFSKDTLFKPLHSTLSVNSYHKSSLSLLKSHPKTPADTLPGRCEKLEPSLGTSAAQAMPASQRQQESGGNQEASFDYYNVSDDDDSEEGANKNTEEEKNREDVGTMQWLLEREKERDLQRKFEKNLTLLAPKETDSSSNQRATHSARLDSMDSSSITVDSGFNSPRTRESLASNTSSIVESNRRQNPALSPAHGGAGPAFNFRASAEPPTNEAEKLQKPSNCLQASVTSV

SEQ ID NO: 907 - protein, 863 aa, Homo sapiens
MKKTRSTTLRRAWPSSDFSDRASDRMRSRSEKDYRLHKRFPAAFAPQASRGYMTSGDVSPISMSPISQSQFIPLGEILCLAISAMNSARKPVTQEALMEHLTTCFPGVPTPSQEILRHTLNTLVRERKIYPTPDGYFIVTPQTYFITPSLIRTNSKWYHLDERIPDRSQCTSPQPGTITPSASGCVRERTLPRNHCDSCHCCREDVHSTHAPTLQRKSAKDCKDPYCPPSLCQVPPTEKSKSTVNFSYKTETLSKPKDSEKQSKKFGLKLFRLSFKKDKTKQLANFSAQFPPEEWPLRDEDTPATIPREVEMEIIRRINPDLTVENVMRHTALMKKLEEEKAQRSKAGSSAHHSGRSKKSRTHRKSHGKSRSHSKTRVSKGDPSDGSHLDIPAEREYDFCDPLTRVPREGCFIIEHKGDNFIMHSNTNVLESHFPMTPEWDVSGELAKRRTEMPFPEPSRGSSHSKVHRSHSHTQDRRSRNERSNKAKERSRSMDNSKGPLGASSLGTPEDLAEGCSQDDQTPSQSYIDDSTLRPAQTVSLQRAHISSTSYKEVCIPEIVSGSKEPSSACSLLEPGKPPESLPSYGELNSCPTKTATDDYFQCNTSSETVLTAPSPLGKNKEDHDTLTLAEGVKKLSPSDRQVPHSSREPVGHKEESPKGPGGGPAASGGVAEGIANGRLVQHHGAEPSSLDKRKEIFSKDTLFKPLHSTLSVNSYHKSSLSLLKSHPKTPADTLPGRCEKLEPSLGTSAAQAMPASQRQQESGGNQEASFDYYNVSDDDDSEEGANKNTEEEKNREDVGTMQWLLEREKERDLQRKFEKNLTLLAPKETDSSSNQRATHSARLDSMDSSSITVDSGFNSPRN

SEQ ID NO: 908 - protein, 717 aa, Homo sapiens
MSRRSQRLTRYSQGDDDGSSSSGGSSVAGSQSTLFKDSPLRTLKRKSSNMKRLSPAPQLGPSSDAHTSYYSESLVHESWFPPRSSLEELHGDANWGEDLRVRRRRGTGGSESSRASGLVGRKATEDFLGSSSGYSSEDDYVGYSDVDQQSSSSRLRSAVSRAGSLLWMVATSPGRLFRLLYWWAGTTWYRLTTAASLLDVFVLTRRFSSLKTFLWFLLPLLLLTCLTYGAWYFYPYGLQTFHPALVSWWAAKDSRRPDEGWEARDSSPHFQAEQRVMSRVHSLERRLEALAAEFSSNWQKEAMRLERLELRQGAPGQGGGGGLSHEDTLALLEGLVSRREAALKEDFRRETAARIQEELSALRAEHQQDSEDLFKKIVRASQESEARIQQLKSEWQSMTQESFQESSVKELRRLEDQLAGLQQELAALALKQSSVAEEVGLLPQQIQAVRDDVESQFPAWISQFLARGGGGRVGLLQREEMQAQLRELESKILTHVAEMQGKSAREAAASLSLTLQKEGVIGVTEEQVHHIVKQALQRYSEDRIGLADYALESGGASVISTRCSETYETKTALLSLFGIPLWYHSQSPRVILQPDVHPGNCWAFQGPQGFAVVRLSARIRPTAVTLEHVPKALSPNSTISSAPKDFAIFGFDEDLQQEGTLLGKFTYDQDGEPIQTFHFQAPTMATYQVVELRILTNWGHPEYTCIYRFRVHGEPAH

SEQ ID NO: 909 - protein, 738 aa, Homo sapiens
MSRRSQRLTRYSQGDDDGSSSSGGSSVAGSQSTLFKDSPLRTLKRKSSNMKRLSPAPQLGPSSDAHTSYYSESLVHESWFPPRSSLEELHGDANWGEDLRVRRRRGTGGSESSRASGLVGRKATEDFLGSSSGYSSEDDYVEDSEGRGSKVTETEPVSSFPAGYSDVDQQSSSSRLRSAVSRAGSLLWMVATSPGRLFRLLYWWAGTTWYRLTTAASLLDVFVLTRRFSSLKTFLWFLLPLLLLTCLTYGAWYFYPYGLQTFHPALVSWWAAKDSRRPDEGWEARDSSPHFQAEQRVMSRVHSLERRLEALAAEFSSNWQKEAMRLERLELRQGAPGQGGGGGLSHEDTLALLEGLVSRREAALKEDFRRETAARIQEELSALRAEHQQDSEDLFKKIVRASQESEARIQQLKSEWQSMTQESFQESSVKELRRLEDQLAGLQQELAALALKQSSVAEEVGLLPQQIQAVRDDVESQFPAWISQFLARGGGGRVGLLQREEMQAQLRELESKILTHVAEMQGKSAREAAASLSLTLQKEGVIGVTEEQVHHIVKQALQRYSEDRIGLADYALESGGASVISTRCSETYETKTALLSLFGIPLWYHSQSPRVILQPDVHPGNCWAFQGPQGFAVVRLSARIRPTAVTLEHVPKALSPNSTISSAPKDFAIFGFDEDLQQEGTLLGKFTYDQDGEPIQTFHFQAPTMATYQVVELRILTNWGHPEYTCIYRFRVHGEPAH

SEQ ID NO: 910 - protein, 713 aa, Homo sapiens
MSRRSQRLTRYSQGDDDGSSSSGGSSVAGSQSTLFKDSPLRTLKRKSSNMKRLSPAPQLGPSSDAHTSYYSESLVHESWFPPRSSLEELHGDANWGEDLRVRRRRGTGGSESSRASGLVGRKATEDFLGSSSGYSSEDDYVGYSDVDQQSSSSRLRSAVSRAGSLLWMVATSPGRLFRLLYWWAGTTWYRLTTAASLLDVFVLTRRFSSLKTFLWFLLPLLLLTCLTYGAWYFYPYGLQTFHPALVSWWAAKDSRRPDEGWEARDSSPHFQAEQRVMSRVHSLERRLEALAAEFSSNWQKEAMRLERLELRQGAPGQGGGGGLSHEDTLALLEGLVSRREAALKEDFRRETAARIQEELSALRAEHQQDSEDLFKKIVRASQESEARIQQLKSEWQSMTQESFQESSVKELRRLEDQLAGLQQELAALALKQSSVAEEVGLLPQQIQAVRDDVESQFPAWISQFLARGGGGRVGLLQREEMQAQLRELESKILTHVAEMQGKSAREAAASLSLTLQKEGVIGVTEEQVHHIVKQALQRYSEDRIGLADYALESGGASVISTRCSETYETKTALLSLFGIPLWYHSQSPRVILQPDVHPGNCWAFQGPQGFAVVRLSARIRPTAVTLEHVPKALSPNSTISSAPKDFAIFGFDEDLQQEGTLLGKFTYDQDGEPIQTFHFQAPSSFPLCPWRLLPILGVCIYVAYHGGLGSWER

SEQ ID NO: 911 - protein, 411 aa, Homo sapiens
MTEMSEKENEPDDAATHSPPGTVSALQETKLQRFKRSLSLKTILRSKSLENFFLRSGSELKCPTEVLLTPPTPLPPPSPPPTASDRGLATPSPSPCPVPRPLAALKPVRLHSFQEHVFKRASPCELCHQLIVGNSKQGLRCKMCKVSVHLWCSEEISHQQCPGKTSTSFRRNFSSPLLVHEPPPVCATSKESPPTGDSGKVDPVYETLRYGTSLALMNRSSFSSTSESPTRSLSERDELTEDGEGSIRSSEEGPGDSASPVFTAPAESEGPGPEEKSPGQQLPKATLRKDVGPMYSYVALYKFLPQENNDLALQPGDRIMLVDDSNEDWWKGKIGDRVGFFPANFVQRVRPGENVWRCCQPFSGNKEQGYMSLKENQICVGVGRSKDADGFIRVSSGKKRGLVPVDALTEI

SEQ ID NO: 912 - protein, 269 aa, Homo sapiens
MCKVSVHLWCSEEISHQQCPGKTSTSFRRNFSSPLLVHEPPPVCATSKESPPTGDSGKVDPVYETLRYGTSLALMNRSSFSSTSESPTRSLSERDELTEDGEGSIRSSEEGPGDSASPVFTAPAESEGPGPEEKSPGQQLPKATLRKDVGPMYSYVALYKFLPQENNDLALQPGDRIMLVDDSNEDWWKGKIGDRVGFFPANFVQRVRPGENVWRCCQPFSGNKEQGYMSLKENQICVGVGRSKDADGFIRVSSGKKRGLVPVDALTEI

SEQ ID NO: 913 - protein, 463 aa, Homo sapiens
MAASMFYGRLVAVATLRNHRPRTAQRAAAQVLGSSGLFNNHGLQVQQQQQRNLSLHEYMSMELLQEAGVSVPKGYVAKSPDEAYAIAKKLGSKDVVIKAQVLAGGRGKGTFESGLKGGVKIVFSPEEAKAVSSQMIGKKLFTKQTGEKGRICNQVLVCERKYPRREYYFAITMERSFQGPVLIGSSHGGVNIEDVAAESPEAIIKEPIDIEEGIKKEQALQLAQKMGFPPNIVESAAENMVKLYSLFLKYDATMIEINPMVEDSDGAVLCMDAKINFDSNSAYRQKKIFDLQDWTQEDERDKDAAKANLNYIGLDGNIGCLVNGAGLAMATMDIIKLHGGTPANFLDVGGGATVHQVTEAFKLITSDKKVLAILVNIFGGIMRCDVIAQGIVMAVKDLEIKIPVVVRLQGTRVDDAKALIADSGLKILACDDLDEAARMVVKLSEIVTLAKQAHVDVKFQLPI

SEQ ID NO: 914 - protein, 441 aa, Homo sapiens
MAASMFYGRLVAVATLRNHRPRTAQQQQRNLSLHEYMSMELLQEAGVSVPKGYVAKSPDEAYAIAKKLGSKDVVIKAQVLAGGRGKGTFESGLKGGVKIVFSPEEAKAVSSQMIGKKLFTKQTGEKGRICNQVLVCERKYPRREYYFAITMERSFQGPVLIGSSHGGVNIEDVAAESPEAIIKEPIDIEEGIKKEQALQLAQKMGFPPNIVESAAENMVKLYSLFLKYDATMIEINPMVEDSDGAVLCMDAKINFDSNSAYRQKKIFDLQDWTQEDERDKDAAKANLNYIGLDGNIGCLVNGAGLAMATMDIIKLHGGTPANFLDVGGGATVHQVTEAFKLITSDKKVLAILVNIFGGIMRCDVIAQGIVMAVKDLEIKIPVVVRLQGTRVDDAKALIADSGLKILACDDLDEAARMVVKLSEIVTLAKQAHVDVKFQLPI

SEQ ID NO: 915 - protein, 160 aa, Homo sapiens
MACIYPTTFYTSLPTKSLNMGISLTTILILSVAVLLSTAAPPSCRECYQSLHYRGEMQQYFTYHTHIERSCYGNLIEECVESGKSYYKVKNLGVCGSRNGAICPRGKQWLCFTKIGQWGVNTQVLEDIKREQIIAKAKASKPTTPPENRPRHFHSFIQKL

SEQ ID NO: 916 - protein, 667 aa, Homo sapiens
MSSQPAGNQTSPGATEDYSYGSWYIDEPQGGEELQPEGEVPSCHTSIPPGLYHACLASLSILVLLLLAMLVRRRQLWPDCVRGRPGLPSPVDFLAGDRPRAVPAAVFMVLLSSLCLLLPDEDALPFLTLASAPSQDGKTEAPRGAWKILGLFYYAALYYPLAACATAGHTAAHLLGSTLSWAHLGVQVWQRAECPQVPKIYKYYSLLASLPLLLGLGFLSLWYPVQLVRSFSRRTGAGSKGLQSSYSEEYLRNLLCRKKLGSSYHTSKHGFLSWARVCLRHCIYTPQPGFHLPLKLVLSATLTGTAIYQVALLLLVGVVPTIQKVRAGVTTDVSYLLAGFGIVLSEDKQEVVELVKHHLWALEVCYISALVLSCLLTFLVLMRSLVTHRTNLRALHRGAALDLSPLHRSPHPSRQAIFCWMSFSAYQTAFICLGLLVQQIIFFLGTTALAFLVLMPVLHGRNLLLFRSLESSWPFWLTLALAVILQNMAAHWVFLETHDGHPQLTNRRVLYAATFLLFPLNVLVGAMVATWRVLLSALYNAIHLGQMDLSLLPPRAATLDPGYYTYRNFLKIEVSQSHPAMTAFCSLLLQAQSLLPRTMAAPQDSLRPGEEDEGMQLLQTKDSMAKGARPGASRGRARWGLAYTLLHNPTLQVFRKTALLGANGAQP

SEQ ID NO: 917 - protein, 159 aa, Homo sapiens
MSSQPAGNQTSPGATEDYSYGSWYIDEPQGGEELQPEGEVPSCHTSIPPGLYHACLASLSILVLLLLAMLVRRRQLWPDCVRGRPGLPSPVDFLAGDRPRAVPAAVFMVLLSSLCLLLPDEDALPFLTLASAPSQDGKTEAPRGNLPKITELRLVRAWI

SEQ ID NO: 918 - protein, 658 aa, Homo sapiens
MSSQPAGNQTSPGATEDYSYGSWYIDEPQGGEELQPEGEVPSCHTSIPPGLYHACLASLSILVLLLLAMLVRRRQLWPDCVRGRPGLPRPRAVPAAVFMVLLSSLCLLLPDEDALPFLTLASAPSQDGKTEAPRGAWKILGLFYYAALYYPLAACATAGHTAAHLLGSTLSWAHLGVQVWQRAECPQVPKIYKYYSLLASLPLLLGLGFLSLWYPVQLVRSFSRRTGAGSKGLQSSYSEEYLRNLLCRKKLGSSYHTSKHGFLSWARVCLRHCIYTPQPGFHLPLKLVLSATLTGTAIYQVALLLLVGVVPTIQKVRAGVTTDVSYLLAGFGIVLSEDKQEVVELVKHHLWALEVCYISALVLSCLLTFLVLMRSLVTHRTNLRALHRGAALDLSPLHRSPHPSRQAIFCWMSFSAYQTAFICLGLLVQQIIFFLGTTALAFLVLMPVLHGRNLLLFRSLESSWPFWLTLALAVILQNMAAHWVFLETHDGHPQLTNRRVLYAATFLLFPLNVLVGAMVATWRVLLSALYNAIHLGQMDLSLLPPRAATLDPGYYTYRNFLKIEVSQSHPAMTAFCSLLLQAQSLLPRTMAAPQDSLRPGEEDEGMQLLQTKDSMAKGARPGASRGRARWGLAYTLLHNPTLQVFRKTALLGANGAQP

SEQ ID NO: 919 - protein, 706 aa, Homo sapiens
MGGKGGGDTRGPVLFPCQLAQALSPRRAFPRELKEKGQRMSSQPAGNQTSPGATEDYSYGSWYIDEPQGGEELQPEGEVPSCHTSIPPGLYHACLASLSILVLLLLAMLVRRRQLWPDCVRGRPGLPSPVDFLAGDRPRAVPAAVFMVLLSSLCLLLPDEDALPFLTLASAPSQDGKTEAPRGAWKILGLFYYAALYYPLAACATAGHTAAHLLGSTLSWAHLGVQVWQRAECPQVPKIYKYYSLLASLPLLLGLGFLSLWYPVQLVRSFSRRTGAGSKGLQSSYSEEYLRNLLCRKKLGSSYHTSKHGFLSWARVCLRHCIYTPQPGFHLPLKLVLSATLTGTAIYQVALLLLVGVVPTIQKVRAGVTTDVSYLLAGFGIVLSEDKQEVVELVKHHLWALEVCYISALVLSCLLTFLVLMRSLVTHRTNLRALHRGAALDLSPLHRSPHPSRQAIFCWMSFSAYQTAFICLGLLVQQIIFFLGTTALAFLVLMPVLHGRNLLLFRSLESSWPFWLTLALAVILQNMAAHWVFLETHDGHPQLTNRRVLYAATFLLFPLNVLVGAMVATWRVLLSALYNAIHLGQMDLSLLPPRAATLDPGYYTYRNFLKIEVSQSHPAMTAFCSLLLQAQSLLPRTMAAPQDSLRPGEEDEGMQLLQTKDSMAKGARPGASRGRARWGLAYTLLHNPTLQVFRKTALLGANGAQP

SEQ ID NO: 920 - protein, 704 aa, Homo sapiens
MQIRLLRAELVVPLWQFIRQWPPGSDGWGQMEEKGQRMSSQPAGNQTSPGATEDYSYGSWYIDEPQGGEELQPEGEVPSCHTSIPPGLYHACLASLSILVLLLLAMLVRRRQLWPDCVRGRPGLPSPVDFLAGDRPRAVPAAVFMVLLSSLCLLLPDEDALPFLTLASAPSQDGKTEAPRGAWKILGLFYYAALYYPLAACATAGHTAAHLLGSTLSWAHLGVQVWQRAECPQVPKIYKYYSLLASLPLLLGLGFLSLWYPVQLVRSFSRRTGAGSKGLQSSYSEEYLRNLLCRKKLGSSYHTSKHGFLSWARVCLRHCIYTPQPGFHLPLKLVLSATLTGTAIYQVALLLLVGVVPTIQKVRAGVTTDVSYLLAGFGIVLSEDKQEVVELVKHHLWALEVCYISALVLSCLLTFLVLMRSLVTHRTNLRALHRGAALDLSPLHRSPHPSRQAIFCWMSFSAYQTAFICLGLLVQQIIFFLGTTALAFLVLMPVLHGRNLLLFRSLESSWPFWLTLALAVILQNMAAHWVFLETHDGHPQLTNRRVLYAATFLLFPLNVLVGAMVATWRVLLSALYNAIHLGQMDLSLLPPRAATLDPGYYTYRNFLKIEVSQSHPAMTAFCSLLLQAQSLLPRTMAAPQDSLRPGEEDEGMQLLQTKDSMAKGARPGASRGRARWGLAYTLLHNPTLQVFRKTALLGANGAQP

SEQ ID NO: 921 - protein, 682 aa, Homo sapiens
MDSQGDWAAQEKGQRMSSQPAGNQTSPGATEDYSYGSWYIDEPQGGEELQPEGEVPSCHTSIPPGLYHACLASLSILVLLLLAMLVRRRQLWPDCVRGRPGLPSPVDFLAGDRPRAVPAAVFMVLLSSLCLLLPDEDALPFLTLASAPSQDGKTEAPRGAWKILGLFYYAALYYPLAACATAGHTAAHLLGSTLSWAHLGVQVWQRAECPQVPKIYKYYSLLASLPLLLGLGFLSLWYPVQLVRSFSRRTGAGSKGLQSSYSEEYLRNLLCRKKLGSSYHTSKHGFLSWARVCLRHCIYTPQPGFHLPLKLVLSATLTGTAIYQVALLLLVGVVPTIQKVRAGVTTDVSYLLAGFGIVLSEDKQEVVELVKHHLWALEVCYISALVLSCLLTFLVLMRSLVTHRTNLRALHRGAALDLSPLHRSPHPSRQAIFCWMSFSAYQTAFICLGLLVQQIIFFLGTTALAFLVLMPVLHGRNLLLFRSLESSWPFWLTLALAVILQNMAAHWVFLETHDGHPQLTNRRVLYAATFLLFPLNVLVGAMVATWRVLLSALYNAIHLGQMDLSLLPPRAATLDPGYYTYRNFLKIEVSQSHPAMTAFCSLLLQAQSLLPRTMAAPQDSLRPGEEDEGMQLLQTKDSMAKGARPGASRGRARWGLAYTLLHNPTLQVFRKTALLGANGAQP

SEQ ID NO: 922 - protein, 787 aa, Homo sapiens
MAVWIQAQQLQGEALHQMQALYGQHFPIEVRHYLSQWIESQAWDSVDLDNPQENIKATQLLEGLVQELQKKAEHQVGEDGFLLKIKLGHYATQLQNTYDRCPMELVRCIRHILYNEQRLVREANNGSSPAGSLADAMSQKHLQINQTFEELRLVTQDTENELKKLQQTQEYFIIQYQESLRIQAQFGPLAQLSPQERLSRETALQQKQVSLEAWLQREAQTLQQYRVELAEKHQKTLQLLRKQQTIILDDELIQWKRRQQLAGNGGPPEGSLDVLQSWCEKLAEIIWQNRQQIRRAEHLCQQLPIPGPVEEMLAEVNATITDIISALVTSTFIIEKQPPQVLKTQTKFAATVRLLVGGKLNVHMNPPQVKATIISEQQAKSLLKNENTRNDYSGEILNNCCVMEYHQATGTLSAHFRNMSLKRIKRSDRRGAESVTEEKFTILFESQFSVGGNELVFQVKTLSLPVVVIVHGSQDNNATATVLWDNAFAEPGRVPFAVPDKVLWPQLCEALNMKFKAEVQSNRGLTKENLVFLAQKLFNNSSSHLEDYSGLSVSWSQFNRENLPGRNYTFWQWFDGVMEVLKKHLKPHWNDGAILGFVNKQQAHDLLINKPDGTFLLRFSDSEIGGITIAWKFDSQERMFWNLMPFTTRDFSIRSLADRLGDLNYLIYVFPDRPKDEVYSKYYTPVPCESATAKAVDGYVKPQIKQVVPEFVNASADAGGGSATYMDQAPSPAVCPQAHYNMYPQNPDSVLDTDGDFDLEDTMDVARRVEELLGRPMDSQWIPHAQS

SEQ ID NO: 923 - protein, 263 aa, Homo sapiens
MGQTALAGGSSSTPTPQALYPDLSCPEGLEELLSAPPPDLGAQRRHGWNPKDCSENIEVKEGGLYFERRPVAQSTDGARGKRGYSRGLHAWEISWPLEQRGTHAVVGVATALAPLQTDHYAALLGSNSESWGWDIGRGKLYHQSKGPGAPQYPAGTQGEQLEVPERLLVVLDMEEGTLGYAIGGTYLGPAFRGLKGRTLYPAVSAVWGQCQVRIRYLGERRAEPHSLLHLSRLCVRHNLGDTRLGQVSALPLPPAMKRYLLYQ

SEQ ID NO: 924 - protein, 267 aa, Homo sapiens
MGQTALAGGSSSTPTPQALYPDLSCPEGLEELLSAPPPDLGAQRRHGWNPKDCSENIEVKEGGLYFERRPVAQSTDGARGKRGYSRGLHAWEISWPLEQRGTHAVVGVATALAPLQTDHYAALLGSNSESWGWDIGRGKLYHQSKGPGAPQYPAGTQGEQLEVPERLLVVLDMEEGTLGYAIGGTYLGPAFRGLKGRTLYPAVSAVWGQCQVRIRYLGERRGEAWGRRGENFLSLVAVVWDGNSSDKSRGDGPSSSLPQPLFSAGKG

SEQ ID NO: 925 - protein, 370 aa, Homo sapiens
MLPRRLLAAWLAGTRGGGLLALLANQCRFVTGLRVRRAQQIAQLYGRLYSESSRRVLLGRLWRRLHGRPGHASALMAALAGVFVWDEERIQEEELQRSINEMKRLEEMSNMFQSSGVQHHPPEPKAQTEGNEDSEGKEQRWEMVMDKKHFKLWRRPITGTHLYQYRVFGTYTDVTPRQFFNVQLDTEYRKKWDALVIKLEVIERDVVSGSEVLHWVTHFPYPMYSRDYVYVRRYSVDQENNMMVLVSRAVEHPSVPESPEFVRVRSYESQMVIRPHKSFDENGFDYLLTYSDNPQTVFPRYCVSWMVSSGMPDFLEKLHMATLKAKNMEIKVKDYISAKPLEMSSEAKATSQSSERKNEGSCGPARIEYA

SEQ ID NO: 926 - protein, 89 aa, Homo sapiens
MQLQASLSFLLILTLCLELRSELARDTIKDLLPNVCAFPMEKGPCQTYMTRWFFNFETGECELFAYGGCGGNSNNFLRKEKCEKFCKFT

SEQ ID NO: 927 - protein, 822 aa, Homo sapiens
MKPALLPWALLLLATALGPGPGPTADAQESCSMRCGALDGPCSCHPTCSGLGTCCLDFRDFCLEILPYSGSMMGGKDFVVRHFKMSSPTDASVICRFKDSIQTLGHVDSSGQVHCVSPLLYESGRIPFTVSLDNGHSFPRAGTWLAVHPNKVSMMEKSELVNETRWQYYGTANTSGNLSLTWHVKSLPTQTITIELWGYEETGMPYSQEWTAKWSYLYPLATHIPNSGSFTFTPKPAPPSYQRWRVGALRIIDSKNYAGQKDVQALWTNDHALAWHLSDDFREDPVAWARTQCQAWEELEDQLPNFLEELPDCPCTLTQARADSGRFFTDYGCDMEQGSVCTYHPGAVHCVRSVQASLRYGSGQQCCYTADGTQLLTADSSGGSTPDRGHDWGAPPFRTPPRVPSMSHWLYDVLSFYYCCLWAPDCPRYMQRRPSNDCRNYRPPRLASAFGDPHFVTFDGTNFTFNGRGEYVLLEAALTDLRVQARAQPGTMSNGTETRGTGLTAVAVQEGNSDVVEVRLANRTGGLEVLLNQEVLSFTEQSWMDLKGMFLSVAAGDRVSIMLASGAGLEVSVQGPFLSVSVLLPEKFLTHTHGLLGTLNNDPTDDFTLHSGRVLPPGTSPQELFLFGANWTVHNASSLLTYDSWFLVHNFLYQPKHDPTFEPLFPSETTLNPSLAQEAAKLCGDDHFCNFDVAATGSLSTGTATRVAHQLHQRRMQSLQPVVSCGWLAPPPNGQKEGNRYLAGSTIYFHCDNGYSLAGAETSTCQADGTWSSPTPKCQPGRSYAVLLGIIFGGLAVVAAVALVYVLLRRRKGNTHVWGAQP

SEQ ID NO: 928 - protein, 756 aa, Homo sapiens
MAQAAGPAGGGEPRTEAVGGEGPREPGAAGGAAGGSRDALSLEEILRLYNQPINEEQAWAVCYQCCGSLRAAARRRQPRHRVRSAAQIRVWRDGAVTLAPAADDAGEPPPVAGKLGYSQCMETEVIESLGIIIYKALDYGLKENEERELSPPLEQLIDHMANTVEADGSNDEGYEAAEEGLGDEDEKRKISAIRSYRDVMKLCAAHLPTESDAPNHYQAVCRALFAETMELHTFLTKIKSAKENLKKIQEMEKSDESSTDLEELKNADWARFWVQVMRDLRNGVKLKKVQERQYNPLPIEYQLTPYEMLMDDIRCKRYTLRKVMVNGDIPPRLKKSAHEIILDFIRSRPPLNPVSARKLKPTPPRPRSLHERILEEIKAERKLRPVSPEEIRRSRLAMRPLSMSYSFDLSDVTTPESTKNLVESSMVNGGLTSQTKENGLSTSQQVPAQRKKLLRAPTLAELDSSESEEETLHKSTSSSSVSPSFPEEPVLEAVSTRKKPPKFLPISSTPQPERRQPPQRRHSIEKETPTNVRQFLPPSRQSSRSLEEFCYPVECLALTVEEVMHIRQVLVKAELEKYQQYKDIYTALKKGKLCFCCRTRRFSFFTWSYTCQFCKRPVCSQCCKKMRLPSKPYSTLPIFSLGPSALQRGESSMRSEKPSTAHHRPLRSIARFSSKSKSMDKSDEELQFPKELMEDWSTMEVCVDCKKFISEIISSSRRSLVLANKRARLKRKTQSFYMSSPGPSEYCPSERTISEI

SEQ ID NO: 929 - protein, 622 aa, Homo sapiens
METEVIESLGIIIYKALDYGLKENEERELSPPLEQLIDHMANTVEADGSNDEGYEAAEEGLGDEDEKRKISAIRSYRDVMKLCAAHLPTESDAPNHYQAVCRALFAETMELHTFLTKIKSAKENLKKIQEMEKSDESSTDLEELKNADWARFWVQVMRDLRNGVKLKKVQERQYNPLPIEYQLTPYEMLMDDIRCKRYTLRKVMVNGDIPPRLKKSAHEIILDFIRSRPPLNPVSARKLKPTPPRPRSLHERILEEIKAERKLRPVSPEEIRRSRLDVTTPESTKNLVESSMVNGGLTSQTKENGLSTSQQVPAQRKKLLRAPTLAELDSSESEEETLHKSTSSSSVSPSFPEEPVLEAVSTRKKPPKFLPISSTPQPERRQPPQRRHSIEKETPTNVRQFLPPSRQSSRSLEEFCYPVECLALTVEEVMHIRQVLVKAELEKYQQYKDIYTALKKGKLCFCCRTRRFSFFTWSYTCQFCKRPVCSQCCKKMRLPSKPYSTLPIFSLGPSALQRGESSMRSEKPSTAHHRPLRSIARFSSKSKSMDKSDEELQFPKELMEDWSTMEVCVDCKKFISEIISSSRRSLVLANKRARLKRKTQSFYMSSPGPSEYCPSERTISEI

SEQ ID NO: 930 - protein, 742 aa, Homo sapiens
MAQAAGPAGGGEPRTEAVGGEGPREPGAAGGAAGGSRDALSLEEILRLYNQPINEEQAWAVCYQCCGSLRAAARRRQPRHRVRSAAQIRVWRDGAVTLAPAADDAGEPPPVAGKLGYSQCMETEVIESLGIIIYKALDYGLKENEERELSPPLEQLIDHMANTVEADGSNDEGYEAAEEGLGDEDEKRKISAIRSYRDVMKLCAAHLPTESDAPNHYQAVCRALFAETMELHTFLTKIKSAKENLKKIQEMEKSDESSTDLEELKNADWARFWVQVMRDLRNGVKLKKVQERQYNPLPIEYQLTPYEMLMDDIRCKRYTLRKVMVNGDIPPRLKKSAHEIILDFIRSRPPLNPVSARKLKPTPPRPRSLHERILEEIKAERKLRPVSPEEIRRSRLDVTTPESTKNLVESSMVNGGLTSQTKENGLSTSQQVPAQRKKLLRAPTLAELDSSESEEETLHKSTSSSSVSPSFPEEPVLEAVSTRKKPPKFLPISSTPQPERRQPPQRRHSIEKETPTNVRQFLPPSRQSSRSLEEFCYPVECLALTVEEVMHIRQVLVKAELEKYQQYKDIYTALKKGKLCFCCRTRRFSFFTWSYTCQFCKRPVCSQCCKKMRLPSKPYSTLPIFSLGPSALQRGESSMRSEKPSTAHHRPLRSIARFSSKSKSMDKSDEELQFPKELMEDWSTMEVCVDCKKFISEIISSSRRSLVLANKRARLKRKTQSFYMSSPGPSEYCPSERTISEI

SEQ ID NO: 931 - protein, 583 aa, Homo sapiens
MANTVEADGSNDEGYEAAEEGLGDEDEKRKISAIRSYRDVMKLCAAHLPTESDAPNHYQAVCRALFAETMELHTFLTKIKSAKENLKKIQEMEKSDESSTDLEELKNADWARFWVQVMRDLRNGVKLKKVQERQYNPLPIEYQLTPYEMLMDDIRCKRYTLRKVMVNGDIPPRLKKSAHEIILDFIRSRPPLNPVSARKLKPTPPRPRSLHERILEEIKAERKLRPVSPEEIRRSRLDVTTPESTKNLVESSMVNGGLTSQTKENGLSTSQQVPAQRKKLLRAPTLAELDSSESEEETLHKSTSSSSVSPSFPEEPVLEAVSTRKKPPKFLPISSTPQPERRQPPQRRHSIEKETPTNVRQFLPPSRQSSRSLEEFCYPVECLALTVEEVMHIRQVLVKAELEKYQQYKDIYTALKKGKLCFCCRTRRFSFFTWSYTCQFCKRPVCSQCCKKMRLPSKPYSTLPIFSLGPSALQRGESSMRSEKPSTAHHRPLRSIARFSSKSKSMDKSDEELQFPKELMEDWSTMEVCVDCKKFISEIISSSRRSLVLANKRARLKRKTQSFYMSSPGPSEYCPSERTISEI

SEQ ID NO: 932 - protein, 458 aa, Homo sapiens
MANTVEADGSNDEGYEAAEEGLGDEDEKRKISAIRSYRDVMKLCAAHLPTESDAPNHYQAVCRALFAETMELHTFLTKIKSAKENLKKIQEMEKSDESSTDLEELKNADWARFWVQVMRDLRNGVKLKKVQERQYNPLPIEYQLTPYEMLMDDIRCKRYTLRKVMVNGDIPPRLKKSAHEIILDFIRSRPPLNPVSARKLKPTPPRPRSLHERILEEIKAERKLRPVSPEEIRRSRLDVTTPESTKNLVESSMVNGGLTSQTKENGLSTSQQVPAQRKKLLRAPTLAELDSSESEEETLHKSTSSSSVSPSFPEEPVLEAVSTRKKPPKFLPISSTPQPERRQPPQRRHSIEKETPTNVRQFLPPSRQSSRSLEEFCYPVECLALTVEEVMHIRQVLVKAELEKYQQYKDIYTALKKGKLCFCCRTRRFSFFTWSYTCQFCKSDCLFNGTAHCQFYLG

SEQ ID NO: 933 - protein, 130 aa, Homo sapiens
MPRPASESWSPIQSRIPAYKAVSHLRLLPTANSPSGSNQPTNPNRAQHPEGPQSREGATSPVLASLEPPTPTDLPSARARPRVPAESGPGWLHKARRPTRGILRDVLRHRGVPAQPRPAPGAHQLSSPSS

SEQ ID NO: 934 - protein, 490 aa, Homo sapiens
MYHGMNPSNGDGFLEQQQQQQQPQSPQRLLAVILWFQLALCFGPAQLTGGFDDLQVCADPGIPENGFRTPSGGVFFEGSVARFHCQDGFKLKGATKRLCLKHFNGTLGWIPSDNSICVQEDCRIPQIEDAEIHNKTYRHGEKLIITCHEGFKIRYPDLHNMVSLCRDDGTWNNLPICQGCLRPLASSNGYVNISELQTSFPVGTVISYRCFPGFKLDGSAYLECLQNLIWSSSPPRCLALEVCPLPPMVSHGDFVCHPRPCERYNHGTVVEFYCDPGYSLTSDYKYITCQYGEWFPSYQVYCIKSEQTWPSTHETLLTTWKIVAFTATSVLLVLLLVILARMFQTKFKAHFPPRGPPRSSSSDPDFVVVDGVPVMLPSYDEAVSGGLSALGPGYMASVGQGCPLPVDDQSPPAYPGSGDTDTGPGESETCDSVSGSSELLQSLYSPPRCQESTHPASDNPDIIASTAEEVASTSPGIDIADEIPLMEEDP

SEQ ID NO: 935 - protein, 490 aa, Homo sapiens
MYHGMNPSNGDGFLEQQQQQQQPQSPQRLLAVILWFQLALCFGPAQLTGGFDDLQVCADPGIPENGFRTPSGGVFFEGSVARFHCQDGFKLKGATKRLCLKHFNGTLGWIPSDNSICVQEDCRIPQIEDAEIHNKTYRHGEKLIITCHEGFKIRYPDLHNMVSLCRDDGTWNNLPICQGCLRPLASSNGYVNISELQTSFPVGTVISYRCFPGFKLDGSAYLECLQNLIWSSSPPRCLALEAQVCPLPPMVSHGDFVCHPRPCERYNHGTVVEFYCDPGYSLTSDYKYITCQYGEWFPSYQVYCIKSEQTWPSTHETLLTTWKIVAFTATSVLLVLLLVILARMFQTKFKAHFPPRGPPRSSSSDPDFVVVDGVPVMLPSYDEAVSGGLSALGPGYMASVGQGCPLPVDDQSPPAYPGSGDTDTGPGESETCDSVSGSSELLQSLYSPPRCQESTHPASDNPDIIASTAEEVASTSPGIHHAHWVLFLRN

SEQ ID NO: 936 - protein, 290 aa, Homo sapiens
MYHGMNPSNGDGFLEQQQQQQQPQSPQRLLAVILWFQLALCFGPAQLTGGFDDLQVCADPGIPENGFRTPSGGVFFEGSVARFHCQDGFKLKGATKRLCLKHFNGTLGWIPSDNSICVQEDCRIPQIEDAEIHNKTYRHGEKLIITCHEGFKIRYPDLHNMVSLCRDDGTWNNLPICQGCLRPLASSNGYVNISELQTSFPVGTVISYRCFPGFKLDGSAYLECLQNLIWSSSPPRCLALEGGRPEHLFPVLYFPHIRLAAAVLYFCPVLKSSPTPAPTCSSTSTTTSLF

SEQ ID NO: 937 - protein, 236 aa, Homo sapiens
MYHGMNPSNGDGFLEQQQQQQQPQSPQRLLAVILWFQLALCFGPAQLTGGFDDLQVCADPGIPENGFRTPSGGVFFEGSVARFHCQDGFKLKGATKRLCLKHFNGTLGWIPSDNSICVQEDCRIPQIEDAEIHNKTYRHGEKLIITCHEGFKIRYPDLHNMVSLCRDDGTWNNLPICQGCLRPLAPQHTPAQGTRTQAQGSQKPVTASQALLSCSKVCIHLPGAKRAPTLLRTTLT

SEQ ID NO: 938 - protein, 583 aa, Homo sapiens
MPLRKMKIPFLLLFFLWEAESHAASRPNIILVMADDLGIGDPGCYGNKTIRTPNIDRLASGGVKLTQHLAASPLCTPSRAAFMTGRYPVRSGMASWSRTGVFLFTASSGGLPTDEITFAKLLKDQGYSTALIGKWHLGMSCHSKTDFCHHPLHHGFNYFYGISLTNLRDCKPGEGSVFTTGFKRLVFLPLQIVGVTLLTLAALNCLGLLHVPLGVFFSLLFLAALILTLFLGFLHYFRPLNCFMMRNYEIIQQPMSYDNLTQRLTVEAAQFIQRNTETPFLLVLSYLHVHTALFSSKDFAGKSQHGVYGDAVEEMDWSVGQILNLLDELRLANDTLIYFTSDQGAHVEEVSSKGEIHGGSNGIYKGGKANNWEGGIRVPGILRWPRVIQAGQKIDEPTSNMDIFPTVAKLAGAPLPEDRIIDGRDLMPLLEGKSQRSDHEFLFHYCNAYLNAVRWHPQNSTSIWKAFFFTPNFNPVGSNGCFATHVCFCFGSYVTHHDPPLLFDISKDPRERNPLTPASEPRFYEILKVMQEAADRHTQTLPEVPDQFSWNNFLWKPWLQLCCPSTGLSCQCDREKQDKRLSR

SEQ ID NO: 939 - protein, 748 aa, Homo sapiens
MSQWNQVQQLEIKFLEQVDQFYDDNFPMEIRHLLAQWIENQDWEAASNNETMATILLQNLLIQLDEQLGRVSKEKNLLLIHNLKRIRKVLQGKFHGNPMHVAVVISNCLREERRILAAANMPVQGPLEKSLQSSSVSERQRNVEHKVAAIKNSVQMTEQDTKYLEDLQDEFDYRYKTIQTMDQSDKNSAMVNQEVLTLQEMLNSLDFKRKEALSKMTQIIHETDLLMNTMLIEELQDWKRRQQIACIGGPLHNGLDQLQNCFTLLAESLFQLRRQLEKLEEQSTKMTYEGDPIPMQRTHMLERVTFLIYNLFKNSFVVERQPCMPTHPQRPLVLKTLIQFTVKLRLLIKLPELNYQVKVKASIDKNVSTLSNRRFVLCGTNVKAMSIEESSNGSLSVEFRHLQPKEMKSSAGGKGNEGCHMVTEELHSITFETQICLYGLTIDLETSSLPVVMISNVSQLPNAWASIIWYNVSTNDSQNLVFFNNPPPATLSQLLEVMSWQFSSYVGRGLNSDQLHMLAEKLTVQSSYSDGHLTWAKFCKEHLPGKSFTFWTWLEAILDLIKKHILPLWIDGYVMGFVSKEKERLLLKDKMPGTFLLRFSESHLGGITFTWVDHSESGEVRFHSVEPYNKGRLSALPFADILRDYKVIMAENIPENPLKYLYPDIPKDKAFGKHYSSQPCEVSRPTERGDKGYVPSVFIPISTIRSDSTEPHSPSDLLPMSPSVYAVLRENLSPTTIETAMKSPYSAE

SEQ ID NO: 940 - protein, 2137 aa, Homo sapiens
MTSATEFENVGNQPPYSRINARWDAPDDELDNDNSSARLFERSRIKALADEREVVQKKTFTKWVNSHLARVSCRITDLYKDLRDGRMLIKLLEVLSGEMLPKPTKGKMRIHCLENVDKALQFLKEQRVHLENMGSHDIVDGNHRLVLGLIWTIILRFQIQDIVVQTQEGRETRSAKDALLLWCQMKTAGYPHVNVTNFTSSWKDGLAFNALIHKHRPDLIDFDKLKDSNARHNLEHAFNVAERQLGIIPLLDPEDVFTENPDEKSIITYVVAFYHYFSKMKVLAVEGKRVGKVIDHAIETEKMIEKYSGLASDLLTWIEQTITVLNSRKFANSLTGVQQQLQAFSTYRTVEKPPKFQEKGNLEVLLFTIQSRMRANNQKVYTPHDGKLVSDINRAWESLEEAEYRRELALRNELIRQEKLEQLARRFDRKAAMRETWLSENQRLVAQDNFGYDLAAVEAAKKKHEAIETDTAAYEERVRALEDLAQELEKENYHDQKRITARKDNILRLWSYLQELLQSRRQRLETTLALQKLFQDMLHSIDWMDEIKAHLLSAEFGKHLLEVEDLLQKHKLMEADIAIQGDKVKAITAATLKFTEGKGYQPCDPQVIQDRISHLEQCFEELSNMAAGRKAQLEQSKRLWKFFWEMDEAESWIKEKEQIYSSLDYGKDLTSVLILQRKHKAFEDELRGLDAHLEQIFQEAHGMVARKQFGHPQIEARIKEVSAQWDQLKDLAAFCKKNLQDAENFFQFQGDADDLKAWLQDAHRLLSGEDVGQDEGATRALGKKHKDFLEELEESRGVMEHLEQQAQGFPEEFRDSPDVTHRLQALRELYQQVVAQADLRQQRLQEALDLYTVFGETDACELWMGEKEKWLAEMEMPDTLEDLEVVQHRFDILDQEMKTLMTQIDGVNLAANSLVESGHPRSREVKQYQDHLNTRWQAFQTLVSERREAVDSALRVHNYCVDCEETSKWITDKTKVVESTKDLGRDLAGIIAIQRKLSGLERDVAAIQARVDALERESQQLMDSHPEQKEDIGQRQKHLEELWQGLQQSLQGQEDLLGEVSQLQAFLQDLDDFQAWLSITQKAVASEDMPESLPEAEQLLQQHAGIKDEIDGHQDSYQRVKESGEKVIQGQTDPEYLLLGQRLEGLDTGWNALGRMWESRSHTLAQCLGFQEFQKDAKQAEAILSNQEYTLAHLEPPDSLEAAEAGIRKFEDFLGSMENNRDKVLSPVDSGNKLVAEGNLYSDKIKEKVQLIEDRHRKNNEKAQEASVLLRDNLELQNFLQNCQELTLWINDKLLTSQDVSYDEARNLHNKWLKHQAFVAELASHEGWLENIDAEGKQLMDEKPQFTALVSQKLEALHRLWDELQATTKEKTQHLSAARSSDLRLQTHADLNKWISAMEDQLRSDDPGKDLTSVNRMLAKLKRVEDQVNVRKEELGELFAQVPSMGEEGGDADLSIEKRFLDLLEPLGRRKKQLESSRAKLQISRDLEDETLWVEERLPLAQSADYGTNLQTVQLFMKKNQTLQNEILGHTPRVEDVLQRGQQLVEAAEIDCQDLEERLGHLQSSWDRLREAAAGRLQRLRDANEAQQYYLDADEAEAWIGEQELYVISDEIPKDEEGAIVMLKRHLRQQRAVEDYGRNIKQLASRAQGLLSAGHPEGEQIIRLQGQVDKHYAGLKDVAEERKRKLENMYHLFQLKRETDDLEQWISEKELVASSPEMGQDFDHVTLLRDKFRDFARETGAIGQERVDNVNAFIERLIDAGHSEAATIAEWKDGLNEMWADLLELIDTRMQLLAASYDLHRYFYTGAEILGLIDEKHRELPEDVGLDASTAESFHRVHTAFERELHLLGVQVQQFQDVATRLQTAYAGEKAEAIQNKEQEVSAAWQALLDACAGRRTQLVDTADKFRFFSMARDLLSWMESIIRQIETQERPRDVSSVELLMKYHQGINAEIETRSKNFSACLELGESLLQRQHQASEEIREKLQQVMSRRKEMNEKWEARWERLRMLLEVCQFSRDASVAEAWLIAQEPYLASGDFGHTVDSVEKLIKRHEAFEKSTASWAERFAALEKPTTLELKERQIAERPAEETGPQEEEGETAGEAPVSHHAATERTSPVSLWSRLSSSWESLQPEPSHPY

SEQ ID NO: 941 - protein, 2328 aa, Homo sapiens
MTSATEFENVGNQPPYSRINARWDAPDDELDNDNSSARLFERSRIKALADEREVVQKKTFTKWVNSHLARVSCRITDLYKDLRDGRMLIKLLEVLSGEMLPKPTKGKMRIHCLENVDKALQFLKEQRVHLENMGSHDIVDGNHRLVLGLIWTIILRFQIQDIVVQTQEGRETRSAKDALLLWCQMKTAGYPHVNVTNFTSSWKDGLAFNALIHKHRPDLIDFDKLKDSNARHNLEHAFNVAERQLGIIPLLDPEDVFTENPDEKSIITYVVAFYHYFSKMKVLAVEGKRVGKVIDHAIETEKMIEKYSGLASDLLTWIEQTITVLNSRKFANSLTGVQQQLQAFSTYRTVEKPPKFQEKGNLEVLLFTIQSRMRANNQKVYTPHDGKLVSDINRAWESLEEAEYRRELALRNELIRQEKLEQLARRFDRKAAMRETWLSENQRLVAQDNFGYDLAAVEAAKKKHEAIETDTAAYEERVRALEDLAQELEKENYHDQKRITARKDNILRLWSYLQELLQSRRQRLETTLALQKLFQDMLHSIDWMDEIKAHLLSAEFGKHLLEVEDLLQKHKLMEADIAIQGDKVKAITAATLKFTEGKGYQPCDPQVIQDRISHLEQCFEELSNMAAGRKAQLEQSKRLWKFFWEMDEAESWIKEKEQIYSSLDYGKDLTSVLILQRKHKAFEDELRGLDAHLEQIFQEAHGMVARKQFGHPQIEARIKEVSAQWDQLKDLAAFCKKNLQDAENFFQFQGDADDLKAWLQDAHRLLSGEDVGQDEGATRALGKKHKDFLEELEESRGVMEHLEQQAQGFPEEFRDSPDVTHRLQALRELYQQVVAQADLRQQRLQEALDLYTVFGETDACELWMGEKEKWLAEMEMPDTLEDLEVVQHRFDILDQEMKTLMTQIDGVNLAANSLVESGHPRSREVKQYQDHLNTRWQAFQTLVSERREAVDSALRVHNYCVDCEETSKWITDKTKVVESTKDLGRDLAGIIAIQRKLSGLERDVAAIQARVDALERESQQLMDSHPEQKEDIGQRQKHLEELWQGLQQSLQGQEDLLGEVSQLQAFLQDLDDFQAWLSITQKAVASEDMPESLPEAEQLLQQHAGIKDEIDGHQDSYQRVKESGEKVIQGQTDPEYLLLGQRLEGLDTGWNALGRMWESRSHTLAQCLGFQEFQKDAKQAEAILSNQEYTLAHLEPPDSLEAAEAGIRKFEDFLGSMENNRDKVLSPVDSGNKLVAEGNLYSDKIKEKVQLIEDRHRKNNEKAQEASVLLRDNLELQNFLQNCQELTLWINDKLLTSQDVSYDEARNLHNKWLKHQAFVAELASHEGWLENIDAEGKQLMDEKPQFTALVSQKLEALHRLWDELQATTKEKTQHLSAARSSDLRLQTHADLNKWISAMEDQLRSDDPGKDLTSVNRMLAKLKRVEDQVNVRKEELGELFAQVPSMGEEGGDADLSIEKRFLDLLEPLGRRKKQLESSRAKLQISRDLEDETLWVEERLPLAQSADYGTNLQTVQLFMKKNQTLQNEILGHTPRVEDVLQRGQQLVEAAEIDCQDLEERLGHLQSSWDRLREAAAGRLQRLRDANEAQQYYLDADEAEAWIGEQELYVISDEIPKDEEGAIVMLKRHLRQQRAVEDYGRNIKQLASRAQGLLSAGHPEGEQIIRLQGQVDKHYAGLKDVAEERKRKLENMYHLFQLKRETDDLEQWISEKELVASSPEMGQDFDHVTLLRDKFRDFARETGAIGQERVDNVNAFIERLIDAGHSEAATIAEWKDGLNEMWADLLELIDTRMQLLAASYDLHRYFYTGAEILGLIDEKHRELPEDVGLDASTAESFHRVHTAFERELHLLGVQVQQFQDVATRLQTAYAGEKAEAIQNKEQEVSAAWQALLDACAGRRTQLVDTADKFRFFSMARDLLSWMESIIRQIETQERPRDVSSVELLMKYHQGINAEIETRSKNFSACLELGESLLQRQHQASEEIREKLQQVMSRRKEMNEKWEARWERLRMLLEVCQFSRDASVAEAWLIAQEPYLASGDFGHTVDSVEKLIKRHEAFEKSTASWAERFAALEKPTTLELKERQIAERPAEETGPQEEEGETAGEAPVSHHAATERTSPGEEEGTWPQNLQQPPPPGQHKDGQKSTGDERPTTEPLFKVLDTPLSEGDEPATLPAPRDHGQSVQMEGYLGRKHDLEGPNKKASNRSWNNLYCVLRNSELTFYKDAKNLALGMPYHGEEPLALRHAICEIAANYKKKKHVFKLRLSNGSEWLFHGKDEEEMLSWLQGVSTAINESQSIRVKAQSLPLPSLSGPDASLGKKDKEKRFSFFPKKK

SEQ ID NO: 942 - protein, 2106 aa, Homo sapiens
MTSATEFENVGNQPPYSRINARWDAPDDELDNDNSSARLFERSRIKALADEREVVQKKTFTKWVNSHLARVSCRITDLYKDLRDGRMLIKLLEVLSGEMLPKPTKGKMRIHCLENVDKALQFLKEQRVHLENMGSHDIVDGNHRLVLGLIWTIILRFQIQDIVVQTQEGRETRSAKDALLLWCQMKTAGYPHVNVTNFTSSWKDGLAFNALIHKHRPDLIDFDKLKDSNARHNLEHAFNVAERQLGIIPLLDPEDVFTENPDEKSIITYVVAFYHYFSKMKVLAVEGKRVGKVIDHAIETEKMIEKYSGLASDLLTWIEQTITVLNSRKFANSLTGVQQQLQAFSTYRTVEKPPKFQEKGNLEVLLFTIQSRMRANNQKVYTPHDGKLVSDINRAWESLEEAEYRRELALRNELIRQEKLEQLARRFDRKAAMRETWLSENQRLVAQDNFGYDLAAVEAAKKKHEAIETDTAAYEERVRALEDLAQELEKENYHDQKRITARKDNILRLWSYLQELLQSRRQRLETTLALQKLFQDMLHSIDWMDEIKAHLLSAEFGKHLLEVEDLLQKHKLMEADIAIQGDKVKAITAATLKFTEGKGYQPCDPQVIQDRISHLEQCFEELSNMAAGRKAQLEQSKRLWKFFWEMDEAESWIKEKEQIYSSLDYGKDLTSVLILQRKHKAFEDELRGLDAHLEQIFQEAHGMVARKQFGHPQIEARIKEVSAQWDQLKDLAAFCKKNLQDAENFFQFQGDADDLKAWLQDAHRLLSGEDVGQDEGATRALGKKHKDFLEELEESRGVMEHLEQQAQGFPEEFRDSPDVTHRLQALRELYQQVVAQADLRQQRLQEALDLYTVFGETDACELWMGEKEKWLAEMEMPDTLEDLEVVQHRFDILDQEMKTLMTQIDGVNLAANSLVESGHPRSREVKQYQDHLNTRWQAFQTLVSERREAVDSALRVHNYCVDCEETSKWITDKTKVVESTKDLGRDLAGIIAIQRKLSGLERDVAAIQARVDALERESQQLMDSHPEQKEDIGQRQKHLEELWQGLQQSLQGQEDLLGEVSQLQAFLQDLDDFQAWLSITQKAVASEDMPESLPEAEQLLQQHAGIKDEIDGHQDSYQRVKESGEKVIQGQTDPEYLLLGQRLEGLDTGWNALGRMWESRSHTLAQCLGFQEFQKDAKQAEAILSNQEYTLAHLEPPDSLEAAEAGIRKFEDFLGSMENNRDKVLSPVDSGNKLVAEGNLYSDKIKEKVQLIEDRHRKNNEKAQEASVLLRDNLELQNFLQNCQELTLWINDKLLTSQDVSYDEARNLHNKWLKHQAFVAELASHEGWLENIDAEGKQLMDEKPQFTALVSQKLEALHRLWDELQATTKEKTQHLSAARSSDLRLQTHADLNKWISAMEDQLRSDDPGKDLTSVNRMLAKLKRVEDQVNVRKEELGELFAQVPSMGEEGGDADLSIEKRFLDLLEPLGRRKKQLESSRAKLQISRDLEDETLWVEERLPLAQSADYGTNLQTVQLFMKKNQTLQNEILGHTPRVEDVLQRGQQLVEAAEIDCQDLEERLGHLQSSWDRLREAAAGRLQRLRDANEAQQYYLDADEAEAWIGEQELYVISDEIPKDEEGAIVMLKRHLRQQRAVEDYGRNIKQLASRAQGLLSAGHPEGEQIIRLQGQVDKHYAGLKDVAEERKRKLENMYHLFQLKRETDDLEQWISEKELVASSPEMGQDFDHVTLLRDKFRDFARETGAIGQERVDNVNAFIERLIDAGHSEAATIAEWKDGLNEMWADLLELIDTRMQLLAASYDLHRYFYTGAEILGLIDEKHRELPEDVGLDASTAESFHRVHTAFERELHLLGVQVQQFQDVATRLQTAYAGEKAEAIQNKEQEVSAAWQALLDACAGRRTQLVDTADKFRFFSMARDLLSWMESIIRQIETQERPRDVSSVELLMKYHQGINAEIETRSKNFSACLELGESLLQRQHQASEEIREKLQQVMSRRKEMNEKWEARWERLRMLLEVCQFSRDASVAEAWLIAQEPYLASGDFGHTVDSVEKLIKRHEAFEKSTASWAERFAALEKPTTASRGGRRDSRGGSSFPPCGHRENVPGQSLVSFV

SEQ ID NO: 943 - protein, 786 aa, Homo sapiens
MSFSRALLWARLPAGRQAGHRAAICSALRPHFGPFPGVLGQVSVLATASSSASGGSKIPNTSLFVPLTVKPQGPSADGDVGAELTRPLDKNEVKKVLDKFYKRKEIQKLGADYGLDARLFHQAFISFRNYIMQSHSLDVDIHIVLNDICFGAAHADDLFPFFLRHAKQIFPVLDCKDDLRKISDLRIPPNWYPDARAMQRKIIFHSGPTNSGKTYHAIQKYFSAKSGVYCGPLKLLAHEIFEKSNAAGVPCDLVTGEERVTVQPNGKQASHVSCTVEMCSVTTPYEVAVIDEIQMIRDPARGWAWTRALLGLCAEEVHLCGEPAAIDLVMELMYTTGEEVEVRDYKRLTPISVLDHALESLDNLRPGDCIVCFSKNDIYSVSRQIEIRGLESAVIYGSLPPGTKLAQAKKFNDPNDPCKILVATDAIGMGLNLSIRRIIFYSLIKPSINEKGERELEPITTSQALQIAGRAGRFSSRFKEGEVTTMNHEDLSLLKEILKRPVDPIRAAGLHPTAEQIEMFAYHLPDATLSNLIDIFVDFSQVDGQYFVCNMDDFKFSAELIQHIPLSLRVRYVFCTAPINKKQPFVCSSLLQFARQYSRNEPLTFAWLRRYIKWPLLPPKNIKDLMDLEAVHDVLDLYLWLSYRFMDMFPDASLIRDLQKELDGIIQDGVHNITKLIKMSETHKLLNLEGFPSGSQSRLSGTLKSQARRTRGTKALGSKATEPPSPDAGELSLASRLVQQGLLTPDMLKQLEKEWMTQQTEHNKEKTESGTHPKGTRRKKKEPDSD

SEQ ID NO: 944 - protein, 16 aa, Homo sapiens
NYYKKLFGSGTTLVVT

SEQ ID NO: 945 - protein, 655 aa, Homo sapiens
MERKVLALQARKKRTKAKKDKAQRKSETQHRGSAPHSESDLPEQEEEILGSDDDEQEDPNDYCKGGYHLVKIGDLFNGRYHVIRKLGWGHFSTVWLSWDIQGKKFVAMKVVKSAEHYTETALDEIRLLKSVRNSDPNDPNREMVVQLLDDFKISGVNGTHICMVFEVLGHHLLKWIIKSNYQGLPLPCVKKIIQQVLQGLDYLHTKCRIIHTDIKPENILLSVNEQYIRRLAAEATEWQRSGAPPPSGSAVSTAPQPKPADKMSKNKKKKLKKKQKRQAELLEKRMQEIEEMEKESGPGQKRPNKQEESESPVERPLKENPPNKMTQEKLEESSTIGQDQTLMERDTEGGAAEINCNGVIEVINYTQNSNNETLRHKEDLHNANDCDVQNLNQESSFLSSQNGDSSTSQETDSCTPITSEVSDTMVCQSSSTVGQSFSEQHISQLQESIRAEIPCEDEQEQEHNGPLDNKGKSTAGNFLVNPLEPKNAEKLKVKIADLGNACWVHKHFTEDIQTRQYRSLEVLIGSGYNTPADIWSTACMAFELATGDYLFEPHSGEEYTRDEDHIALIIELLGKVPRKLIVAGKYSKEFFTKKGDLKHITKLKPWGLFEVLVEKYEWSQEEAAGFTDFLLPMLELIPEKRATAAECLRHPWLNS

SEQ ID NO: 946 - protein, 826 aa, Homo sapiens
MERKGERWSGLRHEGQWSPGRGPGQRRELRLTAAVRFPDVRRPSTEVAPPHTPCLWAAGPRPSFRASSGAGRSRPLFPARPARALGPLQGPALGGRRRPPPARPLTRPETPPAHPARALLCAPWAASPTPAASPSPQPPPRQAPQPGLAPLLGLHPHLGRLLSSTFALHPSLSPAVLALQARKKRTKAKKDKAQRKSETQHRGSAPHSESDLPEQEEEILGSDDDEQEDPNDYCKGGYHLVKIGDLFNGRYHVIRKLGWGHFSTVWLSWDIQGKKFVAMKVVKSAEHYTETALDEIRLLKSVRNSDPNDPNREMVVQLLDDFKISGVNGTHICMVFEVLGHHLLKWIIKSNYQGLPLPCVKKIIQQVLQGLDYLHTKCRIIHTDIKPENILLSVNEQYIRRLAAEATEWQRSGAPPPSGSAVSTAPQPKPADKMSKNKKKKLKKKQKRQAELLEKRMQEIEEMEKESGPGQKRPNKQEESESPVERPLKENPPNKMTQEKLEESSTIGQDQTLMERDTEGGAAEINCNGVIEVINYTQNSNNETLRHKEDLHNANDCDVQNLNQESSFLSSQNGDSSTSQETDSCTPITSEVSDTMVCQSSSTVGQSFSEQHISQLQESIRAEIPCEDEQEQEHNGPLDNKGKSTAGNFLVNPLEPKNAEKLKVKIADLGNACWVHKHFTEDIQTRQYRSLEVLIGSGYNTPADIWSTACMAFELATGDYLFEPHSGEEYTRDEDHIALIIELLGKVPRKLIVAGKYSKEFFTKKGDLKHITKLKPWGLFEVLVEKYEWSQEEAAGFTDFLLPMLELIPEKRATAAECLRHPWLNS

SEQ ID NO: 947 - protein, 639 aa, Homo sapiens
MGIFVSFLRSETQHRGSAPHSESDLPEQEEEILGSDDDEQEDPNDYCKGGYHLVKIGDLFNGRYHVIRKLGWGHFSTVWLSWDIQGKKFVAMKVVKSAEHYTETALDEIRLLKSVRNSDPNDPNREMVVQLLDDFKISGVNGTHICMVFEVLGHHLLKWIIKSNYQGLPLPCVKKIIQQVLQGLDYLHTKCRIIHTDIKPENILLSVNEQYIRRLAAEATEWQRSGAPPPSGSAVSTAPQPKPADKMSKNKKKKLKKKQKRQAELLEKRMQEIEEMEKESGPGQKRPNKQEESESPVERPLKENPPNKMTQEKLEESSTIGQDQTLMERDTEGGAAEINCNGVIEVINYTQNSNNETLRHKEDLHNANDCDVQNLNQESSFLSSQNGDSSTSQETDSCTPITSEVSDTMVCQSSSTVGQSFSEQHISQLQESIRAEIPCEDEQEQEHNGPLDNKGKSTAGNFLVNPLEPKNAEKLKVKIADLGNACWVHKHFTEDIQTRQYRSLEVLIGSGYNTPADIWSTACMAFELATGDYLFEPHSGEEYTRDEDHIALIIELLGKVPRKLIVAGKYSKEFFTKKGDLKHITKLKPWGLFEVLVEKYEWSQEEAAGFTDFLLPMLELIPEKRATAAECLRHPWLNS

SEQ ID NO: 948 - protein, 1292 aa, Homo sapiens
MSSECDGGSKAVMNGLAPGSNGQDKATADPLRARSISAVKIIPVKTVKNASGLVLPTDMDLTKICTGKGAVTLRASSSYRETPSSSPASPQETRQHESKPGLEPEPSSADEWRLSSSADANGNAQPSSLAAKGYRSVHPNLPSDKSQDATSSSAAQPEVIVVPLYLVNTDRGQEGTARPPTPLGPLGCVPTIPATASAASPLTFPTLDDFIPPHLQRWPHHSQPARASGSFAPISQTPPSFSPPPPLVPPAPEDLRRVSEPDLTGAVSSTDSSPLLNEVSSSLIGTDSQAFPSVSKPSSAYPSTTIVNPTIVLLQHNREQQKRLSSLSDPVSERRVGEQDSAPTQEKPTSPGKAIEKRAKDDSRRVVKSTQDLSDVSMDEVGIPLRNTERSKDWYKTMFKQIHKLNRDTPEENPYFPTYKFPELPEIQQTSEEDNPYTPTYQFPASTPSPKSEDDDSDLYSPRYSFSEDTKSPLSVPRSKSEMSYIDGEKVVKRSATLPLPARSSSLKSSSERNDWEPPDKKVDTRKYRAEPKSIYEYQPGKSSVLTNEKMSRDISPEEIDLKNEPWYKFFSELEFGKPPPKKIWDYTPGDCSILPREDRKTNLDKDLSLCQTELEADLEKMETLNKAPSANVPQSSAISPTPEISSETPGYIYSSNFHAVKRESDGAPGDLTSLENERQIYKSVLEGGDIPLQGLSGLKRPSSSASTKDSESPRHFIPADYLESTEEFIRRRHDDKEKLLADQRRLKREQEEADIAARRHTGVIPTHHQFITNERFGDLLNIDDTAKRKSGSEMRPARAKFDFKAQTLKELPLQKGDIVYIYKQIDQNWYEGEHHGRVGIFPRTYIELLPPAEKAQPKKLTPVQVLEYGEAIAKFNFNGDTQVEMSFRKGERITLLRQVDENWYEGRIPGTSRQGIFPITYVDVIKRPLVKNPVDYMDLPFSSSPSRSATASPQFSSHSKLITPAPSSLPHSRRALSPEMHAVTSEWISLTVGVPGRRSLALTPPLPPLPEASIYNTDHLALSPRASPSLSLSLPHLSWSDRPTPRSVASPLALPSPHKTYSLAPTSQASLHMNGDGGVHTPSSGIHQDSFLQLPLGSSDSVISQLSDAFSSQSKRQPWREESGQYERKAERGAGERGPGGPKISKKSCLKPSDVVRCLSTEQRLSDLNTPEESRPGKPLGSAFPGSEAEQTERHRGGEQAGRKAARRGGSQQPQAQQRRVTPDRSQTSQDLFSYQALYSYIPQNDDELELRDGDIVDVMEKCDDGWFVGTSRRTKQFGTFPGNYVKPLYL

SEQ ID NO: 949 - protein, 1151 aa, Homo sapiens
MSSECDGGSKAVMNGLAPGSNGQDKATADPLRARSISAVKIIPVKTVKNASGLVLPTDMDLTKICTGKGAVTLRASSSYRETPSSSPASPQETRQHESKPGLEPEPSSADEWRLSSSADANGNAQPSSLAAKGYRSVHPNLPSDKSQDATSSSAAQPEVIVVPLYLVNTDRGQEGTARPPTPLGPLGCVPTIPATASAASPLTFPTLDDFIPPHLQRWPHHSQPARASGSFAPISQTPPSFSPPPPLVPPAPEDLRRVSEPDLTGAVSSTDSSPLLNEVSSSLIGTDSQAFPSVSKPSSAYPSTTIVNPTIVLLQHNREQQKRLSSLSDPVSERRVGEQDSAPTQEKPTSPGKAIEKRAKDDSRRVVKSTQDLSDVSMDEVGIPLRNTERSKDWYKTMFKQIHKLNRDTPEENPYFPTYKFPELPEIQQTSEETKSCSVMSPRLECSGTVIAHCSLKLLDSSNPPTSASQVAGTADDDSDLYSPRYSFSEDTKSPLSVPRSKSEMSYIDGEKVVKRSATLPLPARSSSLKSSSERNDWEPPDKKVDTRKYRAEPKSIYEYQPGKSSVLTNEKMSRDISPEEIDLKNEPWYKFFSELEFGKPPPKKIWDYTPGDCSILPREDRKTNLDKDLSLCQTELEADLEKMETLNKAPSANVPQSSAISPTPEISSETPGYIYSSNFHAVKRESDGAPGDLTSLENERQIYKSVLEGGDIPLQGLSGLKRPSSSASTKDSESPRHFIPADYLESTEEFIRRRHDDKEKLLADQRRLKREQEEADIAARRHTGVIPTHHQFITNERFGDLLNIDDTAKRKSGSEMRPARAKFDFKAQTLKELPLQKGDIVYIYKQIDQNWYEGEHHGRVGIFPRTYIELLPPAEKAQPKKLTPVQVLEYGEAIAKFNFNGDTQVEMSFRKGERITLLRQVDENWYEGRIPGTSRQGIFPITYVDVIKRPLVKNPVDYMDLPFSSSPSRSATASPQPWREESGQYERKAERGAGERGPGGPKISKKSCLKPSDVVRCLSTEQRLSDLNTPEESRPGKPLGSAFPGSEAEQTERHRGGEQAGRKAARRGGSQQPQAQQRRVTPDRSQTSQDLFSYQALYSYIPQNDDELELRDGDIVDVMEKCDDGWFVGTSRRTKQFGTFPGNYVKPLYL

SEQ ID NO: 950 - protein, 905 aa, Homo sapiens
MSSECDGGSKAVMNGLAPGSNGQDKATADPLRARSISAVKIIPVKTVKNASGLVLPTDMDLTKICTGKGAVTLRASSSYRETPSSSPASPQETRQHESKPGLEPEPSSADEWRLSSSADANGNAQPSSLAAKGYRSVHPNLPSDKSQRWPHHSQPARASGSFAPISQTPPSFSPPPPLVPPAPEDLRRVSEPDLTGAVSSTDSSPLLNEVSSSLIGTDSQAFPSVSKPSSAYPSTTIVNPTIVLLQHNREQQKRLSSLSDPVSERRVGEQDSAPTQEKPTSPGKAIEKRAKDDSRRVVKSTQDLSDVSMDEVGIPLRNTERSKDWYKTMFKQIHKLNRDDDSDLYSPRYSFSEDTKSPLSVPRSKSEMSYIDGEKVVKRSATLPLPARSSSLKSSSERNDWEPPDKKVDTRKYRAEPKSIYEYQPGKSSVLTNEKMSRDISPEEIDLKNEPWYKFFSELEFGKPPPKKIWDYTPGDCSILPREDRKSSAISPTPEISSETPGYIYSSNFHAVKRESDGAPGDLTSLENERQIYKSVLEGGDIPLQGLSGLKRPSSSASTKDSESPRHFIPADYLESTEEFIRRRHDDKEKLLADQRRLKREQEEADIAARRHTGVIPTHHQFITNERFGDLLNIDDTAKRKSGSEMRPARAKFDFKAQTLKELPLQKGDIVYIYKQIDQNWYEGEHHGRVGIFPRTYIELLPPAEKAQPKKLTPVQVLEYGEAIAKFNFNGDTQVEMSFRKGERITLLRQVDENWYEGRIPGTSRQGIFPITYVDVIKRPLVKNPVDYMDLPFSSSPSRSATASPQLSHHSLRAGPDLTESEKSYVQPQAQQRRVTPDRSQTSQDLFSYQALYSYIPQNDDELELRDGDIVDVMEKCDDGWFVGTSRRTKQFGTFPGNYVKPLYL

SEQ ID NO: 951 - protein, 684 aa, Homo sapiens
MSSECDGGSKAVMNGLAPGSNGQDKDMDLTKICTGKGAVTLRASSSYRETPSSSPASPQETRQHESKPDEWRLSSSADANGNAQPSSLAAKGYRSVHPNLPSDKSQDSSPLLNEVSSSLIGTDSQAFPSVSKPSSAYPSTTIVNPTIVLLQHNREQQKRLSSLSDPVSERRVGEQDSAPTQEKPTSPGKAIEKRAKDDSRRVVKSTQDLSDVSMDEVGIPLRNTERSKDWYKTMFKQIHKLNRDDDSDLYSPRYSFSEDTKSPLSVPRSKSEMSYIDGEKVVKRSATLPLPARSSSLKSSSERNDWEPPDKKVDTRKYRAEPKSIYEYQPGKSSVLTNEKMSSAISPTPEISSETPGYIYSSNFHAVKRESDGAPGDLTSLENERQIYKSVLEGGDIPLQGLSGLKRPSSSASTKDSESPRHFIPADYLESTEEFIRRRHDDKEMRPARAKFDFKAQTLKELPLQKGDIVYIYKQIDQNWYEGEHHGRVGIFPRTYIELLPPAEKAQPKKLTPVQVLEYGEAIAKFNFNGDTQVEMSFRKGERITLLRQVDENWYEGRIPGTSRQGIFPITYVDVIKRPLVKNPVDYMDLPFSSSPSRSATASPQQPQAQQRRVTPDRSQTSQDLFSYQALYSYIPQNDDELELRDGDIVDVMEKCDDGWFVGTSRRTKQFGTFPGNYVKPLYL

SEQ ID NO: 952 - protein, 1004 aa, Homo sapiens
MSSECDGGSKAVMNGLAPGSNGQDKATADPLRARSISAVKIIPVKTVKNASGLVLPTDMDLTKICTGKGAVTLRASSSYRETPSSSPASPQETRQHESKPDEWRLSSSADANGNAQPSSLAAKGYRSVHPNLPSDKSQDATSSSAAQPEVIVVPLYLVNTDRGQEGTARPPTPLGPLGCVPTIPATASAASPLTFPTLDDFIPPHLQRWPHHSQPARASGSFAPISQTPPSFSPPPPLVPPAPEDLRRVSEPDLTGAVSSTDSSPLLNEVSSSLIGTDSQAFPSVSKPSSAYPSTTIVNPTIVLLQHNREQQKRLSSLSDPVSERRVGEQDSAPTQEKPTSPGKAIEKRAKDDSRRVVKSTQDLSDVSMDEVGIPLRNTERSKDWYKTMFKQIHKLNRDTPEENPYFPTYKFPELPEIQQTSEDDDSDLYSPRYSFSEDTKSPLSVPRSKSEMSYIDGEKVVKRSATLPLPARSSSLKSSSERNDWEPPDKKVDTRKYRAEPKSIYEYQPGKSSVLTNEKMSRDISPEEIDLKNEPWYKFFSELEFGKPPPKKIWDYTPGDCSILPREDRKTNLDKDLSLCQTELEADLEKMETLNKAPSANVPQSSAISPTPEISSETPGYIYSSNFHAVKRESDGAPGDLTSLENERQIYKSVLEGGDIPLQGLSGLKRPSSSASTKDSESPRHFIPADYLESTEEFIRRRHDDKEKLLADQRRLKREQEEADIAARRHTGVIPTHHQFITNERFGDLLNIDDTAKRKSGSEMRPARAKFDFKAQTLKELPLQKGDIVYIYKQIDQNWYEGEHHGRVGIFPRTYIELLPPAEKAQPKKLTPVQVLEYGEAIAKFNFNGDTQVEMSFRKGERITLLRQVDENWYEGRIPGTSRQGIFPITYVDVIKRPLVKNPVDYMDLPFSSSPSRSATASPQQPQAQQRRVTPDRSQTSQDLFSYQALYSYIPQNDDELELRDGDIVDVMEKCDDGWFVGTSRRTKQFGTFPGNYVKPLYL

SEQ ID NO: 953 - protein, 846 aa, Homo sapiens
MSSECDGGSKAVMNGLAPGSNGQDKATADPLRARSISAVKIIPVKTVKNASGLVLPTDMDLTKICTGKGAVTLRASSSYRETPSSSPASPQETRQHESKPDEWRLSSSADANGNAQPSSLAAKGYRSVHPNLPSDKSQDSSPLLNEVSSSLIGTDSQAFPSVSKPSSAYPSTTIVNPTIVLLQHNREQQKRLSSLSDPVSERRVGEQDSAPTQEKPTSPGKAIEKRAKDDSRRVVKSTQDLSDVSMDEVGIPLRNTERSKDWYKTMFKQIHKLNRDTPEENPYFPTYKFPELPEIQQTSEEDNPYTPTYQFPASTPSPKSEDDDSDLYSPRYSFSEDTKSPLSVPRSKSEMSYIDGEKVVKRSATLPLPARSSSLKSSSERNDWEPPDKKVDTRKYRAEPKSIYEYQPGKSSVLTNEKMSRDISPEEIDLKNEPWYKFFSELEFGKPSSAISPTPEISSETPGYIYSSNFHAVKRESDGAPGDLTSLENERQIYKSVLEGGDIPLQGLSGLKRPSSSASTKDSESPRHFIPADYLESTEEFIRRRHDDKEKLLADQRRLKREQEEADIAARRHTGVIPTHHQFITNERFGDLLNIDDTAKRKSGSEMRPARAKFDFKAQTLKELPLQKGDIVYIYKQIDQNWYEGEHHGRVGIFPRTYIELLPPAEKAQPKKLTPVQVLEYGEAIAKFNFNGDTQVEMSFRKGERITLLRQVDENWYEGRIPGTSRQGIFPITYVDVIKRPLVKNPVDYMDLPFSSSPSRSATASPQQPQAQQRRVTPDRSQTSQDLFSYQALYSYIPQNDDELELRDGDIVDVMEKCDDGWFVGTSRRTKQFGTFPGNYVKPLYL

SEQ ID NO: 954 - protein, 628 aa, Homo sapiens
MSSECDGGSKAVMNGLAPGSNGQDKDMDLTKICTGKGAVTLRASSSYRETPSSSPASPQETRQHESKPDEWRLSSSADANGNAQPSSLAAKGYRSVHPNLPSDKSQDATSSSAAQPEVIVVPLYLVNTDRGQEGTARPPTPLGPLGCVPTIPATASAASPLTFPTLDDFIPPHLQRWPHHSQPARASGSFAPISQTPPSFSPPPPLVPPAPEDLRRVSEPDLTGAVSSTDSSPLLNEVSSSLIGTDSQAFPSVSKPSSAYPSTTIVNPTIVLLQHNREQQKRLSSLSDPVSERRVGEQDSAPTQEKPTSPGKAIEKRAKDDSRRVVKSTQDLSDVSMDEVGIPLRNTERSKDWYKTMFKQIHKLNRDDDSDLYSPRYSFSEDTKSPLSVPRSKSEMSYIDGEKVVKRSATLPLPARSSSLKSSSERNDWEPPDKKVDTRKYRAEPKSIYEYQPGKSSVLTNEKMSSAISPTPEISSETPGYIYSSNFHAVKRESDGAPGDLTSLENERQIYKSVLEGGDIPLQGLSGLKRPSSSASTKDSESPRHFIPADYLESTEEFIRRRHDDKEKLLADQRRLKREQEEADIAARRHTGVIPTHHQFITNERFGDLLNIDDTAKRKSGSEKYDWA

SEQ ID NO: 955 - protein, 811 aa, Homo sapiens
MSSECDGGSKAVMNGLAPGSNGQDKDMDLTKICTGKGAVTLRASSSYRETPSSSPASPQETRQHESKPGLEPEPSSADEWRLSSSADANGNAQPSSLAAKGYRSVHPNLPSDKSQDSSPLLNEVSSSLIGTDSQAFPSVSKPSSAYPSTTIVNPTIVLLQHNREQQKRLSSLSDPVSERRVGEQDSAPTQEKPTSPGKAIEKRAKDDSRRVVKSTQDLSDVSMDEVGIPLRNTERSKDWYKTMFKQIHKLNRDDDSDLYSPRYSFSEDTKSPLSVPRSKSEMSYIDGEKVVKRSATLPLPARSSSLKSSSERNDWEPPDKKVDTRKYRAEPKSIYEYQPGKSSVLTNEKMSRDISPEEIDLKNEPWYKFFSELEFGKPTNLDKDLSLCQTELEADLEKMETLNKAPSANVPQSSAISPTPEISSETPGYIYSSNFHAVKRESDGAPGDLTSLENERQIYKSVLEGGDIPLQGLSGLKRPSSSASTKDSESPRHFIPADYLESTEEFIRRRHDDKEKLLADQRRLKREQEEADIAARRHTGVIPTHHQFITNERFGDLLNIDDTAKRKSGSEMRPARAKFDFKAQTLKELPLQKGDIVYIYKQIDQNWYEGEHHGRVGIFPRTYIELLPPAEKAQPKKLTPVQVLEYGEAIAKFNFNGDTQVEMSFRKGERITLLRQVDENWYEGRIPGTSRQGIFPITYVDVIKRPLVKNPVDYMDLPFSSSPSRSATASPQQPQAQQRRVTPDRSQTSQDLFSYQALYSYIPQNDDELELRDGDIVDVMEKCDDGWFVGTSRRTKQFGTFPGNYVKPLYL

SEQ ID NO: 956 - protein, 781 aa, Homo sapiens
MSSECDGGSKAVMNGLAPGSNGQDKATADPLRARSISAVKIIPVKTVKNASGLVLPTDMDLTKICTGKGAVTLRASSSYRETPSSSPASPQETRQHESKPGLEPEPSSADEWRLSSSADANGNAQPSSLAAKGYRSVHPNLPSDKSQDSSPLLNEVSSSLIGTDSQAFPSVSKPSSAYPSTTIVNPTIVLLQHNREQQKRLSSLSDPVSERRVGEQDSAPTQEKPTSPGKAIEKRAKDDSRRVVKSTQDLSDVSMDEVGIPLRNTERSKDWYKTMFKQIHKLNRDDDSDLYSPRYSFSEDTKSPLSVPRSKSEMSYIDGEKVVKRSATLPLPARSSSLKSSSERNDWEPPDKKVDTRKYRAEPKSIYEYQPGKSSVLTNEKMSSAISPTPEISSETPGYIYSSNFHAVKRESDGAPGDLTSLENERQIYKSVLEGGDIPLQGLSGLKRPSSSASTKDSESPRHFIPADYLESTEEFIRRRHDDKEKLLADQRRLKREQEEADIAARRHTGVIPTHHQFITNERFGDLLNIDDTAKRKSGSEMRPARAKFDFKAQTLKELPLQKGDIVYIYKQIDQNWYEGEHHGRVGIFPRTYIELLPPAEKAQPKKLTPVQVLEYGEAIAKFNFNGDTQVEMSFRKGERITLLRQVDENWYEGRIPGTSRQGIFPITYVDVIKRPLVKNPVDYMDLPFSSSPSRSATASPQQPQAQQRRVTPDRSQTSQDLFSYQALYSYIPQNDDELELRDGDIVDVMEKCDDGWFVGTSRRTKQFGTFPGNYVKPLYL

SEQ ID NO: 957 - protein, 816 aa, Homo sapiens
MSSECDGGSKAVMNGLAPGSNGQDKDMDLTKICTGKGAVTLRASSSYRETPSSSPASPQETRQHESKPGLEPEPSSADEWRLSSSADANGNAQPSSLAAKGYRSVHPNLPSDKSQDATSSSAAQPEVIVVPLYLVNTDRGQEGTARPPTPLGPLGCVPTIPATASAASPLTFPTLDDFIPPHLQRWPHHSQPARASGSFAPISQTPPSFSPPPPLVPPAPEDLRRVSEPDLTGAVSSTDSSPLLNEVSSSLIGTDSQAFPSVSKPSSAYPSTTIVNPTIVLLQHNREQQKRLSSLSDPVSERRVGEQDSAPTQEKPTSPGKAIEKRAKDDSRRVVKSTQDLSDVSMDEVGIPLRNTERSKDWYKTMFKQIHKLNRDDDSDLYSPRYSFSEDTKSPLSVPRSKSEMSYIDGEKVVKRSATLPLPARSSSLKSSSERNDWEPPDKKVDTRKYRAEPKSIYEYQPGKSSVLTNEKMSSAISPTPEISSETPGYIYSSNFHAVKRESDGAPGDLTSLENERQIYKSVLEGGDIPLQGLSGLKRPSSSASTKDSESPRHFIPADYLESTEEFIRRRHDDKEMRPARAKFDFKAQTLKELPLQKGDIVYIYKQIDQNWYEGEHHGRVGIFPRTYIELLPPAEKAQPKKLTPVQVLEYGEAIAKFNFNGDTQVEMSFRKGERITLLRQVDENWYEGRIPGTSRQGIFPITYVDVIKRPLVKNPVDYMDLPFSSSPSRSATASPQQPQAQQRRVTPDRSQTSQDLFSYQALYSYIPQNDDELELRDGDIVDVMEKCDDGWFVGTSRRTKQFGTFPGNYVKPLYL

SEQ ID NO: 958 - protein, 1266 aa, Homo sapiens
MSSECDGGSKAVMNGLAPGSNGQDKATADPLRARSISAVKIIPVKTVKNASGLVLPTDMDLTKICTGKGAVTLRASSSYRETPSSSPASPQETRQHESKPGLEPEPSSADEWRLSSSADANGNAQPSSLAAKGYRSVHPNLPSDKSQDATSSSAAQPEVIVVPLYLVNTDRGQEGTARPPTPLGPLGCVPTIPATASAASPLTFPTLDDFIPPHLQRWPHHSQPARASGSFAPISQTPPSFSPPPPLVPPAPEDLRRVSEPDLTGAVSSTDSSPLLNEVSSSLIGTDSQAFPSVSKPSSAYPSTTIVNPTIVLLQHNREQQKRLSSLSDPVSERRVGEQDSAPTQEKPTSPGKAIEKRAKDDSRRVVKSTQDLSDVSMDEVGIPLRNTERSKDWYKTMFKQIHKLNRDDDSDLYSPRYSFSEDTKSPLSVPRSKSEMSYIDGEKVVKRSATLPLPARSSSLKSSSERNDWEPPDKKVDTRKYRAEPKSIYEYQPGKSSVLTNEKMSRDISPEEIDLKNEPWYKFFSELEFGKPPPKKIWDYTPGDCSILPREDRKTNLDKDLSLCQTELEADLEKMETLNKAPSANVPQSSAISPTPEISSETPGYIYSSNFHAVKRESDGAPGDLTSLENERQIYKSVLEGGDIPLQGLSGLKRPSSSASTKDSESPRHFIPADYLESTEEFIRRRHDDKEKLLADQRRLKREQEEADIAARRHTGVIPTHHQFITNERFGDLLNIDDTAKRKSGSEMRPARAKFDFKAQTLKELPLQKGDIVYIYKQIDQNWYEGEHHGRVGIFPRTYIELLPPAEKAQPKKLTPVQVLEYGEAIAKFNFNGDTQVEMSFRKGERITLLRQVDENWYEGRIPGTSRQGIFPITYVDVIKRPLVKNPVDYMDLPFSSSPSRSATASPQFSSHSKLITPAPSSLPHSRRALSPEMHAVTSEWISLTVGVPGRRSLALTPPLPPLPEASIYNTDHLALSPRASPSLSLSLPHLSWSDRPTPRSVASPLALPSPHKTYSLAPTSQASLHMNGDGGVHTPSSGIHQDSFLQLPLGSSDSVISQLSDAFSSQSKRQPWREESGQYERKAERGAGERGPGGPKISKKSCLKPSDVVRCLSTEQRLSDLNTPEESRPGKPLGSAFPGSEAEQTERHRGGEQAGRKAARRGGSQLSHHSLRAGPDLTESEKSYVQPQAQQRRVTPDRSQTSQDLFSYQALYSYIPQNDDELELRDGDIVDVMEKCDDGWFVGTSRRTKQFGTFPGNYVKPLYL

SEQ ID NO: 959 - protein, 1294 aa, Homo sapiens
MSSECDGGSKAVMNGLAPGSNGQDKDMDLTKICTGKGAVTLRASSSYRETPSSSPASPQETRQHESKPGLEPEPSSADEWRLSSSADANGNAQPSSLAAKGYRSVHPNLPSDKSQDSSPLLNEVSSSLIGTDSQAFPSVSKPSSAYPSTTIVNPTIVLLQHNRDPVSERRVGEQDSAPTQEKPTSPGKAIEKRAKDDSRRVVKSTQDLSDVSMDEVGIPLRNTERSKDWYKTMFKQIHKLNRDDDSDLYSPRYSFSEDTKSPLSVPRSKSEMSYIDGEKVVKRSATLPLPARSSSLKSSSERNDWEPPDKKVDTRKYRAEPKSIYEYQPGKSSVLTNEKMSRDISPEEIDLKNEPWYKFFSELEFGKPTNLDKDLSLCQTELEADLEKMETLNKAPSANVPQSSAISPTPEISSETPGYIYSSNFHAVKRESDGAPGDLTSLENERQIYKSVLEGGDIPLQGLSGLKRPSSSASTKVDRKGGNAHMISSSSVHSRTFNTSNALGPVCKHKKPLSAAKACISEILPSKFKPRLSAPSALLQEQKSILLPSEKAQSCENLCVSGSLNDSKRGLPLQVGGSIENLLMRSRRDYDSKSSSTMSLQEYSTSGRRPCPLSRKAGMQFTMLYRDMHQINRSGLFLGSISSSSSVRDLASHFEKSSLALSRGELGPSQEGSEHIPKHTVSSRITAFEQLIQRSRSMPSLDLSGRLSKSPTPVLSRGSLTSARSAESLLESTKLHPKEMDGMNSSGVYASPTCSNMAHHALSFRGLVPSEPLSTCSDDVDRCSNISTDSREGSGGSVHGDFPKHRLNKCKGTCPASYTRFTTIRKHEQQQTSRQPEWRLDARGDKSTLLRNIYLMSPLPFRLKKPLHHHPRQPSPGDSSGLLVGQKPDLPSQPHQDQPPSGGKPVVPTRLSSRHTMARLSRSSEPSQERPTALEDYPRAINNGNSVPYSDHSLDRNNNPQSELAPSRGDSESPRHFIPADYLESTEEFIRRRHDDKEKLLADQRRLKREQEEADIAARRHTGVIPTHHQFITNERFGDLLNIDDTAKRKSGSEMRPARAKFDFKAQTLKELPLQKGDIVYIYKQIDQNWYEGEHHGRVGIFPRTYIELLPPAEKAQPKKLTPVQVLEYGEAIAKFNFNGDTQVEMSFRKGERITLLRQVDENWYEGRIPGTSRQGIFPITYVDVIKRPLVKNPVDYMDLPFSSSPSRSATASPQQPQAQQRRVTPDRSQTSQDLFSYQALYSYIPQNDDELELRDGDIVDVMEKCDDGWFVGTSRRTKQFGTFPGNYVKPLYL

SEQ ID NO: 960 - protein, 308 aa, Homo sapiens
MGEIKVSPDYNWFRGTVPLKKIIVDDDDSKIWSLYDAGPRSIRCPLIFLPPVSGTADVFFRQILALTGWGYRVIALQYPVYWDHLEFCDGFRKLLDHLQLDKVHLFGASLGGFLAQKFAEYTHKSPRVHSLILCNSFSDTSIFNQTWTANSFWLMPAFMLKKIVLGNFSSGPVDPMMADAIDFMVDRLESLGQSELASRLTLNCQNSYVEPHKIRDIPVTIMDVFDQSALSTEAKEEMYKLYPNARRAHLKTGGNFPYLCRSAEVNLYVQIHLLQFHGTKYAAIDPSMVSAEELEVQKGSLGISQEEQ

SEQ ID NO: 961 - protein, 281 aa, Homo sapiens
MGEIKVSPDYNWFRGTVPLKKIIVDDDDSKIWSLYDAGPRSIRCPLIFLPPVSGTADVFFRQILALTGWGYRVIAVHLFGASLGGFLAQKFAEYTHKSPRVHSLILCNSFSDTSIFNQTWTANSFWLMPAFMLKKIVLGNFSSGPVDPMMADAIDFMVDRLESLGQSELASRLTLNCQNSYVEPHKIRDIPVTIMDVFDQSALSTEAKEEMYKLYPNARRAHLKTGGNFPYLCRSAEVNLYVQIHLLQFHGTKYAAIDPSMVSAEELEVQKGSLGISQEEQ

SEQ ID NO: 962 - protein, 558 aa, Homo sapiens
MAELNTHVNVKEKIYAVRSVVPNKSNNEIVLVLQQFDFNVDKAVQAFVDGSAIQVLKEWNMTGKKKNNKRKRSKSKQHQGNKDAKDKVERPEAGPLQPQPPQIQNGPMNGCEKDSSSTDSANEKPALIPREKKISILEEPSKALRGVTEGNRLLQQKLSLDGNPKPIHGTTERSDGLQWSAEQPCNPSKPKAKTSPVKSNTPAAHLEIKPDELAKKRGPNIEKSVKDLQRCTVSLTRYRVMIKEEVDSSVKKIKAAFAELHNCIIDKEVSLMAEMDKVKEEAMEILTARQKKAEELKRLTDLASQMAEMQLAELRAEIKHFVSERKYDEELGKAARFSCDIEQLKAQIMLCGEITHPKNNYSSRTPCSSLLPLLNAHAATSGKQSNFSRKSSTHNKPSEGKAANPKMVSSLPSTADPSHQTMPANKQNGSSNQRRRFNPQYHNNRLNGPAKSQGSGNEAEPLGKGNSRHEHRRQPHNGFRPKNKGGAKNQEASLGMKTPEAPAHSEKPRRRQHAADTSEARPFRGSVGRVSQCNLCPTRIEVSTDAAVLSVPAVTLVA

SEQ ID NO: 963 - protein, 489 aa, Homo sapiens
MAELNTHVNVKEKIYAVRSVVPNKSNNEIVLVLQQFDFNVDKAVQAFVDGSAIQVLKEWNMTGKKKNNKRKRSKSKQHQGNKDAKDKVERPEAGPLQPQPPQIQNGPMNGCEKDSSSTDSANEKPALIPREKKISILEEPSKALRGVTGPNIEKSVKDLQRCTVSLTRYRVMIKEEVDSSVKKIKAAFAELHNCIIDKEVSLMAEMDKVKEEAMEILTARQKKAEELKRLTDLASQMAEMQLAELRAEIKHFVSERKYDEELGKAARFSCDIEQLKAQIMLCGEITHPKNNYSSRTPCSSLLPLLNAHAATSGKQSNFSRKSSTHNKPSEGKAANPKMVSSLPSTADPSHQTMPANKQNGSSNQRRRFNPQYHNNRLNGPAKSQGSGNEAEPLGKGNSRHEHRRQPHNGFRPKNKGGAKNQEASLGMKTPEAPAHSEKPRRRQHAADTSEARPFRGSVGRVSQCNLCPTRIEVSTDAAVLSVPAVTLVA

SEQ ID NO: 964 - protein, 588 aa, Homo sapiens
MDPFCHSSSETRLLSGTLLWIPRAYSTRSKMAELNTHVNVKEKIYAVRSVVPNKSNNEIVLVLQQFDFNVDKAVQAFVDGSAIQVLKEWNMTGKKKNNKRKRSKSKQHQGNKDAKDKVERPEAGPLQPQPPQIQNGPMNGCEKDSSSTDSANEKPALIPREKKISILEEPSKALRGVTEGNRLLQQKLSLDGNPKPIHGTTERSDGLQWSAEQPCNPSKPKAKTSPVKSNTPAAHLEIKPDELAKKRGPNIEKSVKDLQRCTVSLTRYRVMIKEEVDSSVKKIKAAFAELHNCIIDKEVSLMAEMDKVKEEAMEILTARQKKAEELKRLTDLASQMAEMQLAELRAEIKHFVSERKYDEELGKAARFSCDIEQLKAQIMLCGEITHPKNNYSSRTPCSSLLPLLNAHAATSGKQSNFSRKSSTHNKPSEGKAANPKMVSSLPSTADPSHQTMPANKQNGSSNQRRRFNPQYHNNRLNGPAKSQGSGNEAEPLGKGNSRHEHRRQPHNGFRPKNKGGAKNQEASLGMKTPEAPAHSEKPRRRQHAADTSEARPFRGSVGRVSQCNLCPTRIEVSTDAAVLSVPAVTLVA

SEQ ID NO: 965 - protein, 566 aa, Homo sapiens
MAYSTRSKMAELNTHVNVKEKIYAVRSVVPNKSNNEIVLVLQQFDFNVDKAVQAFVDGSAIQVLKEWNMTGKKKNNKRKRSKSKQHQGNKDAKDKVERPEAGPLQPQPPQIQNGPMNGCEKDSSSTDSANEKPALIPREKKISILEEPSKALRGVTEGNRLLQQKLSLDGNPKPIHGTTERSDGLQWSAEQPCNPSKPKAKTSPVKSNTPAAHLEIKPDELAKKRGPNIEKSVKDLQRCTVSLTRYRVMIKEEVDSSVKKIKAAFAELHNCIIDKEVSLMAEMDKVKEEAMEILTARQKKAEELKRLTDLASQMAEMQLAELRAEIKHFVSERKYDEELGKAARFSCDIEQLKAQIMLCGEITHPKNNYSSRTPCSSLLPLLNAHAATSGKQSNFSRKSSTHNKPSEGKAANPKMVSSLPSTADPSHQTMPANKQNGSSNQRRRFNPQYHNNRLNGPAKSQGSGNEAEPLGKGNSRHEHRRQPHNGFRPKNKGGAKNQEASLGMKTPEAPAHSEKPRRRQHAADTSEARPFRGSVGRVSQCNLCPTRIEVSTDAAVLSVPAVTLVA

SEQ ID NO: 966 - protein, 550 aa, Homo sapiens
MWKASAGHAVSIAQDDAGADDWETDPDFVNDVSEKEQRWGAKTVQGSGHQEHINIHKLRENVFQEHQTLKEKELETGPKASHGYGGKFGVEQDRMDKSAVGHEYQSKLSKHCSQVDSVRGFGGKFGVQMDRVDQSAVGFEYQGKTEKHASQKDYSSGFGGKYGVQADRVDKSAVGFDYQGKTEKHESQRDYSKGFGGKYGIDKDKVDKSAVGFEYQGKTEKHESQKDYVKGFGGKFGVQTDRQDKCALGWDHQEKLQLHESQKDYKTGFGGKFGVQSERQDSAAVGFDYKEKLAKHESQQDYSKGFGGKYGVQKDRMDKNASTFEDVTQVSSAYQKTVPVEAVTSKTSNIRANFENLAKEKEQEDRRKAEAERAQRMAKERQEQEEARRKLEEQARAKTQTPPVSPAPQPTEERLPSSPVYEDAASFKAELSYRGPVSGTEPEPVYSMEAADYREASSQQGLAYATEAVYESAEAPGHYPAEDSTYDEYENDLGITAVALYDYQAAGDDEISFDPDDIITNIEMIDDGWWRGVCKGRYGLFPANYVELRQ

SEQ ID NO: 967 - protein, 634 aa, Homo sapiens
MWKASAGHAVSIAQDDAGADDWETDPDFVNDVSEKEQRWGAKTVQGSGHQEHINIHKLRENVFQEHQTLKEKELETGPKASHGYGGKFGVEQDRMDKSAVGHEYQSKLSKHCSQVDSVRGFGGKFGVQMDRVDQSAVGFEYQGKTEKHASQKDYSSGFGGKYGVQADRVDKSAVGFDYQGKTEKHESQRDYSKGFGGKYGIDKDKVDKSAVGFEYQGKTEKHESQKDYVKGFGGKFGVQTDRQDKCALGWDHQEKLQLHESQKDYSKGFGGKYGVQKDRMDKNASTFEDVTQVSSAYQKTVPVEAVTSKTSNIRANFENLAKEKEQEDRRKAEAERAQRMAKERQEQEEARRKLEEQARAKTQTPPVSPAPQPTEERLPSSPVYEDAASFKAELSYRGPVSGTEPEPVYSMEAADYREASSQQGLAYATEAVYESAEAPGHYPAEDSTYDEYENDLGITAVALYDYQAAGDDEISFDPDDIITNIEMIDDGWWRGVCKGRFRELAFSCVRVALVPIKCSRDLPGQARGLRSALWRVGRKDCPRRGASSRVSLLGRRGLGLMEVNPELSHPEHRSCHVRWEICLCHTVTARRIRKLISFLRSREAGPVPSCSQVGGVSFQKVTWKCLGTWVPECP

SEQ ID NO: 968 - protein, 513 aa, Homo sapiens
MWKASAGHAVSIAQDDAGADDWETDPDFVNDVSEKEQRWGAKTVQGSGHQEHINIHKLRENVFQEHQTLKEKELETGPKASHGYGGKFGVEQDRMDKSAVGHEYQSKLSKHCSQVDSVRGFGGKFGVQMDRVDQSAVGFEYQGKTEKHASQKDYSSGFGGKYGVQADRVDKSAVGFDYQGKTEKHESQRDYSKGFGGKYGIDKDKVDKSAVGFEYQGKTEKHESQKDYVKGFGGKFGVQTDRQDKCALGWDHQEKLQLHESQKDYSKGFGGKYGVQKDRMDKNASTFEDVTQVSSAYQKTVPVEAVTSKTSNIRANFENLAKEKEQEDRRKAEAERAQRMAKERQEQEEARRKLEEQARAKTQTPPVSPAPQPTEERLPSSPVYEDAASFKAELSYRGPVSGTEPEPVYSMEAADYREASSQQGLAYATEAVYESAEAPGHYPAEDSTYDEYENDLGITAVALYDYQAAGDDEISFDPDDIITNIEMIDDGWWRGVCKGRYGLFPANYVELRQ

SEQ ID NO: 969 - protein, 167 aa, Homo sapiens
MADEATRRVVSEIPVLKTNAGPRDRELWVQRLKEEYQSLIRYVENNKNADNDWFRLESNKEGTRWFGKCWYIHDLLKYEFDIEFDIPITYPTTAPEIAVPELDGKTAKMYRGGKICLTDHFKPLWARNVPKFGLAHLMALGLGPWLAVEIPDLIQKGVIQHKEKCNQ

SEQ ID NO: 970 - protein, 508 aa, Homo sapiens
MADGQVAELLLRRLEASDGGLDSAELAAELGMEHQAVVGAVKSLQALGEVIEAELRSTKHWELTAEGEEIAREGSHEARVFRSIPPEGLAQSELMRLPSGKVGFSKAMSNKWIRVDKSAADGPRVFRVVDSMEDEVQRRLQLVRGGQAEKLGEKERSELRKRKLLAEVTLKTYWVSKGSAFSTSISKQETELSPEMISSGSWRDRPFKPYNFLAHGVLPDSGHLHPLLKVRSQFRQIFLEMGFTEMPTDNFIESSFWNFDALFQPQQHPARDQHDTFFLRDPAEALQLPMDYVQRVKRTHSQGGYGSQGYKYNWKLDEARKNLLRTHTTSASARALYRLAQKKPFTPVKYFSIDRVFRNETLDATHLAEFHQIEGVVADHGLTLGHLMGVLREFFTKLGITQLRFKPAYNPYTEPSMEVFSYHQGLKKWVEVGNSGVFRPEMLLPMGLPENVSVIAWGLSLERPTMIKYGINNIRELVGHKVNLQMVYDSPLCRLDAEPRPPPTQEAA

SEQ ID NO: 971 - protein, 477 aa, Homo sapiens
MADGQVAELLLRRLEASDGGLDSAELAAELGMEHQAVVGAVKSLQALGEVIEAELRSTKHWELTAEGEEIAREGSHEARVFRSIPPEGLAQSELMRLPSGKVGFSKAMSNKWIRVDKSAADGPRVFRVVDSMEDEVQRRLQLVRGGQAEKLGEKERSELRKRKLLAEVGSWRDRPFKPYNFLAHGVLPDSGHLHPLLKVRSQFRQIFLEMGFTEMPTDNFIESSFWNFDALFQPQQHPARDQHDTFFLRDPAEALQLPMDYVQRVKRTHSQGGYGSQGYKYNWKLDEARKNLLRTHTTSASARALYRLAQKKPFTPVKYFSIDRVFRNETLDATHLAEFHQIEGVVADHGLTLGHLMGVLREFFTKLGITQLRFKPAYNPYTEPSMEVFSYHQGLKKWVEVGNSGVFRPEMLLPMGLPENVSVIAWGLSLERPTMIKYGINNIRELVGHKVNLQMVYDSPLCRLDAEPRPPPTQEAA

SEQ ID NO: 972 - protein, 1176 aa, Homo sapiens
MAERKGTAKVDFLKKIEKEIQQKWDTERVFEVNASNLEKQTSKGKYFVTFPYPYMNGRLHLGHTFSLSKCEFAVGYQRLKGKCCLFPFGLHCTGMPIKACADKLKREIELYGCPPDFPDEEEEEEETSVKTEDIIIKDKAKGKKSKAAAKAGSSKYQWGIMKSLGLSDEEIVKFSEAEHWLDYFPPLAIQDLKRMGLKVDWRRSFITTDVNPYYDSFVRWQFLTLRERNKIKFGKRYTIYSPKDGQPCMDHDRQTGEGVGPQEYTLLKLKVLEPYPSKLSGLKGKNIFLVAATLRPETMFGQTNCWVRPDMKYIGFETVNGDIFICTQKAARNMSYQGFTKDNGVVPVVKELMGEEILGASLSAPLTSYKVIYVLPMLTIKEDKGTGVVTSVPSDSPDDIAALRDLKKKQALRAKYGIRDDMVLPFEPVPVIEIPGFGNLSAVTICDELKIQSQNDREKLAEAKEKIYLKGFYEGIMLVDGFKGQKVQDVKKTIQKKMIDAGDALIYMEPEKQVMSRSSDECVVALCDQWYLDYGEENWKKQTSQCLKNLETFCEETRRNFEATLGWLQEHACSRTYGLGTHLPWDEQWLIESLSDSTIYMAFYTVAHLLQGGNLHGQAESPLGIRPQQMTKEVWDYVFFKEAPFPKTQIAKEKLDQLKQEFEFWYPVDLRVSGKDLVPNHLSYYLYNHVAMWPEQSDKWPTAVRANGHLLLNSEKMSKSTGNFLTLTQAIDKFSADGMRLALADAGDTVEDANFVEAMADAGILRLYTWVEWVKEMVANWDSLRSGPASTFNDRVFASELNAGIIKTDQNYEKMMFKEALKTGFFEFQAAKDKYRELAVEGMHRELVFRFIEVQTLLLAPFCPHLCEHIWTLLGKPDSIMNASWPVAGPVNEVLIHSSQYLMEVTHDLRLRLKNYMMPAKGKKTDKQPLQKPSHCTIYVAKNYPPWQHTTLSVLRKHFEANNGKLPDNKVIASELGSMPELKKYMKKVMPFVAMIKENLEKMGPRILDLQLEFDEKAVLMENIVYLTNSLELEHIEVKFASEAEDKIREDCCPGKPLNVFRIEPGVSVSLVNPQPSNGHFSTKIEIRQGDNCDSIIRRLMKMNRGIKDLSKVKLMRFDDPLLGPRRVPVLGKEYTEKTPISEHAVFNVDLMSKKIHLTENGIRVDIGDTIIYLVH

SEQ ID NO: 973 - protein, 1122 aa, Homo sapiens
MNGRLHLGHTFSLSKCEFAVGYQRLKGKCCLFPFGLHCTGMPIKACADKLKREIELYGCPPDFPDEEEEEEETSVKTEDIIIKDKAKGKKSKAAAKAGSSKYQWGIMKSLGLSDEEIVKFSEAEHWLDYFPPLAIQDLKRMGLKVDWRRSFITTDVNPYYDSFVRWQFLTLRERNKIKFGKRYTIYSPKDGQPCMDHDRQTGEGVGPQEYTLLKLKVLEPYPSKLSGLKGKNIFLVAATLRPETMFGQTNCWVRPDMKYIGFETVNGDIFICTQKAARNMSYQGFTKDNGVVPVVKELMGEEILGASLSAPLTSYKVIYVLPMLTIKEDKGTGVVTSVPSDSPDDIAALRDLKKKQALRAKYGIRDDMVLPFEPVPVIEIPGFGNLSAVTICDELKIQSQNDREKLAEAKEKIYLKGFYEGIMLVDGFKGQKVQDVKKTIQKKMIDAGDALIYMEPEKQVMSRSSDECVVALCDQWYLDYGEENWKKQTSQCLKNLETFCEETRRNFEATLGWLQEHACSRTYGLGTHLPWDEQWLIESLSDSTIYMAFYTVAHLLQGGNLHGQAESPLGIRPQQMTKEVWDYVFFKEAPFPKTQIAKEKLDQLKQEFEFWYPVDLRVSGKDLVPNHLSYYLYNHVAMWPEQSDKWPTAVRANGHLLLNSEKMSKSTGNFLTLTQAIDKFSADGMRLALADAGDTVEDANFVEAMADAGILRLYTWVEWVKEMVANWDSLRSGPASTFNDRVFASELNAGIIKTDQNYEKMMFKEALKTGFFEFQAAKDKYRELAVEGMHRELVFRFIEVQTLLLAPFCPHLCEHIWTLLGKPDSIMNASWPVAGPVNEVLIHSSQYLMEVTHDLRLRLKNYMMPAKGKKTDKQPLQKPSHCTIYVAKNYPPWQHTTLSVLRKHFEANNGKLPDNKVIASELGSMPELKKYMKKVMPFVAMIKENLEKMGPRILDLQLEFDEKAVLMENIVYLTNSLELEHIEVKFASEAEDKIREDCCPGKPLNVFRIEPGVSVSLVNPQPSNGHFSTKIEIRQGDNCDSIIRRLMKMNRGIKDLSKVKLMRFDDPLLGPRRVPVLGKEYTEKTPISEHAVFNVDLMSKKIHLTENGIRVDIGDTIIYLVH

SEQ ID NO: 974 - protein, 485 aa, Homo sapiens
MWPEQSDKWPTAVRANGHLLLNSEKMSKSTGNFLTLTQAIDKFSADGMRLALADAGDTVEDANFVEAMADAGILRLYTWVEWVKEMVANWDSLRSGPASTFNDRVFASELNAGIIKTDQNYEKMMFKEALKTGFFEFQAAKDKYRELAVEGMHRELVFRFIEVQTLLLAPFCPHLCEHIWTLLGKPDSIMNASWPVAGPVNEVLIHSSQYLMEVTHDLRLRLKNYMMPAKGKKTDKQPLQKPSHCTIYVAKNYPPWQHTTLSVLRKHFEANNGKLPDNKVIASELGSMPELKKYMKKVMPFVAMIKENLEKMGPRILDLQLEFDEKAVLMENIVYLTNSLELEHIEVKFASEAEDKIREDCCPGKPLNVFRIEPGVSVSLVNPQPSNGHFSTKIEIRQGDNCDSIIRRLMKMNRGIKDLSKVKLMRFDDPLLGPRRVPVLGKEYTEKTPISEHAVFNVDLMSKKIHLTENGIRVDIGDTIIYLVH

SEQ ID NO: 975 - protein, 1078 aa, Homo sapiens
MFGAASRMDTTAVCTGGVTESRGIVDSLQKFSSLPAYLPTNLHISNAEESFFLKEANQDLTRNSSLQARVEPFFIYRARTPPIINASYGPFSVEKIIPQELLLTSTAFGNMDKFPFNWKLKSHILDSSIYSNRPKVQTLFYVTGMGWDDSDLTEDLPCVKMFAFPEAREVAASCRLQGAPGLCVAELELLPEWFSSGLDLEPEEEIPALLGGTTMELFFTLYPADKAGQCPLEEEGKWENNIHSGLESPQQAFPARERIGSVVVYPTQDDLKWSLVSLDENVVISVPLNLVREGDTATFLVSLTSSSVADQFTLRIKAAAGVKITAVRVSSEDQWAVQEEIDNGSTQTSATLTCMGHRPDTQSRVNGSFYEILQVDFGIDNSSDLAGAQQITWQVEYPIEDSMSELVVSEIFVSQTTFVGIVPLAMDTEVLNTAILTGKPVSVPVKVVGVQEDGSVVDVSESVECKSADEDVIKVSNNCDSIFVNGKEMKSKVDTIVNFTHQHFTSQFEVTVWAPRLPLQIEISDTELSQIKGWRIPVAANRRPTRESDDEDDEEKKGRGCSLQYQHATVRVLTQFVAESPDLGQLTYMLGPDWQFDITDLVTEFMKVEEPKIAQLQDGRTLAGREPGITTVQVLSPLSDSILAEKTVIVLDDRVTIAELGVQLVAGMSLSLQPHRADKRAIVSTAAALDVLQSPQQEAIVSSWILFSDGSVTPLDIYDPKDYSVTVSSLDEMVVSVQANLESKWPIVVAEGEGQGPLIKLEMMISEPCQKTKRKSVLAVGKGNVKVKFEPSSDEHQGGSNDIEGINREYKDHLSNSIEREGNQERAVQEWFHRGTPVGQEESTNKSTTPQSPMEGKNKLLKSGGPDAFTSFPTQGKSPDPNNPSDLTVTSRGLTDLEIGMYALLCVFCLAILVFLINCVAFAWKYRHKRFAVSEQGNIPHSHDWVWLGNEVELLENPVDITLPSEECTTMIDRGLQFEERNFLLNGSSQKTFHSQLLRPSDYVYEKEIKNEPMNSSGPKRKRVKFTSYTTILPEDGGPYTNSILFDSDDNIKWVCQDMGLGDSQDFRDYMESLQDQM

SEQ ID NO: 976 - protein, 502 aa, Homo sapiens
MFGAASRMDTTAVCTGGVTESRGIVDSLQKFSSLPAYLPTNLHISNAEESFFLKEANQDLTRNSSLQARVEPFFIYRARTPPIINASYGPFSVEKIIPQELLLTSTAFGNMDKFPFNWKLKSHILDSSIYSNRPKVQTLFYVTGMGWDDSDLTEDLPCVKMFAFPEAREVAASCRLQGAPGLCVAELELLPEWFSSGLDLEPEEEIPALLGGTTMELFFTLYPADKAGQCPLEEEGKWENNIHSGLESPQQAFPARERIGSVVVYPTQDDLKWSLVSLDENVVISVPLNLVREGDTATFLVSLTSSSVADQFTLRIKAAAGVKITAVRVSSEDQWAVQEEIDNGSTQTSATLTCMGHRPDTQSRVNGSFYEILQVDFGIDNSSDLAGAQQITWQVEYPIEDSMSELVVSEIFVSQTTFVGIVPLAMDTEVLNTAILTGKPVSVPVKVVGVQEDGSVVDVSESVECKSADEDVIKVRGDLSTAVLSAQSFLSFLLLSPRSCSH

SEQ ID NO: 977 - protein, 590 aa, Homo sapiens
MKSKVDTIVNFTHQHFTSQFEVTVWAPRLPLQIEISDTELSQIKGWRIPVAANRRPTRESDDEDDEEKKGRGCSLQYQHATVRVLTQFVAESPDLGQLTYMLGPDWQFDITDLVTEFMKVEEPKIAQLQDGRTLAGREPGITTVQVLSPLSDSILAEKTVIVLDDRVTIAELGVQLVAGMSLSLQPHRADKRAIVSTAAALDVLQSPQQEAIVSSWILFSDGSVTPLDIYDPKDYSVTVSSLDEMVVSVQANLESKWPIVVAEGEGQGPLIKLEMMISEPCQKTKRKSVLAVGKGNVKVKFEPSSDEHQGGSNDIEGINREYKDHLSNSIEREGNQERAVQEWFHRGTPVGQEESTNKSTTPQSPMEGKNKLLKSGGPDAFTSFPTQGKSPDPNNPSDLTVTSRGLTDLEIGMYALLCVFCLAILVFLINCVAFAWKYRHKRFAVSEQGNIPHSHDWVWLGNEVELLENPVDITLPSEECTTMIDRGLQFEERNFLLNGSSQKTFHSQLLRPSDYVYEKEIKNEPMNSSGPKRKRVKFTSYTTILPEDGGPYTNSILFDSDDNIKWVCQDMGLGDSQDFRDYMESLQDQM

SEQ ID NO: 978 - protein, 578 aa, Homo sapiens
MRPALGHPRSVSSASGSFPPPPAAARLQPLFLRGGSFRGRRGSGDSSTSTSTSRGGGGGRRGGGGGSPSSSTGAEREDDDESLSVSKPLVPNAALLGPPAQVGAPAGPAPVAFSSSAATSSSTSTPTSSCSMTAADFGGGAAAGAVGGPGSRSAGGAGGTGTGSGASCCPCCCCCGCPDRPGRRGRRRGCAPSPRCRWGYQALSVVLLLAQGGLLDLYLIAVTDLYWCSWIATDLVVVVGWAIFFAKNSRGRRGGAASGAHNHHLHHHHAAPPLHLPAPSAATAGAKARGARGGAGGAGGGLGAAAAAGEFAFAYLAWLIYSIAFTPKVVLILGTSILDLIELRAPFGTTGFRLTMALSVPLLYSLVRAISEAGAPPGSAGPLLLQPQRHRAAGCFLGTCLDLLDSFTLVELMLEGRVPLPAHLRYLLIAVYFLTLASPVLWLYELNAAAAAAASWGQASGPGSCSRLLRLLGGCLVDVPLLALRCLLVVSYQQPLSIFMLKNLFFLGCRGLEALEGCWDRGNRASPSRARGGYGAPPSAPPPPPPPPQGGSQLGHCISENEGGAHGYVNTLAVASQN

SEQ ID NO: 979 - protein, 223 aa, Homo sapiens
MALSVPLLYSLVRAISEAGAPPGSAGPLLLQPQRHRAAGCFLGTCLDLLDSFTLVELMLEGRVPLPAHLRYLLIAVYFLTLASPVLWLYELNAAAAAAASWGQASGPGSCSRLLRLLGGCLVDVPLLALRCLLVVSYQQPLSIFMLKNLFFLGCRGLEALEGCWDRGNRASPSRARGGYGAPPSAPPPPPPPPQGGSQLGHCISENEGGAHGYVNTLAVASQN

SEQ ID NO: 980 - protein, 1074 aa, Homo sapiens
MAPGMSGRGGAALLCLSALLAHASGRSHPASPSPPGPQASPVLPVSYRLSHTRLAFFLREARPPSPAVANSSLQRSEPFVVFQTKELPVLNVSLGPFSTSQVVARELLQPSSTLDIPERLTVNWKVRAFIVRSHVPASQPVVQVLFYVAGRDWDDFGVTERLPCVRLHAFRDAREVKSSCRLSGGLATCLVRAELPLAWFGPPAPAAPPTARRKSPDGLEPEATGESQQAELYYTLHAPDASGGCGGSRRGAGPGVGARAESPTQHPLLRIGSISLFRPPPRRTLQEHRLDSNLMIRLPDRPLKPGEVLSILLYLAPNSSSPSSPSVEHFTLRVKAKKGVTLLGTKSRSGQWHVTSELLTGAKHSTATVDVAWAQSTPLPPREGQGPLEILQLDFEMENFTSQSVKRRIMWHIDYRGHGALPDLERAVTELTVIQRDVQAILPLAMDTEIINTAILTGRTVAIPVKVIAIEVNGLVLDISALVECESDNEDIIKVSSSCDYVFVSGKESRGSMNARVTFRYDVLNAPLEMTVWVPKLPLHIELSDARLSQVKGWRVPILPDRRSVRESEDEDEEEEERRQSASRGCTLQYQHATLQVFTQFHTTSSEGTDQVVTMLGPDWLVEVTDLVSDFMRVGDPRVAHMVDSSTLAGLEPGTTPFKVVSPLTEAVLGETLLTVTEEKVSITQLQAQVVASLALSLRPSPGSSHTILATTAAQQTLSFLKQEALLSLWLSYSDGTTAPLSLYSPRDYGLLVSSLDEHVATVTQDRAFPLVVAEAEGSGELLRAELTIAESCQKTKRKSVLATTPVGLRVHFGRDEEDPTYDYPGPSQPGPGGGEDEARGAGPPGSALPAPEAPGPGTASPVVPPTEDFLPLPTGFLQVPRGLTDLEIGMYALLGVFCLAILVFLINCIVFVLRYRHKRIPPEGQTSMDHSHHWVFLGNGQPLRVQGELSPPAGNPLETVPAFCHGDHHSSGSSQTSVQSQVHGRGDGSSGGSARDQAEDPASSPTSKRKRVKFTTFTTLPSEELAYDSVPAGEEDEEEEEDLGWGCPDVAGPTRPTAPPDLHNYMRRIKEIA

SEQ ID NO: 981 - protein, 249 aa, Homo sapiens
MDGKKCSVWMFLPLVFTLFTSAGLWIVYFIAVEDDKILPLNSAERKPGVKHAPYISIAGDDPPASCVFSQVMNMAAFLALVVAVLRFIQLKPKVLNPWLNISGLVALCLASFGMTLLGNFQLTNDEEIHNVGTSLTFGFGTLTCWIQAALTLKVNIKNEGRRVGIPRVILSASITLCVVLYFILMAQSIHMYAARVQWGLVMCFLSYFGTFAVEFRHYRYEIVCSEYQENFLSFSESLSEASEYQTDQV

SEQ ID NO: 982 - protein, 180 aa, Homo sapiens
MDGKKCSVWMFLPLVFTLFTSAGLWIVYFIAVEDDKILPLNSAERKPGVKHAPYISIAGDDPPASCVFSQVMNMAAFLALVVAVLRFIQLKPKVLNPWLNISGLVALCLASFGMTLLGNFQLTNDEEIHNVGTSLTFGFGTFAVEFRHYRYEIVCSEYQENFLSFSESLSEASEYQTDQV

SEQ ID NO: 983 - protein, 551 aa, Homo sapiens
MISPDPRPSPGLARWAESYEAKCERRQEIRESRRCRPNVTTCRQVGKTLRIQQREQLQRARLQQFFRRRNLELEEKGKAQHPQAREQGPSRRPGQVTVLKEPLSCARRISSPREQVTGTSSEVFPAQHPPPSGICRDLSDHLSSQAGGLPPQDTPIKKPPKHHRGTQTKAEGPTIKNDASQQTNYGVAVLDKEIIQLSDYLKEALQRELVLKQKMVILQDLLSTLIQASDSSWKGQLNEDKLKGKLRSLENQLYTCTQKYSPWGMKKVLLEMEDQKNSYEQKAKESLQKVLEEKMNAEQQLQSTQRSLALAEQKCEEWRSQYEALKEDWRTLGTQHRELESQLHVLQSKLQGADSRDLQMNQALRFLENEHQQLQAKIECLQGDRDLCSLDTQDLQDQLKRSEAEKLTLVTRVQQLQGLLQNQSLQLQEQEKLLTKKDQALPVWSPKSFPNEVEPEGTGKEKDWDLRDQLQKKTLQLQAKEKECRELHSELDNLSDEYLSCLRKLQHCREELNQSQQLPPRRQCGRWLPVLMVVIAAALAVFLANKDNLMI

SEQ ID NO: 984 - protein, 531 aa, Homo sapiens
MISPDPRPSPGLARWAESYEAKCERRQEIRESRRCRPNVTTCRQVGKTLRIQQREQLQRARLQQFFRRRNLELEEKGKAQHPQAREQGPSRRPGQVTGTSSEVFPAQHPPPSGICRDLSDHLSSQAGGLPPQDTPIKKPPKHHRGTQTKAEGPTIKNDASQQTNYGVAVLDKEIIQLSDYLKEALQRELVLKQKMVILQDLLSTLIQASDSSWKGQLNEDKLKGKLRSLENQLYTCTQKYSPWGMKKVLLEMEDQKNSYEQKAKESLQKVLEEKMNAEQQLQSTQRSLALAEQKCEEWRSQYEALKEDWRTLGTQHRELESQLHVLQSKLQGADSRDLQMNQALRFLENEHQQLQAKIECLQGDRDLCSLDTQDLQDQLKRSEAEKLTLVTRVQQLQGLLQNQSLQLQEQEKLLTKKDQALPVWSPKSFPNEVEPEGTGKEKDWDLRDQLQKKTLQLQAKEKECRELHSELDNLSDEYLSCLRKLQHCREELNQSQQLPPRRQCGRWLPVLMVVIAAALAVFLANKDNLMI

SEQ ID NO: 985 - protein, 353 aa, Homo sapiens
MISPDPRPSPGLARWAESYEAKCERRQEIRESRRCRPNVTTCRQVGKTLRIQQREQLQRARLQQFFRRRNLELEEKGKAQHPQAREQGPSRRPGQVTVLKEPLSCARRISSPREQVTGTSSEVFPAQHPPPSGICRDLSDHLSSQAGGLPPQDTPIKKPPKHHRGTQTKAEGPTIKNDASQQTNYGVAVLDKEIIQLSDYLKEALQRELVLKQKMVILQDLLSTLIQASDSSWKGQLNEDKLKGKLRSLENQLYTCTQKYSPWGMKKVLLEMEDQKNSYEQKAKESLQKVLEEKMNAEQQLQSTQRSLALAEQKCEEWRSQYEALKEDWRTLGTQHRELESQLHVLQSKLQIN

SEQ ID NO: 986 - protein, 474 aa, Homo sapiens
MAYIQLEPLNEGFLSRISGLLLCRWTCRHCCQKCYESSCCQSSEDEVEILGPFPAQTPPWLMASRSSDKDGDSVHTASEVPLTPRTNSPDGRRSSSDTSKSTYSLTRRISSLESRRPSSPLIDIKPIEFGVLSAKKEPIQPSVLRRTYNPDDYFRKFEPHLYSLDSNSDDVDSLTDEEILSKYQLGMLHFSTQYDLLHNHLTVRVIEARDLPPPISHDGSRQDMAHSNPYVKICLLPDQKNSKQTGVKRKTQKPVFEERYTFEIPFLEAQRRTLLLTVVDFDKFSRHCVIGKVSVPLCEVDLVKGGHWWKALIPSSQNEVELGELLLSLNYLPSAGRLNVDVIRAKQLLQTDVSQGSDPFVKIQLVHGLKLVKTKKTSFLRGTIDPFYNESFSFKVPQEELENASLVFTVFGHNMKSSNDFIGRIVIGQYSSGPSETNHWRRMLNTHRTAVEQWHSLRSRAECDRVSPASLEVT

SEQ ID NO: 987 - protein, 775 aa, Homo sapiens
MAALDSLSLFTSLGLSEQKARETLKNSALSAQLREAATQAQQTLGSTIDKATGILLYGLASRLRDTRRLSFLVSYIASKKIHTEPQLSAALEYVRSHPLDPIDTVDFERECGVGVIVTPEQIEEAVEAAINRHRPQLLVERYHFNMGLLMGEARAVLKWADGKMIKNEVDMQVLHLLGPKLEADLEKKFKVAKARLEETDRRTAKDVVENGETADQTLSLMEQLRGEALKFHKPGENYKTPGYVVTPHTMNLLKQHLEITGGQVRTRFPPEPNGILHIGHAKAINFNFGYAKANNGICFLRFDDTNPEKEEAKFFTAICDMVAWLGYTPYKVTYASDYFDQLYAWAVELIRRGLAYVCHQRGEELKGHNTLPSPWRDRPMEESLLLFEAMRKGKFSEGEATLRMKLVMEDGKMDPVAYRVKYTPHHRTGDKWCIYPTYDYTHCLCDSIEHITHSLCTKEFQARRSSYFWLCNALDVYCPVQWEYGRLNLHYAVVSKRKILQLVATGAVRDWDDPRLFTLTALRRRGFPPEAINNFCARVGVTVAQTTMEPHLLEACVRDVLNDTAPRAMAVLESLRVIITNFPAAKSLDIQVPNFPADETKGFHQVPFAPIVFIERTDFKEEPEPGFKRLAWGQPVGLRHTGYVIELQHVVKGPSGCVESLEVTCRRADAGEKPKAFIHWVSQPLMCEVRLYERLFQHKNPEDPTEVPGGFLSDLNLASLHVVDAALVDCSVALAKPFDKFQFERLGYFSVDPDSHQGKLVFNRTVTLKEDPGKV

SEQ ID NO: 988 - protein, 764 aa, Homo sapiens
MAALDSLSLFTSLGLSEQKARETLKNSALSAQLREAATQAQQTLGSTIDKATGILLYGLASRLRDTRRLSFLVSYIATALEYVRSHPLDPIDTVDFERECGVGVIVTPEQIEEAVEAAINRHRPQLLVERYHFNMGLLMGEARAVLKWADGKMIKNEVDMQVLHLLGPKLEADLEKKFKVAKARLEETDRRTAKDVVENGETADQTLSLMEQLRGEALKFHKPGENYKTPGYVVTPHTMNLLKQHLEITGGQVRTRFPPEPNGILHIGHAKAINFNFGYAKANNGICFLRFDDTNPEKEEAKFFTAICDMVAWLGYTPYKVTYASDYFDQLYAWAVELIRRGLAYVCHQRGEELKGHNTLPSPWRDRPMEESLLLFEAMRKGKFSEGEATLRMKLVMEDGKMDPVAYRVKYTPHHRTGDKWCIYPTYDYTHCLCDSIEHITHSLCTKEFQARRSSYFWLCNALDVYCPVQWEYGRLNLHYAVVSKRKILQLVATGAVRDWDDPRLFTLTALRRRGFPPEAINNFCARVGVTVAQTTMEPHLLEACVRDVLNDTAPRAMAVLESLRVIITNFPAAKSLDIQVPNFPADETKGFHQVPFAPIVFIERTDFKEEPEPGFKRLAWGQPVGLRHTGYVIELQHVVKGPSGCVESLEVTCRRADAGEKPKAFIHWVSQPLMCEVRLYERLFQHKNPEDPTEVPGGFLSDLNLASLHVVDAALVDCSVALAKPFDKFQFERLGYFSVDPDSHQGKLVFNRTVTLKEDPGKV

SEQ ID NO: 989 - protein, 318 aa, Homo sapiens
MADKVQTTLLFLAVGEFSVGILGNAFIGLVNCMDWVKKRKIASIDLILTSLAISRICLLCVILLDCFILVLYPDVYATGKEMRIIDFFWTLTNHLSIWFATCLSIYYFFKIGNFFHPLFLWMKWRIDRVISWILLGCVVLSVFISLPATENLNADFRFCVKAKRKTNLTWSCRVNKTQHASTKLFLNLATLLPFCVCLMSFFLLILSLRRHIRRMQLSATGCRDPSTEAHVRALKAVISFLLLFIAYYLSFLIATSSYFMPETELAVIFGESIALIYPSSHSFILILGNNKLRHASLKVIWKVMSILKGRKFQQHKQI

SEQ ID NO: 990 - protein, 360 aa, Homo sapiens
MALHSMRKARERWSFIRALHKGSAAAPALQKDSKKRVFSGIQPTGILHLGNYLGAIESWVRLQDEYDSVLYSIVDLHSITVPQDPAVLRQSILDMTAVLLACGINPEKSILFQQSQVSEHTQLSWILSCMVRLPRLQHLHQWKAKTTKQKHDGTVGLLTYPVLQAADILLYKSTHVPVGEDQVQHMELVQDLAQGFNKKYGEFFPVPESILTSMKKVKSLRDPSAKMSKSDPDKLATVRITDSPEEIVQKFRKAVTDFTSEVTYDPAGRAGVSNIVAVHAAVTGLSVEEVVRRSAGMNTARYKLAVADAVIEKFAPIKREIEKLKLDKDHLEKVLQIGSAKAKELAYTVCQEVKKLVGFL

SEQ ID NO: 991 - protein, 220 aa, Homo sapiens
MALHSMRKARERWSFIRALHKGSAAAPALQKDSKKRVFSGIQPTGILHLGNYLGAIESWVRLQDEYDSVLYSIVDLHSITVPQDPAVLRQSILDMTAVLLACGINPEKSILFQQSQVSEHTQLSWILSCMVRLPRLQHLHQWKAKTTKQKHDGTVGLLTYPVLQAADILLYKSTHVPVGEDQVQHMELVQDLAQGFNKKYGEFFPVPESILSMCVLVFLT

SEQ ID NO: 992 - protein, 349 aa, Homo sapiens
MHQSLTQQRSSDMSLPDSMGAFNRRKRNSIYVTVTLLIVSVLILTVGLAATTRTQNVTVGGYYPGVILGFGSFLGIIGSNLIENKRQMLVASIVFISFGVIAAFCCAIVDGVFAARHIDLKPLYANRCHYVPKTSQKEAEEVISSSTKNSPSTRVMRNLTQAAREVNCPHLSREFCTPRIRGNTCFCCDLYNCGNRVEITGGYYEYIDVSSCQDIIHLYHLLWSATILNIVGLFLGIITAAVLGGFKDMNPTLPALNCSVENTHPTVSYYAHPQVASYNTYYHSPPHLPPYSAYDFQHSGVFPSSPPSGLSDEPQSASPSPSYMWSSSAPPRYSPPYYPPFEKPPPYSP

SEQ ID NO: 993 - protein, 185 aa, Homo sapiens
MVNCPHLSREFCTPRIRGNTCFCCDLYNCGNRVEITGGYYEYIDVSSCQDIIHLYHLLWSATILNIVGLFLGIITAAVLGGFKDMNPTLPALNCSVENTHPTVSYYAHPQVASYNTYYHSPPHLPPYSAYDFQHSGVFPSSPPSGLSDEPQSASPSPSYMWSSSAPPRYSPPYYPPFEKPPPYSP

SEQ ID NO: 994 - protein, 325 aa, Homo sapiens
MHQSLTQQRSSDMSLPDSMGAFNRRKRNSIYVTVTLLIVSVLILTVGLAATTRTQNVTVGGYYPGVILGFGSFLGIIGSNLIENKRQMLVASIVFISFGVIAAFCCAIVDGVFAARHIDLKPLYANRCHYVPKTSQKEAEEVNCPHLSREFCTPRIRGNTCFCCDLYNCGNRVEITGGYYEYIDVSSCQDIIHLYHLLWSATILNIVGLFLGIITAAVLGGFKDMNPTLPALNCSVENTHPTVSYYAHPQVASYNTYYHSPPHLPPYSAYDFQHSGVFPSSPPSGLSDEPQSASPSPSYMWSSSAPPRYSPPYYPPFEKPPPYSP

SEQ ID NO: 995 - protein, 241 aa, Homo sapiens
MHQSLTQQRSSDMSLPDSMGAFNRRKRNSIYVTVTLLIVSVLILTVGLAATTRTQNVTVGGYYPGVILGFGSFLGIIGSNLIENKRQMLVASIVFISFGVIAAFCCAIVDGVFAARHIDLKPLYANRCHYVPKTSQKEAEENPTLPALNCSVENTHPTVSYYAHPQVASYNTYYHSPPHLPPYSAYDFQHSGVFPSSPPSGLSDEPQSASPSPSYMWSSSAPPRYSPPYYPPFEKPPPYSP

SEQ ID NO: 996 - protein, 303 aa, Homo sapiens
MESALPSIFTLVIIAEFIIGNLSNGFIVLINCIDWVSKRELSSVDKLLIILAISRIGLIWEILVSWFLALHYLAIFVSGTGLRIMIFSWIVSNHFNLWLATIFSIFYLLKIASFSSPAFLYLKWRVNKVILMILLGTLVFLFLNLIQINMHIKDWLDRYERNTTWNFSMSDFETFSVSVKFTMTMFSLTPFTVAFISFLLLIFSLQKHLQKMQLNYKGHRDPRTKVHTNALKIVISFLLFYASFFLCVLISWISELYQNTVIYMLCETIGVFSPSSHSFLLILGNAKLRQAFLLVAAKVWAKR

SEQ ID NO: 997 - protein, 1264 aa, Homo sapiens
MSTLYVSPHPDAFPSLRALIAARYGEAGEGPGWGGAHPRICLQPPPTSRTPFPPPRLPALEQGPGGLWVWGATAVAQLLWPAGLGGPGGSRAAVLVQQWVSYADTELIPAACGATLPALGLRSSAQDPQAVLGALGRALSPLEEWLRLHTYLAGEAPTLADLAAVTALLLPFRYVLDPPARRIWNNVTRWFVTCVRQPEFRAVLGEVVLYSGARPLSHQPGPEAPALPKTAAQLKKEAKKREKLEKFQQKQKIQQQQPPPGEKKPKPEKREKRDPGVITYDLPTPPGEKKDVSGPMPDSYSPRYVEAAWYPWWEQQGFFKPEYGRPNVSAANPRGVFMMCIPPPNVTGSLHLGHALTNAIQDSLTRWHRMRGETTLWNPGCDHAGIATQVVVEKKLWREQGLSRHQLGREAFLQEVWKWKEEKGDRIYHQLKKLGSSLDWDRACFTMDPKLSAAVTEAFVRLHEEGIIYRSTRLVNWSCTLNSAISDIEVDKKELTGRTLLSVPGYKEKVEFGVLVSFAYKVQGSDSDEEVVVATTRIETMLGDVAVAVHPKDTRYQHLKGKNVIHPFLSRSLPIVFDEFVDMDFGTGAVKITPAHDQNDYEVGQRHGLEAISIMDSRGALINVPPPFLGLPRFEARKAVLVALKERGLFRGIEDNPMVVPLCNRSKDVVEPLLRPQWYVRCGEMAQAASAAVTRGDLRILPEAHQRTWHAWMDNIREWCISRQLWWGHRIPAYFVTVSDPAVPPGEDPDGRYWVSGRNEAEAREKAAKEFGVSPDKISLQQDEDVLDTWFSSGLFPLSILGWPNQSEDLSVFYPGTLLETGHDILFFWVARMVMLGLKLTGRLPFREVYLHAIVRDAHGRKMSKSLGNVIDPLDVIYGISLQGLHNQLLNSNLDPSEVEKAKEGQKADFPAGIPECGTDALRFGLCAYMSQGRDINLDVNRILGYRHFCNKLWNATKFALRGLGKGFVPSPTSQPGGHESLVDRWIRSRLTEAVRLSNQGFQAYDFPAVTTAQYSFWLYELCDVYLECLKPVLNGVDQVAAECARQTLYTCLDVGLRLLSPFMPFVTEELFQRLPRRMPQAPPSLCVTPYPEPSECSWKDPEAEAALELALSITRAVRSLRADYNLTRIRPDCFLEVADEATGALASAVSGYVQALASAGVVAVLALGAPAPQGCAVALASDRCSIHLQLQGLVDPARELGKLQAKRVEAQRQAQRLRERRAASGYPVKVPLEVQEADEAKLQQTEAELRKVDEAIALFQKML

SEQ ID NO: 998 - protein, 297 aa, Homo sapiens
MPDSYSPRYVEAAWYPWWEQQGFFKPEYGRPNVSAANPRGVFMMCIPPPNVTGSLHLGHALTNAIQDSLTRWHRMRGETTLWNPGCDHAGIATQVVVEKKLWREQGLSRHQLGREAFLQEVWKWKEEKGDRIYHQLKKLGSSLDWDRACFTMDPKLSAAVTEAFVRLHEEGIIYRSTRLVNWSCTLNSAISDIEVDKKELTGRTLLSVPGYKEKVEFGVLVSFAYKVQGSDSDEEVVVATTRIETMLGDVAVAVHPKDTRYQHLKGKNVIHPFLSRSLPIVFDEFVDMDFGTGPAQV

SEQ ID NO: 999 - protein, 211 aa, Homo sapiens
MDDAHESPSDKGGETGESDETAAVPGDPGATDTDGIPEETDGDADVDLKEAAAEEGELESQDVSDLTTVEREDSSLLNPAAKKLKIDTKEKKEKKQKVDEDEIQKMQILVSSFSEEQLNRYEMYRRSAFPKAAIKRLIQSITGTSVSQNVVIAMSGISKVFVGEVVEEALDVCEKWGEMPPLQPKHMREAVRRLKSKGQIPNSKHKKIIFF

SEQ ID NO: 1000 - protein, 154 aa, Homo sapiens
MDDAHESPSDKGGETGESDETAAVPGDPGATDTDGIPEETDGDADVDLKEAAAEEGELESQDVSDLTTVEREDSSLLNPAAKKLKIDTKEKKEKKQKVDEDEIQKMQILVSSFSEEQLNRYEMYRRSAFPKAAIKRHWMCVRSGEKCHHYNPNI

SEQ ID NO: 1001 - protein, 291 aa, Homo sapiens
MIPIQLTVFFMIIYVLESLTIIVQSSLIVAVLGREWLQVRRLMPVDMILISLGISRFCLQWASMLNNFCSYFNLNYVLCNLTITWEFFNILTFWLNSLLTVFYCIKVSSFTHHIFLWLRWRILRLFPWILLGSLMITCVTIIPSAIGNYIQIQLLTMEHLPRNSTVTDKLENFHQYQFQAHTVALVIPFILFLASTIFLMASLTKQIQHHSTGHCNPSMKARFTALRSLAVLFIVFTSYFLTILITIIGTLFDKRCWLWVWEAFVYAFILMHSTSLMLSSPTLKRILKGKC

SEQ ID NO: 1002 - protein, 314 aa, Homo sapiens
MGARGALLLALLLARAGLRKPESQEAAPLSGPCGRRVITSRIVGGEDAELGRWPWQGSLRLWDSHVCGVSLLSHRWALTAAHCFETYSDLSDPSGWMVQFGQLTSMPSFWSLQAYYTRYFVSNIYLSPRYLGNSPYDIALVKLSAPVTYTKHIQPICLQASTFEFENRTDCWVTGWGYIKEDEALPSPHTLQEVQVAIINNSMCNHLFLKYSFRKDIFGDMVCAGNAQGGKDACFGDSGGPLACNKNGLWYQIGVVSWGVGCGRPNRPGVYTNISHHFEWIQKLMAQSGMSQPDPSWPLLFFPLLWALPLLGPV

SEQ ID NO: 1003 - protein, 312 aa, Homo sapiens
MGARGALLLALLLARAGLRKPESQEAAPLSGPCGRRVITSRIVGGEDAELGRWPWQGSLRLWDSHVCGVSLLSHRWALTAAHCFETDLSDPSGWMVQFGQLTSMPSFWSLQAYYTRYFVSNIYLSPRYLGNSPYDIALVKLSAPVTYTKHIQPICLQASTFEFENRTDCWVTGWGYIKEDEALPSPHTLQEVQVAIINNSMCNHLFLKYSFRKDIFGDMVCAGNAQGGKDACFGDSGGPLACNKNGLWYQIGVVSWGVGCGRPNRPGVYTNISHHFEWIQKLMAQSGMSQPDPSWPLLFFPLLWALPLLGPV

SEQ ID NO: 1004 - protein, 300 aa, Homo sapiens
MGARGALLLALLLARAGLRKPESQEAAPLSGPCGRRVITSRIVGGEDAELGRWPWQGSLRLWDSHVCGVSLLSHRWALTAAHCFETYSDLSDPSGWMVQFGQLTSMPSFWSLQAYYTRYFVSNIYLSPRYLGNSPYDIALVKLSAPVTYTKHIQPICLQASTFEFENRTDCWVTGWGYIKEDEALPSPHTLQEVQVAIINNSMCNHLFLKYSFRKDIFGDMGDSGGPLACNKNGLWYQIGVVSWGVGCGRPNRPGVYTNISHHFEWIQKLMAQSGMSQPDPSWPLLFFPLLWALPLLGPV

SEQ ID NO: 1005 - protein, 375 aa, Homo sapiens
MMEDDGQPRTLYVGNLSRDVTEVLILQLFSQIGPCKSCKMITEHTSNDPYCFVEFYEHRDAAAALAAMNGRKILGKEVKVNWATTPSSQKKDTSNHFHVFVGDLSPEITTEDIKSAFAPFGKISDARVVKDMATGKSKGYGFVSFYNKLDAENAIVHMGGQWLGGRQIRTNWATRKPPAPKSTQENNTKQLRFEDVVNQSSPKNCTVYCGGIASGLTDQLMRQTFSPFGQIMEIRVFPEKGYSFVRFSTHESAAHAIVSVNGTTIEGHVVKCYWGKESPDMTKNFQQVDYSQWGQWSQVYGNPQQYGQYMANGWQVPPYGVYGQPWNQQGFGVDQSPSAAWMGGFGAQPPQGQAPPPVIPPPNQAGYGMASYQTQ

SEQ ID NO: 1006 - protein, 392 aa, Homo sapiens
MMEDDGQPRTLYVGNLSRDVTEVLILQLFSQIGPCKSCKMITEQPDSRRVNSSVGFSVLQHTSNDPYCFVEFYEHRDAAAALAAMNGRKILGKEVKVNWATTPSSQKKDTSNHFHVFVGDLSPEITTEDIKSAFAPFGKISDARVVKDMATGKSKGYGFVSFYNKLDAENAIVHMGGQWLGGRQIRTNWATRKPPAPKSTQENNTKQLRFEDVVNQSSPKNCTVYCGGIASGLTDQLMRQTFSPFGQIMEIRVFPEKGYSFVRFSTHESAAHAIVSVNGTTIEGHVVKCYWGKESPDMTKNFQQVDYSQWGQWSQVYGNPQQYGQYMANGWQVPPYGVYGQPWNQQGFGVDQSPSAAWMGGFGAQPPQGQAPPPVIPPPNQAGYGMASYQTQ

SEQ ID NO: 1007 - protein, 1606 aa, Homo sapiens
MFPKSNLTVTCWVWRSMRKLFLLLSLLLSHAAHLEGKKDNQFIWKPGPWGRCTGDCGPGGVQSRAVWCFHVDGWTSHLSNCGESNRPPKERSCFRVCDWHSDLFQWEVSDWHHCVLVPYARGEVKPRTAECVTAQHGLQHRMVRCIQKLNRTVVANEICEHFALQPPTEQACLIPCPRDCVVSEFLPWSNCSKGCGKKLQHRTRAVIAPPLFGGLQCPNLTESRACDAPISCPLGEEEYTFSLKVGPWSKCRLPHLKEINPSGRTVLDFNSDSNERVTFKHQSYKAHHHSKSWAIEIGYQTRQVSCTRSDGQNAMLSLCLQDSFPLTVQSCIMPKDCETSQWSSWSPCSKTCRSGSLLPGFRSRSRNVKHMAIGGGKECPELLEKEACIVEGELLQQCPRYSWRTSEWKECQVSLLLEQQDPHWHVTGPVCGGGIQTREVYCAQSVPAAAALRAKEVSRPVEKALCVGPAPLPSQLCNIPCSTDCIVSSWSAWGLCIHENCHDPQGKKGFRTRQRHVLMESTGPAGHCPHLVESVPCEDPMCYRWLASEGICFPDHGKCGLGHRILKAVCQNDRGEDVSGSLCPVPPPPERKSCEIPCRMDCVLSEWTEWSSCSQSCSNKNSDGKQTRSRTILALAGEGGKPCPPSQALQEHRLCNDHSCMQLHWETSPWGPCSEDTLVTALNATIGWNGEATCGVGIQTRRVFCVKSHVGQVMTKRCPDSTRPETVRPCFLPCKKDCIVTAFSEWTPCPRMCQAGNATVKQSRYRIIIQEAANGGQECPDTLYEERECEDVSLCPVYRWKPQKWSPCILVPESVWQGITGSSEACGKGLQTRAVSCISDDNRSAEMMECLKQTNGMPLLVQECTVPCREDCTFTAWSKFTPCSTNCEATKSRRRQLTGKSRKKEKCQDSDLYPLVETELCPCDEFISQPYGNWSDCILPEGRREPHRGLRVQADSKECGEGLRFRAVACSDKNGRPVDPSFCSSSGYIQEKCVIPCPFDCKLSDWSSWGSCSSSCGIGVRIRSKWLKEKPYNGGRPCPKLDLKNQVHEAVPCYSECNQYSWVVEHWSSCKINNELRSLRCGGGTQSRKIRCVNTADGEGGAVDSNLCNQDEIPPETQSCSLMCPNECVMSEWGLWSKCPQSCDPHTMQRRTRHLLRPSLNSRTCAEDSQVQPCLLNENCFQFQYNLTEWSTCQLSENAPCGQGVRTRLLSCVCSDGKPVSMDQCEQHNLEKPQRMSIPCLVECVVNCQLSGWTAWTECSQTCGHGGRMSRTRFIIMPTQGEGRPCPTELTQEKTCPVTPCYSWVLGNWSACKLEGGDCGEGVQIRSLSCMVHSGSISHAAGRVEDALCGEMPFQDSILKQLCSVPCPGDCHLTEWSEWSTCELTCIDGRSFETVGRQSRSRTFIIQSFENQDSCPQQVLETRPCTGGKCYHYTWKASLWNNNERTVWCQRSDGVNVTGGCSPQARPAAIRQCIPACRKPFSYCTQGGVCGCEKGYTEIMKSNGFLDYCMKVPGSEDKKADVKNLSGKNRPVNSKIHDIFKGWSLQPLDPDGRVKIWVYGVSGGAFLIMIFLIFTSYLVCKKPKPHQSTPPQQKPLTLAYDGDLDM

SEQ ID NO: 1008 - protein, 545 aa, Homo sapiens
MMGHRPVLVLSQNTKRESGRKVQSGNINAAKTIADIIRTCLGPKSMMKMLLDPMGGIVMTNDGNAILREIQVQHPAAKSMIEISRTQDEEVGDGTTSVIILAGEMLSVAEHFLEQQMHPTVVISAYRKALDDMISTLKKISIPVDISDSDMMLNIINSSITTKAISRWSSLACNIALDAVKMVQFEENGRKEIDIKKYARVEKIPGGIIEDSCVLRGVMINKDVTHPRMRRYIKNPRIVLLDSSLEYKKGESQTDIEITREEDFTRILQMEEEYIQQLCEDIIQLKPDVVITEKGISDLAQHYLMRANITAIRRVRKTDNNRIARACGARIVSRPEELREDDVGTGAGLLEIKKIGDEYFTFITDCKDPKACTILLRGASKEILSEVERNLQDAMQVCRNVLLDPQLVPGGGASEMAVAHALTEKSKAMTGVEQWPYRAVAQALEVIPRTLIQNCGASTIRLLTSLRAKHTQENCETWGVNGETGTLVDMKELGIWEPLAVKLQTYKTAVETAVLLLRIDDIVSGHKKKGDDQSRQGGAPDAGQE

SEQ ID NO: 1009 - protein, 507 aa, Homo sapiens
MMGHRPVLVLSQNTKRESGRKVQSGNINAAKIQVQHPAAKSMIEISRTQDEEVGDGTTSVIILAGEMLSVAEHFLEQQMHPTVVISAYRKALDDMISTLKKISIPVDISDSDMMLNIINSSITTKAISRWSSLACNIALDAVKMVQFEENGRKEIDIKKYARVEKIPGGIIEDSCVLRGVMINKDVTHPRMRRYIKNPRIVLLDSSLEYKKGESQTDIEITREEDFTRILQMEEEYIQQLCEDIIQLKPDVVITEKGISDLAQHYLMRANITAIRRVRKTDNNRIARACGARIVSRPEELREDDVGTGAGLLEIKKIGDEYFTFITDCKDPKACTILLRGASKEILSEVERNLQDAMQVCRNVLLDPQLVPGGGASEMAVAHALTEKSKAMTGVEQWPYRAVAQALEVIPRTLIQNCGASTIRLLTSLRAKHTQENCETWGVNGETGTLVDMKELGIWEPLAVKLQTYKTAVETAVLLLRIDDIVSGHKKKGDDQSRQGGAPDAGQE

SEQ ID NO: 1010 - protein, 507 aa, Homo sapiens
MCDIEEATNQLLDVNLHENQKSVQVTESDLGSESELLVTIGATVPTGFEQTAADEVREKLGSSCKISRDRGKIYFVISVESLAQVHCLRSVDNLFVVVQEFQDYQFKQTKEEVLKDFEDLAGKLPWSNPLKVWKINASFKKKKAKRKKINQNSSKEKINNGQEVKIDQRNVKKEFTSHALDSHILDYYENPAIKEDVSTLIGDDLASCKDETDESSKEETEPQVLKFRVTCNRAGEKHCFTSNEAARDFGGAVQDYFKWKADMTNFDVEVLLNIHDNEVIVGIALTEESLHRRNITHFGPTTLRSTLAYGMLRLCDPLPYDIIVDPMCGTGAIPIEGATEWSDCFHIAGDNNPLAVNRAANNIASLLTKSQIKEGKPSWGLPIDAVQWDICNLPLRTGSVDIIVTDLPFGKRMGSKKRNWNLYPACLREMSRVCTPTTGRAVLLTQDTKCFTKALSGMRHVWRKVDTVWVNVGGLRAAVYVLIRTPQAFVHPSEQDGERGTLWQCKE

SEQ ID NO: 1011 - protein, 530 aa, Homo sapiens
MAAIKAVNSKAEVARARAALAVNICAARGLQDVLRTNLGPKGTMKMLVSGAGDIKLTKDGNVLLDEMQIQHPTASLIAKVATAQDDVTGDGTTSNVLIIGELLKQADLYISEGLHPRIIAEGFEAAKIKALEVLEEVKVTKEMKRKILLDVARTSLQTKVHAELADVLTEVVVDSVLAVRRPGYPIDLFMVEIMEMKHKLGTDTKLIQGLVLDHGARHPDMKKRVEDAFILICNVSLEYEKTEVNSGFFYKTAEEKEKLVKAERKFIEDRVQKIIDLKDKVCAQSNKGFVVINQKGIDPFSLDSLAKHGIVALRRAKRRNMERLSLACGGMAVNSFEDLTVDCLGHAGLVYEYTLGEEKFTFIEECVNPCSVTLLVKGPNKHTLTQVKDAIRDGLRAIKNAIEDGCMVPGAGAIEVAMAEALVTYKNSIKGRARLGVQAFADALLIIPKVLAQNAGYDPQETLVKVQAEHVESKQLVGVDLNTGEPMVAADAGVWDNYCVKKQLLHSCTVIATNILLVDEIMRAGMSSLK

SEQ ID NO: 1012 - protein, 485 aa, Homo sapiens
MAAIKAVNSKAEVARARAALAVNICAARGLQDVLRTNLGPKGTMKMLVSGAGDIKLTKDGNVLLDEMGLHPRIIAEGFEAAKIKALEVLEEVKVTKEMKRKILLDVARTSLQTKVHAELADVLTEVVVDSVLAVRRPGYPIDLFMVEIMEMKHKLGTDTKLIQGLVLDHGARHPDMKKRVEDAFILICNVSLEYEKTEVNSGFFYKTAEEKEKLVKAERKFIEDRVQKIIDLKDKVCAQSNKGFVVINQKGIDPFSLDSLAKHGIVALRRAKRRNMERLSLACGGMAVNSFEDLTVDCLGHAGLVYEYTLGEEKFTFIEECVNPCSVTLLVKGPNKHTLTQVKDAIRDGLRAIKNAIEDGCMVPGAGAIEVAMAEALVTYKNSIKGRARLGVQAFADALLIIPKVLAQNAGYDPQETLVKVQAEHVESKQLVGVDLNTGEPMVAADAGVWDNYCVKKQLLHSCTVIATNILLVDEIMRAGMSSLK

SEQ ID NO: 1013 - protein, 493 aa, Homo sapiens
MAAIKAVNSKAEVARARAALAVNICAARGLQDVLRTNLGPKGTMKMLVSGAGDIKLTKDGNVLLDEMQIQHPTASLIAKVATAQDDVTGDGTTSNVLIIGELLKQADLYISEGLHPRIIAEGFEAAKIKALEVLEEVKVTKEMKRKILLDVARTSLQTKVHAELADVLTEVVVDSVLAVRRPGYPIDLFMVEIMEMKHKLGTDTKEVNSGFFYKTAEEKEKLVKAERKFIEDRVQKIIDLKDKVCAQSNKGFVVINQKGIDPFSLDSLAKHGIVALRRAKRRNMERLSLACGGMAVNSFEDLTVDCLGHAGLVYEYTLGEEKFTFIEECVNPCSVTLLVKGPNKHTLTQVKDAIRDGLRAIKNAIEDGCMVPGAGAIEVAMAEALVTYKNSIKGRARLGVQAFADALLIIPKVLAQNAGYDPQETLVKVQAEHVESKQLVGVDLNTGEPMVAADAGVWDNYCVKKQLLHSCTVIATNILLVDEIMRAGMSSLK

SEQ ID NO: 1014 - protein, 123 aa, Homo sapiens
MMANHLVKPDNRNCKRPRELESPVPDSPQLSSLGKSDSSFSEISGLFYKDEALEKDLNDVSKEINLMLSTYAKLLSERAAVDASYIDEIDELFKEANAIENFLIQKREFLRQRFTVIANTLHR

SEQ ID NO: 1015 - protein, 478 aa, Homo sapiens
MACLNPVPKLYRSVIEDVIEGVRNLFAEEGIEEQVLKDLKQLWETKVLQSKATEDFFRNSIQSPLFTLQLPHSLHQTLQSSTASLVIPAGRTLPSFTTAELGTSNSSANFTFPGYPIHVPAGVTLQTVSGHLYKVNVPIMVTETSGRAGILQHPIQQVFQQLGQPSVIQTSVPQLNPWSLQATTEKSQRIETVLQQPAILPSGPVDRKHLENATSDILVSPGNEHKIVPEALLCHQESSHYISLPGVVFSPQVSQTNSNVESVLSGSASMAQNLHDESLSTSPHGALHQHVTDIQLHILKNRMYGCDSVKQPRNIEEPSNIPVSEKDSNSQVDLSIRVTDDDIGEIIQVDGSGDTSSNEEIGSTRDADENEFLGNIDGGDLKVPEEEADSISNEDSATNSSDNEDPQVNIVEEDPLNSGDDVSEQDVPDLFDTDNVIVCQYDKIHRSKNKWKFYLKDGVMCFGGRDYVFAKAIGDAEW

SEQ ID NO: 1016 - protein, 444 aa, Homo sapiens
MACLNPVLWETKVLQSKATEDFFRNSIQSPLFTLQLPHSLHQTLQSSTASLVIPAGRTLPSFTTAELGTSNSSANFTFPGYPIHVPAGVTLQTVSGHLYKVNVPIMVTETSGRAGILQHPIQQVFQQLGQPSVIQTSVPQLNPWSLQATTEKSQRIETVLQQPAILPSGPVDRKHLENATSDILVSPGNEHKIVPEALLCHQESSHYISLPGVVFSPQVSQTNSNVESVLSGSASMAQNLHDESLSTSPHGALHQHVTDIQLHILKNRMYGCDSVKQPRNIEEPSNIPVSEKDSNSQVDLSIRVTDDDIGEIIQVDGSGDTSSNEEIGSTRDADENEFLGNIDGGDLKVPEEEADSISNEDSATNSSDNEDPQVNIVEEDPLNSGDDVSEQDVPDLFDTDNVIVCQYDKIHRSKNKWKFYLKDGVMCFGGRDYVFAKAIGDAEW

SEQ ID NO: 1017 - protein, 104 aa, Homo sapiens
MKSCQKMEGKPENESEPKHEEEPKPEEKPEEEEKLEEEAKAKGTFRERLIQSLQEFKEDIHNRHLSNEDMFREVDEIDEIRRVRNKLIVMRWKVNRNHPYPYLM

SEQ ID NO: 1018 - protein, 257 aa, Homo sapiens
MPARCVAAHCGNTTKSGKSLFRFPKDRAVRLLWDRFVRGCRADWYGGNDRSVICSDHFAPACFDVSSVIQKNLRFSQRLRLVAGAVPTLHRVPAPAPKRGEEGDQAGRLDTRGELQAARHSEAAPGPVSCTRPRAGKQAAASQITCENELVQTQPHADNPSNTVTSVPTHCEEGPVHKSTQISLKRPRHRSVGIQAKVKAFGKRLCNATTQTEELWSRTSSLFDIYSSDSETDTDWDIKSEQSDLSYMAVQVKEETC

SEQ ID NO: 1019 - protein, 316 aa, Homo sapiens
MASTSRLDALPRVTCPNHPDAILVEDYRAGDMICPECGLVVGDRVIDVGSEWRTFSNDKATKDPSRVGDSQNPLLSDGDLSTMIGKGTGAASFDEFGNSKYQNRRTMSSSDRAMMNAFKEITTMADRINLPRNIVDRTNNLFKQVYEQKSLKGRANDAIASACLYIACRQEGVPRTFKEICAVSRISKKEIGRCFKLILKALETSVDLITTGDFMSRFCSNLCLPKQVQMAATHIARKAVELDLVPGRSPISVAAAAIYMASQASAEKRTQKEIGDIAGVADVTIRQSYRLIYPRAPDLFPTDFKFDTPVDKLPQL

SEQ ID NO: 1020 - protein, 1905 aa, Homo sapiens
MQSRLLLLGAPGGHGGPASRRMRLLLRQVVQRRPGGDRQRPEVRLLHAGSGADTGDTVNIGDVSYKLKIPKNPELVPQNYISDSLAQSVVQHLRWIMQKDLLGQDVFLIGPPGPLRRSIAMQYLELTKREVEYIALSRDTTETDLKQRREIRAGTAFYIDQCAVRAATEGRTLILEGLEKAERNVLPVLNNLLENREMQLEDGRFLMSAERYDKLLRDHTKKELDSWKIVRVSENFRVIALGLPVPRYSGNPLDPPLRSRFQARDIYYLPFKDQLKLLYSIGANVSAEKVSQLLSFATTLCSQESSTLGLPDFPLDSLAAAVQILDSFPMMPIKHAIQWLYPYSILLGHEGKMAVEGVLKRFELQDSGSSLLPKEIVKVEKMMENHVSQASVTIRIADKEVTIKVPAGTRLLSQPCASDRFIQTLSHKQLQAEMMQSHMVKDICLIGGKGCGKTVIAKNFADTLGYNIEPIMLYQDMTARDLLQQRYTLPNGDTAWRSSPLVNAALEGKLVLLDGIHRVNAGTLAVLQRLIHDRELSLYDGSRLLREDRYMRLKEELQLSDEQLQKRSIFPIHPSFRIIALAEPPVIGSTAHQWLGPEFLTMFFFHYMKPLVKSEEIQVIKEKVPNVPQEALDKLLSFTHKLRETQDPTAQSLAASLSTRQLLRISRRLSQYPNENLHSAVTKACLSRFLPSLARSALEKNLADATIEINTDDNLEPELKDYKCEVTSGTLRIGAVSAPIYNAHEKMKVPDVLFYDNIQHVIVMEDMLKDFLLGEHLLLVGNQGVGKNKIVDRFLHLLNRPREYIQLHRDTTVQTLTLQPSVKDGLIVYEDSPLVKAVKLGHILVVDEADKAPTNVTCILKTLVENGEMILADGRRIVANSANVNGRENVVVIHPDFRMIVLANRPGFPFLGNDFFGTLGDIFSCHAVDNPKPHSELEMLRQYGPNVPEPILQKLVAAFGELRSLADQGIINYPYSTREVVNIVKHLQKFPTEGLSSVVRNVFDFDSYNNDMREILINTLHKYGIPIGAKPTSVQLAKELTLPEQTFMGYWTIGQARSGMQKLLCPVETHHIDIKGPALINIQEYPIERHEERSLNFTEECASWRIPLDEINIICDIATSHENEQNTLYVVTCNPASLYFMNMTGKSGFFVDFFDIFPRTANGVWHPFVTVAPLGSPLKGQVVLHEQQSNVILLLDTTGRALHRLILPSEKFTSKKPFWWNKEEAETYKMCKEFSHKNWLVFYKEKGNSLTVLDVLEGRTHTISLPINLKTVFLVAEDKWLLVESKTNQKYLLTKPAHIESEGSGVCQLYVLKEEPPSTGFGVTQETEFSIPHKISSDQLSSEHLSSAVEQKIASPNRILSDEKNYATIVVGFPDLMSPSEVYSWKRPSSLHKRSGTDTSFYRGKKKRGTPKQSNCVTLLDTNQVVRILPPGEVPLKDIYPKDVTPPQTSGYIEVTDLQSKKLRYIPIPRSESLSPYTTWLSTISDTDALLAEWDKSGVVTVDMGGHIRLWETGLERLQRSLMEWRNMIGQDDRNMQITINRDSGEDVSSPKHGKEDPDNMPHVGGNTWAGGTGGRDTAGLGGKGGPYRLDAGHTVYQVSQAEKDAVPEEVKRAAREMGQRAFQQRLKEIQMSEYDAATYERFSGAVRRQVHSLRIILDNLQAKGKERQWLRHQATGELDDAKIIDGLTGEKAIYKRRGELEPQLGSPQQKPKRLRLVVDVSGSMYRFNRMDGRLERTMEAVCMVMEAFENYEEKFQYDIVGHSGDGYNIGLVPMNKIPKDNKQRLEILKTMHAHSQFCMSGDHTLEGTEHAIKEIVKEEADEYFVIVLSDANLSRYGIHPAKFAQILTRDPQVNAFAIFIGSLGDQATRLQRTLPAGRSFVAMDTKDIPQILQQIFTSTMLSSV

SEQ ID NO: 1021 - protein, 1039 aa, Homo sapiens
MQSRLLLLGAPGGHGGPASRRMRLLLRQVVQRRPGGDRQRPEVRLLHAGSGADTGDTVNIGDVSYKLKIPKNPELVPQNYISDSLAQSVVQHLRWIMQKDLLGQDVFLIGPPGPLRRSIAMQYLELTKREVEYIALSRDTTETDLKQRREIRAGTAFYIDQCAVRAATEGRTLILEGLEKAERNVLPVLNNLLENREMQLEDGRFLMSAERYDKLLRDHTKKELDSWKIVRVSENFRVIALGLPVPRYSGNPLDPPLRSRFQARDIYYLPFKDQLKLLYSIGANVSAEKVSQLLSFATTLCSQESSTLGLPDFPLDSLAAAVQILDSFPMMPIKHAIQWLYPYSILLGHEGKMAVEGVLKRFELQDSGSSLLPKEIVKVEKMMENHVSQASVTIRIADKEVTIKVPAGTRLLSQPCASDRFIQTLSHKQLQAEMMQSHMVKDICLIGGKGCGKTVIAKNFADTLGYNIEPIMLYQDMTARDLLQQRYTLPNGDTAWRSSPLVNAALEGKLVLLDGIHRVNAGTLAVLQRLIHDRELSLYDGSRLLREDRYMRLKEELQLSDEQLQKRSIFPIHPSFRIIALAEPPVIGSTAHQWLGPEFLTMFFFHYMKPLVKSEEIQVIKEKVPNVPQEALDKLLSFTHKLRETQDPTAQSLAASLSTRQLLRISRRLSQYPNENLHSAVTKACLSRFLPSLARSALEKNLADATIEINTDDNLEPELKDYKCEVTSGTLRIGAVSAPIYNAHEKMKVPDVLFYDNIQHVIVMEDMLKDFLLGEHLLLVGNQGVGKNKIVDRFLHLLNRPREYIQLHRDTTVQTLTLQPSVKDGLIVYEDSPLVKAVKLGHILVVDEADKAPTNVTCILKTLVENGEMILADGRRIVANSANVNGRENVVVIHPDFRMIVLANRPGFPFLGNDFFGTLGDIFSCHAVDNPKPHSELEMLRQYGPNVPEPILQKLVAAFGELRSLADQGIINYPYSTREVVNIVKHLQKFPTEGLSSVVRNVFDFDSYNNDMREILINTLHKYGIPIGAKPTSVQLAKE

SEQ ID NO: 1022 - protein, 1872 aa, Homo sapiens
GTPLDPRAPSPSPTAGSGADTGDTVNIGDVSYKLKIPKNPELVPQNYISDSLAQSVVQHLRWIMQKDLLGQDVFLIGPPGPLRRSIAMQYLELTKREVEYIALSRDTTETDLKQRREIRAGTAFYIDQCAVRAATEGRTLILEGLEKAERNVLPVLNNLLENREMQLEDGRFLMSAERYDKLLRDHTKKELDSWKIVRVSENFRVIALGLPVPRYSGNPLDPPLRSRFQARDIYYLPFKDQLKLLYSIGANVSAEKVSQLLSFATTLCSQESSTLGLPDFPLDSLAAAVQILDSFPMMPIKHAIQWLYPYSILLGHEGKMAVEGVLKRFELQDSGSSLLPKEIVKVEKMMENHVSQASVTIRIADKEVTIKVPAGTRLLSQPCASDRFIQTLSHKQLQAEMMQSHMVKDICLIGGKGCGKTVIAKNFADTLGYNIEPIMLYQDMTARDLLQQRYTLPNGDTAWRSSPLVNAALEGKLVLLDGIHRVNAGTLAVLQRLIHDRELSLYDGSRLLREDRYMRLKEELQLSDEQLQKRSIFPIHPSFRIIALAEPPVIGSTAHQWLGPEFLTMFFFHYMKPLVKSEEIQVIKEKVPNVPQEALDKLLSFTHKLRETQDPTAQSLAASLSTRQLLRISRRLSQYPNENLHSAVTKACLSRFLPSLARSALEKNLADATIEINTDDNLEPELKDYKCEVTSGTLRIGAVSAPIYNAHEKMKVPDVLFYDNIQHVIVMEDMLKDFLLGEHLLLVGNQGVGKNKIVDRFLHLLNRPREYIQLHRDTTVQTLTLQPSVKDGLIVYEDSPLVKAVKLGHILVVDEADKAPTNVTCILKTLVENGEMILADGRRIVANSANVNGRENVVVIHPDFRMIVLANRPGFPFLGNDFFGTLGDIFSCHAVDNPKPHSELEMLRQYGPNVPEPILQKLVAAFGELRSLADQGIINYPYSTREVVNIVKHLQKFPTEGLSSVVRNVFDFDSYNNDMREILINTLHKYGIPIGAKPTSVQLAKELTLPEQTFMGYWTIGQARSGMQKLLCPVETHHIDIKGPALINIQEYPIERHEERSLNFTEECASWRIPLDEINIICDIATSHENEQNTLYVVTCNPASLYFMNMTGKSGFFVDFFDIFPRTANGVWHPFVTVAPLGSPLKGQVVLHEQQSNVILLLDTTGRALHRLILPSEKFTSKKPFWWNKEEAETYKMCKEFSHKNWLVFYKEKGNSLTVLDVLEGRTHTISLPINLKTVFLVAEDKWLLVESKTNQKYLLTKPAHIESEGSGVCQLYVLKEEPPSTGFGVTQETEFSIPHKISSDQLSSEHLSSAVEQKIASPNRILSDEKNYATIVVGFPDLMSPSEVYSWKRPSSLHKRSGTDTSFYRGKKKRGTPKQSNCVTLLDTNQVVRILPPGEVPLKDIYPKDVTPPQTSGYIEVTDLQSKKLRYIPIPRSESLSPYTTWLSTISDTDALLAEWDKSGVVTVDMGGHIRLWETGLERLQRSLMEWRNMIGQDDRNMQITINRDSGEDVSSPKHGKEDPDNMPHVGGNTWAGGTGGRDTAGLGGKGGPYRLDAGHTVYQVSQAEKDAVPEEVKRAAREMGQRAFQQRLKEIQMSEYDAATYERFSGAVRRQVHSLRIILDNLQAKGKERQWLRHQATGELDDAKIIDGLTGEKAIYKRRGELEPQLGSPQQKPKRLRLVVDVSGSMYRFNRMDGRLERTMEAVCMVMEAFENYEEKFQYDIVGHSGDGYNIGLVPMNKIPKDNKQRLEILKTMHAHSQFCMSGDHTLEGTEHAIKEIVKEEADEYFVIVLSDANLSRYGIHPAKFAQILTRDPQVNAFAIFIGSLGDQATRLQRTLPAGRSFVAMDTKDIPQILQQIFTSTMLSSV

SEQ ID NO: 1023 - protein, 208 aa, Homo sapiens
MLGLLVALLALGLAVFALLDVWYLVRLPCAVLRARLLQPRVRDLLAEQRFPGRVLPSDLDLLLHMNNARYLREADFARVAHLTRCGVLGALRELRAHTVLAASCARHRRSLRLLEPFEVRTRLLGWDDRAFYLEARFVSLRDGFVCALLRFRQHLLGTSPERVVQHLCQRRVEPPELPADLQHWISYNEASSQLLRMESGLSDVTKDQ

SEQ ID NO: 1024 - protein, 651 aa, Homo sapiens
MLRLQMTDGHISCTAVEFSYMSKISLNTPPGTKVKLSGIVDIKNGFLLLNDSNTTVLGGEVEHLIEKWELQRSLSKHNRSNIGTEGGPPPFVPFGQKCVSHVQVDSRELDRRKTLQVTMPVKPTNDNDEFEKQRTAAIAEVAKSKETKTFGGGGGGARSNLNMNAAGNRNREVLQKEKSTKSEGKHEGVYRELVDEKALKHITEMGFSKEASRQALMDNGNNLEAALNVLLTSNKQKPVMGPPLRGRGKGRGRIRSEDEEDLGNARPSAPSTLFDFLESKMGTLNVEEPKSQPQQLHQGQYRSSNTEQNGVKDNNHLRHPPRNDTRQPRNEKPPRFQRDSQNSKSVLEGSGLPRNRGSERPSTSSVSEVWAEDRIKCDRPYSRYDRTKDTSYPLGSQHSDGAFKKRDNSMQSRSGKGPSFAEAKENPLPQGSVDYNNQKRGKRESQTSIPDYFYDRKSQTINNEAFSGIKIEKHFNVNTDYQNPVRSNSFIGVPNGEVEMPLKGRRIGPIKPAGPVTAVPCDDKIFYNSGPKRRSGPIKPEKILESSIPMEYAKMWKPGDECFALYWEDNKFYRAEVEALHSSGMTAVVKFIDYGNYEEVLLSNIKPIQTEAWEEEGTYDQTLEFRRGGDGQPRRSTRPTQQFYQPPRARN

SEQ ID NO: 1025 - protein, 650 aa, Homo sapiens
MLRLQMTDGHISCTAVEFSYMSKISLNTPPGTKVKLSGIVDIKNGFLLLNDSNTTVLGGEVEHLIEKWELQRSLSKHNRSNIGTEGGPPPFVPFGQCVSHVQVDSRELDRRKTLQVTMPVKPTNDNDEFEKQRTAAIAEVAKSKETKTFGGGGGGARSNLNMNAAGNRNREVLQKEKSTKSEGKHEGVYRELVDEKALKHITEMGFSKEASRQALMDNGNNLEAALNVLLTSNKQKPVMGPPLRGRGKGRGRIRSEDEEDLGNARPSAPSTLFDFLESKMGTLNVEEPKSQPQQLHQGQYRSSNTEQNGVKDNNHLRHPPRNDTRQPRNEKPPRFQRDSQNSKSVLEGSGLPRNRGSERPSTSSVSEVWAEDRIKCDRPYSRYDRTKDTSYPLGSQHSDGAFKKRDNSMQSRSGKGPSFAEAKENPLPQGSVDYNNQKRGKRESQTSIPDYFYDRKSQTINNEAFSGIKIEKHFNVNTDYQNPVRSNSFIGVPNGEVEMPLKGRRIGPIKPAGPVTAVPCDDKIFYNSGPKRRSGPIKPEKILESSIPMEYAKMWKPGDECFALYWEDNKFYRAEVEALHSSGMTAVVKFIDYGNYEEVLLSNIKPIQTEAWEEEGTYDQTLEFRRGGDGQPRRSTRPTQQFYQPPRARN

SEQ ID NO: 1026 - protein, 744 aa, Homo sapiens
MAQVAGAALSQAGWYLSDEGIEACTSSPDKVNVNDIILIALNTDLRTIGKKFLPSDINSGKVEKLEGPCVLQIQKIRNVAAPKDNEESQAAPRMLRLQMTDGHISCTAVEFSYMSKISLNTPPGTKVKLSGIVDIKNGFLLLNDSNTTVLGGEVEHLIEKWELQRSLSKHNRSNIGTEGGPPPFVPFGQKCVSHVQVDSRELDRRKTLQVTMPVKPTNDNDEFEKQRTAAIAEVAKSKETKTFGGGGGGARSNLNMNAAGNRNREVLQKEKSTKSEGKHEGVYRELVDEKALKHITEMGFSKEASRQALMDNGNNLEAALNVLLTSNKQKPVMGPPLRGRGKGRGRIRSEDEEDLGNARPSAPSTLFDFLESKMGTLNVEEPKSQPQQLHQGQYRSSNTEQNGVKDNNHLRHPPRNDTRQPRNEKPPRFQRDSQNSKSVLEGSGLPRNRGSERPSTSSVSEVWAEDRIKCDRPYSRYDRTKDTSYPLGSQHSDGAFKKRDNSMQSRSGKGPSFAEAKENPLPQGSVDYNNQKRGKRESQTSIPDYFYDRKSQTINNEAFSGIKIEKHFNVNTDYQNPVRSNSFIGVPNGEVEMPLKGRRIGPIKPAGPVTAVPCDDKIFYNSGPKRRSGPIKPEKILESSIPMEYAKMWKPGDECFALYWEDNKFYRAEVEALHSSGMTAVVKFIDYGNYEEVLLSNIKPIQTEAWEEEGTYDQTLEFRRGGDGQPRRSTRPTQQFYQPPRARN

SEQ ID NO: 1027 - protein, 1299 aa, Homo sapiens
MSLQEMFRFPMGLLLGSVLLVASAPATLEPPGCSNKEQQVTVSHTYKIDVPKSALVQVDADPQPLSDDGASLLALGEAREEQNIIFRHNIRLQTPQKDCELAGSVQDLLARVKKLEEEMVEMKEQCSAQRCCQGVTDLSRHCSGHGTFSLETCSCHCEEGREGPACERLACPGACSGHGRCVDGRCLCHEPYVGADCGYPACPENCSGHGECVRGVCQCHEDFMSEDCSEKRCPGDCSGHGFCDTGECYCEEGFTGLDCAQVVTPQGLQLLKNTEDSLLVSWEPSSQVDHYLLSYYPLGKELSGKQIQVPKEQHSYEILGLLPGTKYIVTLRNVKNEVSSSPQHLLATTDLAVLGTAWVTDETENSLDVEWENPSTEVDYYKLRYGPMTGQEVAEVTVPKSSDPKSRYDITGLHPGTEYKITVVPMRGELEGKPILLNGRTEIDSPTNVVTDRVTEDTATVSWDPVQAVIDKYVVRYTSADGDTKEMAVHKDESSTVLTGLKPGEAYKVYVWAERGNQGSKKADTNALTEIDSPANLVTDRVTENTATISWDPVQATIDKYVVRYTSADDQETREVLVGKEQSSTVLTGLRPGVEYTVHVWAQKGDRESKKADTNAPTDIDSPKNLVTDRVTENMATVSWDPVQAAIDKYVVRYTSAGGETREVPVGKEQSSTVLTGLRPGMEYMVHVWAQKGDQESKKADTKAQTDIDSPQNLVTDRVTENMATVSWDPVRATIDRYVVRYTSAKDGETREVPVGKEQSSTVLTGLRPGVEYTVHVWAQKGAQESKKADTKAQTDIDSPQNLVTDWVTENTATVSWDPVQATIDRYVVHYTSANGETREVPVGKEQSSTVLTGLRPGMEYTVHVWAQKGNQESKKADTKAQTEIDGPKNLVTDWVTENMATVSWDPVQATIDKYMVRYTSADGETREVPVGKEHSSTVLTGLRPGMEYMVHVWAQKGAQESKKADTKAQTELDPPRNLRPSAVTQSGGILTWTPPSAQIHGYILTYQFPDGTVKEMQLGREDQRFALQGLEQGATYPVSLVAFKGGRRSRNVSTTLSTVGARFPHPSDCSQVQQNSNAASGLYTIYLHGDASRPLQVYCDMETDGGGWIVFQRRNTGQLDFFKRWRSYVEGFGDPMKEFWLGLDKLHNLTTGTPARYEVRVDLQTANESAYAIYDFFQVASSKERYKLTVGKYRGTAGDALTYHNGWKFTTFDRDNDIALSNCALTHHGGWWYKNCHLANPNGRYGETKHSEGVNWEPWKGHEFSIPYVELKIRPHGYSREPVLGRKKRTLRGRLRTF

SEQ ID NO: 1028 - protein, 129 aa, Homo sapiens
MGRRDAQLLAALLVLGLCALAGSEKPSPCQCSRLSPHNRTNCGFPGITSDQCFDNGCCFDSSVTGVPWCFHPLPKQESDQCVMEVSDRRNCGYPGISPEECASRKCCFSNFIFEVPWCFFPKSVEDCHY

SEQ ID NO: 1029 - protein, 643 aa, Homo sapiens
MEPVPLQDFVRALDPASLPRVLRVCSGVYFEGSIYEISGNECCLSTGDLIKVTQVRLQKVVCENPKTSQTMELAPNFQGYFTPLNTPQSYETLEELVSATTQSSKQLPTCFMSTHRIVTEGRVVTEDQLLMLEAVVMHLGIRSARCVLGMEGQQVILHLPLSQKGPFWTWEPSAPRTLLQVLQDPALKDLVLTCPTLPWHSLILRPQYEIQAIMHMRRTIVKIPSTLEVDVEDVTASSRHVHFIKPLLLSEVLAWEGPFPLSMEILEVPEGRPIFLSPWVGSLQKGQRLCVYGLASPPWRVLASSKGRKVPRHFLVSGGYQGKLRRRPREFPTAYDLLGAFQPGRPLRVVATKDCEGEREENPEFTSLAVGDRLEVLGPGQAHGAQGSDVDVLVCQRLSDQAGEDEEEECKEEAESPERVLLPFHFPGSFVEEMSDSRRYSLADLTAQFSLPCEVKVVAKDTSHPTDPLTSFLGLRLEEKITEPFLVVSLDSEPGMCFEIPPRWLDLTVVKAKGQPDLPEGSLPIATVEELTDTFYYRLRKLPACEIQAPPPRPPKNQGLSKQRRHSSEGGVKSSQVLGLQQHARLPKPKAKTLPEFIKDGSSTYSKIPAHRKGHRPAKPQRQDLDDDEHDYEEILEQFQKTI

SEQ ID NO: 1030 - protein, 260 aa, Homo sapiens
MEPVPLQDFVRALDPASLPRVLRVCSGVYFEGSIYEISGNECCLSTGDLIKVTQVRLQKVVCENPKTSQTMELAPNFQGYFTPLNTPQSYETLEELVSATTQSSKQLPTCFMSTHRIVTEGRVVTEDQLLMLEAVVMHLGIRSARCVLGMEGQQVILHLPLSQKGPFWTWEPSAPRTLLQVLQDPALKDLVLTCPTLPWHSLILRPQYEIQAIMHIFSSLRIAATRSAAQTQGEDLARVHQGWLQYVQQDSCPQEGPQAR

SEQ ID NO: 1031 - protein, 498 aa, Homo sapiens
MEPVPLQDFVRALDPASLPRVLRVCSGVYFEGSIYEISGNECCLSTGDLIKVTQVRLQKVVCENPKTSQTMELAPNFQGYFTPLNTPQSYETLEELVSATTQSSKQLPTCFMSTHRIVTEGRVVTEDQLLMLEAVVMHLGIRSARCVLGMEGQQVILHLPLSQKGPFWTWEPSAPRTLLQVLQDPALKDLVLTCPTLPWHSLILRPQYEIQAIMHMRRTIVKIPSTLEVDVEDVTASSRHVHFIKPLLLSERLSDQAGEDEEEECKEEAESPERVLLPFHFPGSFVEEMSDSRRYSLADLTAQFSLPCEVKVVAKDTSHPTDPLTSFLGLRLEEKITEPFLVVSLDSEPGMCFEIPPRWLDLTVVKAKGQPDLPEGSLPIATVEELTDTFYYRLRKLPACEIQAPPPRPPKNQGLSKQRRHSSEGGVKSSQVLGLQQHARLPKPKAKTLPEFIKDGSSTYSKIPAHRKGHRPAKPQRQDLDDDEHDYEEILEQFQKTI

SEQ ID NO: 1032 - protein, 123 aa, Homo sapiens
MEPVPLQDFVRALDPASLPRVLRVCSGVYFEGSIYEISGNECCLSTGDLIKVTQVRLQKVVCENPKTSQTMELAPNFQVFSSLRIAATRSAAQTQGEDLARVHQGWLQYVQQDSCPQEGPQAR

SEQ ID NO: 1033 - protein, 514 aa, Homo sapiens
MEPVPLQDFVRALDPASLPRVLRVCSGVYFEGSIYEISGNECCLSTGDLIKVTQVRLQKVVCENPKTSQTMELAPNFQGYFTPLNTPQSYETLEELVSATTQSSKQLPTCFMSTHRIVTEGRVVTEDQLLMLEAVVMHLGIRSARCVLGMEGQQVILHLPLSQKGPFWTWEPSAPRTLLQVLQDPALKDLVLTCPTLPWHSLILRPQYEIQAIMHMRRTIVKIPSTLEVDVEDVTASSRHVHFIKPLLLSEVLAWEGPFPLSMEILERLSDQAGEDEEEECKEEAESPERVLLPFHFPGSFVEEMSDSRRYSLADLTAQFSLPCEVKVVAKDTSHPTDPLTSFLGLRLEEKITEPFLVVSLDSEPGMCFEIPPRWLDLTVVKAKGQPDLPEGSLPIATVEELTDTFYYRLRKLPACEIQAPPPRPPKNQGLSKQRRHSSEGGVKSSQVLGLQQHARLPKPKAKTLPEFIKDGSSTYSKIPAHRKGHRPAKPQRQDLDDDEHDYEEILEQFQKTI

SEQ ID NO: 1034 - protein, 447 aa, Homo sapiens
MEPVPLQDFVRALDPASLPRVLRVCSGVYFEGSIYEISGNECCLSTGDLIKVTQVRLQKVVCENPKTSQTMELAPNFQGYFTPLNTPQSYETLEELVSATTQSSKQLPTCFMSTHRIVTEGRVVTEDQLLMLEAVVMHLGIRSARCVLGMEGQQVILHLPLSQKGPFWTWEPSAPRTLLQVLQDPAHGAQGSDVDVLVCQRLSDQAGEDEEEECKEEAESPERVLLPFHFPGSFVEEMSDSRRYSLADLTAQFSLPCEVKVVAKDTSHPTDPLTSFLGLRLEEKITEPFLVVSLDSEPGMCFEIPPRWLDLTVVKAKGQPDLPEGSLPIATVEELTDTFYYRLRKLPACEIQAPPPRPPKNQGLSKQRRHSSEGGVKSSQVLGLQQHARLPKPKAKTLPEFIKDGSSTYSKIPAHRKGHRPAKPQRQDLDDDEHDYEEILEQFQKTI

SEQ ID NO: 1035 - protein, 2201 aa, Homo sapiens
MGAMTQLLAGVFLAFLALATEGGVLKKVIRHKRQSGVNATLPEENQPVVFNHVYNIKLPVGSQCSVDLESASGEKDLAPPSEPSESFQEHTVDGENQIVFTHRINIPRRACGCAAAPDVKELLSRLEELENLVSSLREQCTAGAGCCLQPATGRLDTRPFCSGRGNFSTEGCGCVCEPGWKGPNCSEPECPGNCHLRGRCIDGQCICDDGFTGEDCSQLACPSDCNDQGKCVNGVCICFEGYAGADCSREICPVPCSEEHGTCVDGLCVCHDGFAGDDCNKPLCLNNCYNRGRCVENECVCDEGFTGEDCSELICPNDCFDRGRCINGTCYCEEGFTGEDCGKPTCPHACHTQGRCEEGQCVCDEGFAGVDCSEKRCPADCHNRGRCVDGRCECDDGFTGADCGELKCPNGCSGHGRCVNGQCVCDEGYTGEDCSQLRCPNDCHSRGRCVEGKCVCEQGFKGYDCSDMSCPNDCHQHGRCVNGMCVCDDGYTGEDCRDRQCPRDCSNRGLCVDGQCVCEDGFTGPDCAELSCPNDCHGQGRCVNGQCVCHEGFMGKDCKEQRCPSDCHGQGRCVDGQCICHEGFTGLDCGQHSCPSDCNNLGQCVSGRCICNEGYSGEDCSEVSPPKDLVVTEVTEETVNLAWDNEMRVTEYLVVYTPTHEGGLEMQFRVPGDQTSTIIQELEPGVEYFIRVFAILENKKSIPVSARVATYLPAPEGLKFKSIKETSVEVEWDPLDIAFETWEIIFRNMNKEDEGEITKSLRRPETSYRQTGLAPGQEYEISLHIVKNNTRGPGLKRVTTTRLDAPSQIEVKDVTDTTALITWFKPLAEIDGIELTYGIKDVPGDRTTIDLTEDENQYSIGNLKPDTEYEVSLISRRGDMSSNPAKETFTTGLDAPRNLRRVSQTDNSITLEWRNGKAAIDSYRIKYAPISGGDHAEVDVPKSQQATTKTTLTGLRPGTEYGIGVSAVKEDKESNPATINAATELDTPKDLQVSETAETSLTLLWKTPLAKFDRYRLNYSLPTGQWVGVQLPRNTTSYVLRGLEPGQEYNVLLTAEKGRHKSKPARVKASTEQAPELENLTVTEVGWDGLRLNWTAADQAYEHFIIQVQEANKVEAARNLTVPGSLRAVDIPGLKAATPYTVSIYGVIQGYRTPVLSAEASTGETPNLGEVVVAEVGWDALKLNWTAPEGAYEYFFIQVQEADTVEAAQNLTVPGGLRSTDLPGLKAATHYTITIRGVTQDFSTTPLSVEVLTEEVPDMGNLTVTEVSWDALRLNWTTPDGTYDQFTIQVQEADQVEEAHNLTVPGSLRSMEIPGLRAGTPYTVTLHGEVRGHSTRPLAVEVVTEDLPQLGDLAVSEVGWDGLRLNWTAADNAYEHFVIQVQEVNKVEAAQNLTLPGSLRAVDIPGLEAATPYRVSIYGVIRGYRTPVLSAEASTAKEPEIGNLNVSDITPESFNLSWMATDGIFETFTIEIIDSNRLLETVEYNISGAERTAHISGLPPSTDFIVYLSGLAPSIRTKTISATATTEALPLLENLTISDINPYGFTVSWMASENAFDSFLVTVVDSGKLLDPQEFTLSGTQRKLELRGLITGIGYEVMVSGFTQGHQTKPLRAEIVTEAEPEVDNLLVSDATPDGFRLSWTADEGVFDNFVLKIRDTKKQSEPLEITLLAPERTRDITGLREATEYEIELYGISKGRRSQTVSAIATTAMGSPKEVIFSDITENSATVSWRAPTAQVESFRITYVPITGGTPSMVTVDGTKTQTRLVKLIPGVEYLVSIIAMKGFEESEPVSGSFTTALDGPSGLVTANITDSEALARWQPAIATVDSYVISYTGEKVPEITRTVSGNTVEYALTDLEPATEYTLRIFAEKGPQKSSTITAKFTTDLDSPRDLTATEVQSETALLTWRPPRASVTGYLLVYESVDGTVKEVIVGPDTTSYSLADLSPSTHYTAKIQALNGPLRSNMIQTIFTTIGLLYPFPKDCSQAMLNGDTTSGLYTIYLNGDKAEALEVFCDMTSDGGGWIVFLRRKNGRENFYQNWKAYAAGFGDRREEFWLGLDNLNKITAQGQYELRVDLRDHGETAFAVYDKFSVGDAKTRYKLKVEGYSGTAGDSMAYHNGRSFSTFDKDTDSAITNCALSYKGAFWYRNCHRVNLMGRYGDNNHSQGVNWFHWKGHEHSIQFAEMKLRPSNFRNLEGRRKRA

SEQ ID NO: 1036 - protein, 1746 aa, Homo sapiens
MGAMTQLLAGVFLAFLALATEGGVLKKVIRHKRQSGVNATLPEENQPVVFNHVYNIKLPVGSQCSVDLESASGEKDLAPPSEPSESFQEHTVDGENQIVFTHRINIPRRACGCAAAPDVKELLSRLEELENLVSSLREQCTAGAGCCLQPATGRLDTRPFCSGRGNFSTEGCGCVCEPGWKGPNCSEPECPGNCHLRGRCIDGQCICDDGFTGEDCSQLACPSDCNDQGKCVNGVCICFEGYAGADCSREICPVPCSEEHGTCVDGLCVCHDGFAGDDCNKPLCLNNCYNRGRCVENECVCDEGFTGEDCSELICPNDCFDRGRCINGTCYCEEGFTGEDCGKPTCPHACHTQGRCEEGQCVCDEGFAGVDCSEKRCPADCHNRGRCVDGRCECDDGFTGADCGELKCPNGCSGHGRCVNGQCVCDEGYTGEDCSQLRCPNDCHSRGRCVEGKCVCEQGFKGYDCSDMSCPNDCHQHGRCVNGMCVCDDGYTGEDCRDRQCPRDCSNRGLCVDGQCVCEDGFTGPDCAELSCPNDCHGQGRCVNGQCVCHEGFMGKDCKEQRCPSDCHGQGRCVDGQCICHEGFTGLDCGQHSCPSDCNNLGQCVSGRCICNEGYSGEDCSEVSPPKDLVVTEVTEETVNLAWDNEMRVTEYLVVYTPTHEGGLEMQFRVPGDQTSTIIQELEPGVEYFIRVFAILENKKSIPVSARVATYLPAPEGLKFKSIKETSVEVEWDPLDIAFETWEIIFRNMNKEDEGEITKSLRRPETSYRQTGLAPGQEYEISLHIVKNNTRGPGLKRVTTTRLDAPSQIEVKDVTDTTALITWFKPLAEIDGIELTYGIKDVPGDRTTIDLTEDENQYSIGNLKPDTEYEVSLISRRGDMSSNPAKETFTTGLDAPRNLRRVSQTDNSITLEWRNGKAAIDSYRIKYAPISGGDHAEVDVPKSQQATTKTTLTGLRPGTEYGIGVSAVKEDKESNPATINAATELDTPKDLQVSETAETSLTLLWKTPLAKFDRYRLNYSLPTGQWVGVQLPRNTTSYVLRGLEPGQEYNVLLTAEKGRHKSKPARVKASTAKEPEIGNLNVSDITPESFNLSWMATDGIFETFTIEIIDSNRLLETVEYNISGAERTAHISGLPPSTDFIVYLSGLAPSIRTKTISATATTEAEPEVDNLLVSDATPDGFRLSWTADEGVFDNFVLKIRDTKKQSEPLEITLLAPERTRDITGLREATEYEIELYGISKGRRSQTVSAIATTAMGSPKEVIFSDITENSATVSWRAPTAQVESFRITYVPITGGTPSMVTVDGTKTQTRLVKLIPGVEYLVSIIAMKGFEESEPVSGSFTTALDGPSGLVTANITDSEALARWQPAIATVDSYVISYTGEKVPEITRTVSGNTVEYALTDLEPATEYTLRIFAEKGPQKSSTITAKFTTDLDSPRDLTATEVQSETALLTWRPPRASVTGYLLVYESVDGTVKEVIVGPDTTSYSLADLSPSTHYTAKIQALNGPLRSNMIQTIFTTIGLLYPFPKDCSQAMLNGDTTSGLYTIYLNGDKAEALEVFCDMTSDGGGWIVFLRRKNGRENFYQNWKAYAAGFGDRREEFWLGLDNLNKITAQGQYELRVDLRDHGETAFAVYDKFSVGDAKTRYKLKVEGYSGTAGDSMAYHNGRSFSTFDKDTDSAITNCALSYKGAFWYRNCHRVNLMGRYGDNNHSQGVNWFHWKGHEHSIQFAEMKLRPSNFRNLEGRRKRA

SEQ ID NO: 1037 - protein, 1837 aa, Homo sapiens
MGAMTQLLAGVFLAFLALATEGGVLKKVIRHKRQSGVNATLPEENQPVVFNHVYNIKLPVGSQCSVDLESASGEKDLAPPSEPSESFQEHTVDGENQIVFTHRINIPRRACGCAAAPDVKELLSRLEELENLVSSLREQCTAGAGCCLQPATGRLDTRPFCSGRGNFSTEGCGCVCEPGWKGPNCSEPECPGNCHLRGRCIDGQCICDDGFTGEDCSQLACPSDCNDQGKCVNGVCICFEGYAGADCSREICPVPCSEEHGTCVDGLCVCHDGFAGDDCNKPLCLNNCYNRGRCVENECVCDEGFTGEDCSELICPNDCFDRGRCINGTCYCEEGFTGEDCGKPTCPHACHTQGRCEEGQCVCDEGFAGVDCSEKRCPADCHNRGRCVDGRCECDDGFTGADCGELKCPNGCSGHGRCVNGQCVCDEGYTGEDCSQLRCPNDCHSRGRCVEGKCVCEQGFKGYDCSDMSCPNDCHQHGRCVNGMCVCDDGYTGEDCRDRQCPRDCSNRGLCVDGQCVCEDGFTGPDCAELSCPNDCHGQGRCVNGQCVCHEGFMGKDCKEQRCPSDCHGQGRCVDGQCICHEGFTGLDCGQHSCPSDCNNLGQCVSGRCICNEGYSGEDCSEVSPPKDLVVTEVTEETVNLAWDNEMRVTEYLVVYTPTHEGGLEMQFRVPGDQTSTIIQELEPGVEYFIRVFAILENKKSIPVSARVATYLPAPEGLKFKSIKETSVEVEWDPLDIAFETWEIIFRNMNKEDEGEITKSLRRPETSYRQTGLAPGQEYEISLHIVKNNTRGPGLKRVTTTRLDAPSQIEVKDVTDTTALITWFKPLAEIDGIELTYGIKDVPGDRTTIDLTEDENQYSIGNLKPDTEYEVSLISRRGDMSSNPAKETFTTGLDAPRNLRRVSQTDNSITLEWRNGKAAIDSYRIKYAPISGGDHAEVDVPKSQQATTKTTLTGLRPGTEYGIGVSAVKEDKESNPATINAATELDTPKDLQVSETAETSLTLLWKTPLAKFDRYRLNYSLPTGQWVGVQLPRNTTSYVLRGLEPGQEYNVLLTAEKGRHKSKPARVKASTAKEPEIGNLNVSDITPESFNLSWMATDGIFETFTIEIIDSNRLLETVEYNISGAERTAHISGLPPSTDFIVYLSGLAPSIRTKTISATATTEALPLLENLTISDINPYGFTVSWMASENAFDSFLVTVVDSGKLLDPQEFTLSGTQRKLELRGLITGIGYEVMVSGFTQGHQTKPLRAEIVTEAEPEVDNLLVSDATPDGFRLSWTADEGVFDNFVLKIRDTKKQSEPLEITLLAPERTRDITGLREATEYEIELYGISKGRRSQTVSAIATTAMGSPKEVIFSDITENSATVSWRAPTAQVESFRITYVPITGGTPSMVTVDGTKTQTRLVKLIPGVEYLVSIIAMKGFEESEPVSGSFTTALDGPSGLVTANITDSEALARWQPAIATVDSYVISYTGEKVPEITRTVSGNTVEYALTDLEPATEYTLRIFAEKGPQKSSTITAKFTTDLDSPRDLTATEVQSETALLTWRPPRASVTGYLLVYESVDGTVKEVIVGPDTTSYSLADLSPSTHYTAKIQALNGPLRSNMIQTIFTTIGLLYPFPKDCSQAMLNGDTTSGLYTIYLNGDKAEALEVFCDMTSDGGGWIVFLRRKNGRENFYQNWKAYAAGFGDRREEFWLGLDNLNKITAQGQYELRVDLRDHGETAFAVYDKFSVGDAKTRYKLKVEGYSGTAGDSMAYHNGRSFSTFDKDTDSAITNCALSYKGAFWYRNCHRVNLMGRYGDNNHSQGVNWFHWKGHEHSIQFAEMKLRPSNFRNLEGRRKRA

SEQ ID NO: 1038 - protein, 2110 aa, Homo sapiens
MGAMTQLLAGVFLAFLALATEGGVLKKVIRHKRQSGVNATLPEENQPVVFNHVYNIKLPVGSQCSVDLESASGEKDLAPPSEPSESFQEHTVDGENQIVFTHRINIPRRACGCAAAPDVKELLSRLEELENLVSSLREQCTAGAGCCLQPATGRLDTRPFCSGRGNFSTEGCGCVCEPGWKGPNCSEPECPGNCHLRGRCIDGQCICDDGFTGEDCSQLACPSDCNDQGKCVNGVCICFEGYAGADCSREICPVPCSEEHGTCVDGLCVCHDGFAGDDCNKPLCLNNCYNRGRCVENECVCDEGFTGEDCSELICPNDCFDRGRCINGTCYCEEGFTGEDCGKPTCPHACHTQGRCEEGQCVCDEGFAGVDCSEKRCPADCHNRGRCVDGRCECDDGFTGADCGELKCPNGCSGHGRCVNGQCVCDEGYTGEDCSQLRCPNDCHSRGRCVEGKCVCEQGFKGYDCSDMSCPNDCHQHGRCVNGMCVCDDGYTGEDCRDRQCPRDCSNRGLCVDGQCVCEDGFTGPDCAELSCPNDCHGQGRCVNGQCVCHEGFMGKDCKEQRCPSDCHGQGRCVDGQCICHEGFTGLDCGQHSCPSDCNNLGQCVSGRCICNEGYSGEDCSEVSPPKDLVVTEVTEETVNLAWDNEMRVTEYLVVYTPTHEGGLEMQFRVPGDQTSTIIQELEPGVEYFIRVFAILENKKSIPVSARVATYLPAPEGLKFKSIKETSVEVEWDPLDIAFETWEIIFRNMNKEDEGEITKSLRRPETSYRQTGLAPGQEYEISLHIVKNNTRGPGLKRVTTTRLDAPSQIEVKDVTDTTALITWFKPLAEIDGIELTYGIKDVPGDRTTIDLTEDENQYSIGNLKPDTEYEVSLISRRGDMSSNPAKETFTTGLDAPRNLRRVSQTDNSITLEWRNGKAAIDSYRIKYAPISGGDHAEVDVPKSQQATTKTTLTGLRPGTEYGIGVSAVKEDKESNPATINAATELDTPKDLQVSETAETSLTLLWKTPLAKFDRYRLNYSLPTGQWVGVQLPRNTTSYVLRGLEPGQEYNVLLTAEKGRHKSKPARVKASTEQAPELENLTVTEVGWDGLRLNWTAADQAYEHFIIQVQEANKVEAARNLTVPGSLRAVDIPGLKAATPYTVSIYGVIQGYRTPVLSAEASTGETPNLGEVVVAEVGWDALKLNWTAPEGAYEYFFIQVQEADTVEAAQNLTVPGGLRSTDLPGLKAATHYTITIRGVTQDFSTTPLSVEVLTEEVPDMGNLTVTEVSWDALRLNWTTPDGTYDQFTIQVQEADQVEEAHNLTVPGSLRSMEIPGLRAGTPYTVTLHGEVRGHSTRPLAVEVVTEDLPQLGDLAVSEVGWDGLRLNWTAADNAYEHFVIQVQEVNKVEAAQNLTLPGSLRAVDIPGLEAATPYRVSIYGVIRGYRTPVLSAEASTAKEPEIGNLNVSDITPESFNLSWMATDGIFETFTIEIIDSNRLLETVEYNISGAERTAHISGLPPSTDFIVYLSGLAPSIRTKTISATATTEAEPEVDNLLVSDATPDGFRLSWTADEGVFDNFVLKIRDTKKQSEPLEITLLAPERTRDITGLREATEYEIELYGISKGRRSQTVSAIATTAMGSPKEVIFSDITENSATVSWRAPTAQVESFRITYVPITGGTPSMVTVDGTKTQTRLVKLIPGVEYLVSIIAMKGFEESEPVSGSFTTALDGPSGLVTANITDSEALARWQPAIATVDSYVISYTGEKVPEITRTVSGNTVEYALTDLEPATEYTLRIFAEKGPQKSSTITAKFTTDLDSPRDLTATEVQSETALLTWRPPRASVTGYLLVYESVDGTVKEVIVGPDTTSYSLADLSPSTHYTAKIQALNGPLRSNMIQTIFTTIGLLYPFPKDCSQAMLNGDTTSGLYTIYLNGDKAEALEVFCDMTSDGGGWIVFLRRKNGRENFYQNWKAYAAGFGDRREEFWLGLDNLNKITAQGQYELRVDLRDHGETAFAVYDKFSVGDAKTRYKLKVEGYSGTAGDSMAYHNGRSFSTFDKDTDSAITNCALSYKGAFWYRNCHRVNLMGRYGDNNHSQGVNWFHWKGHEHSIQFAEMKLRPSNFRNLEGRRKRA

SEQ ID NO: 1039 - protein, 1655 aa, Homo sapiens
MGAMTQLLAGVFLAFLALATEGGVLKKVIRHKRQSGVNATLPEENQPVVFNHVYNIKLPVGSQCSVDLESASGEKDLAPPSEPSESFQEHTVDGENQIVFTHRINIPRRACGCAAAPDVKELLSRLEELENLVSSLREQCTAGAGCCLQPATGRLDTRPFCSGRGNFSTEGCGCVCEPGWKGPNCSEPECPGNCHLRGRCIDGQCICDDGFTGEDCSQLACPSDCNDQGKCVNGVCICFEGYAGADCSREICPVPCSEEHGTCVDGLCVCHDGFAGDDCNKPLCLNNCYNRGRCVENECVCDEGFTGEDCSELICPNDCFDRGRCINGTCYCEEGFTGEDCGKPTCPHACHTQGRCEEGQCVCDEGFAGVDCSEKRCPADCHNRGRCVDGRCECDDGFTGADCGELKCPNGCSGHGRCVNGQCVCDEGYTGEDCSQLRCPNDCHSRGRCVEGKCVCEQGFKGYDCSDMSCPNDCHQHGRCVNGMCVCDDGYTGEDCRDRQCPRDCSNRGLCVDGQCVCEDGFTGPDCAELSCPNDCHGQGRCVNGQCVCHEGFMGKDCKEQRCPSDCHGQGRCVDGQCICHEGFTGLDCGQHSCPSDCNNLGQCVSGRCICNEGYSGEDCSEVSPPKDLVVTEVTEETVNLAWDNEMRVTEYLVVYTPTHEGGLEMQFRVPGDQTSTIIQELEPGVEYFIRVFAILENKKSIPVSARVATYLPAPEGLKFKSIKETSVEVEWDPLDIAFETWEIIFRNMNKEDEGEITKSLRRPETSYRQTGLAPGQEYEISLHIVKNNTRGPGLKRVTTTRLDAPSQIEVKDVTDTTALITWFKPLAEIDGIELTYGIKDVPGDRTTIDLTEDENQYSIGNLKPDTEYEVSLISRRGDMSSNPAKETFTTGLDAPRNLRRVSQTDNSITLEWRNGKAAIDSYRIKYAPISGGDHAEVDVPKSQQATTKTTLTGLRPGTEYGIGVSAVKEDKESNPATINAATELDTPKDLQVSETAETSLTLLWKTPLAKFDRYRLNYSLPTGQWVGVQLPRNTTSYVLRGLEPGQEYNVLLTAEKGRHKSKPARVKASTEAEPEVDNLLVSDATPDGFRLSWTADEGVFDNFVLKIRDTKKQSEPLEITLLAPERTRDITGLREATEYEIELYGISKGRRSQTVSAIATTAMGSPKEVIFSDITENSATVSWRAPTAQVESFRITYVPITGGTPSMVTVDGTKTQTRLVKLIPGVEYLVSIIAMKGFEESEPVSGSFTTALDGPSGLVTANITDSEALARWQPAIATVDSYVISYTGEKVPEITRTVSGNTVEYALTDLEPATEYTLRIFAEKGPQKSSTITAKFTTDLDSPRDLTATEVQSETALLTWRPPRASVTGYLLVYESVDGTVKEVIVGPDTTSYSLADLSPSTHYTAKIQALNGPLRSNMIQTIFTTIGLLYPFPKDCSQAMLNGDTTSGLYTIYLNGDKAEALEVFCDMTSDGGGWIVFLRRKNGRENFYQNWKAYAAGFGDRREEFWLGLDNLNKITAQGQYELRVDLRDHGETAFAVYDKFSVGDAKTRYKLKVEGYSGTAGDSMAYHNGRSFSTFDKDTDSAITNCALSYKGAFWYRNCHRVNLMGRYGDNNHSQGVNWFHWKGHEHSIQFAEMKLRPSNFRNLEGRRKRA

SEQ ID NO: 1040 - protein, 1564 aa, Homo sapiens
MGAMTQLLAGVFLAFLALATEGGVLKKVIRHKRQSGVNATLPEENQPVVFNHVYNIKLPVGSQCSVDLESASGEKDLAPPSEPSESFQEHTVDGENQIVFTHRINIPRRACGCAAAPDVKELLSRLEELENLVSSLREQCTAGAGCCLQPATGRLDTRPFCSGRGNFSTEGCGCVCEPGWKGPNCSEPECPGNCHLRGRCIDGQCICDDGFTGEDCSQLACPSDCNDQGKCVNGVCICFEGYAGADCSREICPVPCSEEHGTCVDGLCVCHDGFAGDDCNKPLCLNNCYNRGRCVENECVCDEGFTGEDCSELICPNDCFDRGRCINGTCYCEEGFTGEDCGKPTCPHACHTQGRCEEGQCVCDEGFAGVDCSEKRCPADCHNRGRCVDGRCECDDGFTGADCGELKCPNGCSGHGRCVNGQCVCDEGYTGEDCSQLRCPNDCHSRGRCVEGKCVCEQGFKGYDCSDMSCPNDCHQHGRCVNGMCVCDDGYTGEDCRDRQCPRDCSNRGLCVDGQCVCEDGFTGPDCAELSCPNDCHGQGRCVNGQCVCHEGFMGKDCKEQRCPSDCHGQGRCVDGQCICHEGFTGLDCGQHSCPSDCNNLGQCVSGRCICNEGYSGEDCSEVSPPKDLVVTEVTEETVNLAWDNEMRVTEYLVVYTPTHEGGLEMQFRVPGDQTSTIIQELEPGVEYFIRVFAILENKKSIPVSARVATYLPAPEGLKFKSIKETSVEVEWDPLDIAFETWEIIFRNMNKEDEGEITKSLRRPETSYRQTGLAPGQEYEISLHIVKNNTRGPGLKRVTTTRLDAPSQIEVKDVTDTTALITWFKPLAEIDGIELTYGIKDVPGDRTTIDLTEDENQYSIGNLKPDTEYEVSLISRRGDMSSNPAKETFTTGLDAPRNLRRVSQTDNSITLEWRNGKAAIDSYRIKYAPISGGDHAEVDVPKSQQATTKTTLTGLRPGTEYGIGVSAVKEDKESNPATINAATELDTPKDLQVSETAETSLTLLWKTPLAKFDRYRLNYSLPTGQWVGVQLPRNTTSYVLRGLEPGQEYNVLLTAEKGRHKSKPARVKASTAMGSPKEVIFSDITENSATVSWRAPTAQVESFRITYVPITGGTPSMVTVDGTKTQTRLVKLIPGVEYLVSIIAMKGFEESEPVSGSFTTALDGPSGLVTANITDSEALARWQPAIATVDSYVISYTGEKVPEITRTVSGNTVEYALTDLEPATEYTLRIFAEKGPQKSSTITAKFTTDLDSPRDLTATEVQSETALLTWRPPRASVTGYLLVYESVDGTVKEVIVGPDTTSYSLADLSPSTHYTAKIQALNGPLRSNMIQTIFTTIGLLYPFPKDCSQAMLNGDTTSGLYTIYLNGDKAEALEVFCDMTSDGGGWIVFLRRKNGRENFYQNWKAYAAGFGDRREEFWLGLDNLNKITAQGQYELRVDLRDHGETAFAVYDKFSVGDAKTRYKLKVEGYSGTAGDSMAYHNGRSFSTFDKDTDSAITNCALSYKGAFWYRNCHRVNLMGRYGDNNHSQGVNWFHWKGHEHSIQFAEMKLRPSNFRNLEGRRKRA

SEQ ID NO: 1041 - protein, 677 aa, Homo sapiens
MAKVNITRDLIRRQIKERGALSFERRYHVTDPFIRRLGLEAELQGHSGCVNCLEWNEKGDLLASGSDDQHTIVWDPLHHKKLLSMHTGHTANIFSVKFLPHAGDRILITGAADSKVHVHDLTVKETIHMFGDHTNRVKRIATAPMWPNTFWSAAEDGLIRQYDLRENSKHSEVLIDLTEYCGQLVEAKCLTVNPQDNNCLAVGASGPFVRLYDIRMIHNHRKSMKQSPSAGVHTFCDRQKPLPDGAAQYYVAGHLPVKLPDYNNRLRVLVATYVTFSPNGTELLVNMGGEQVYLFDLTYKQRPYTFLLPRKCHSSGEVQNGKMSTNGVSNGVSNGLHLHSNGFRLPESRGHVSPQVELPPYLERVKQQANEAFACQQWTQAIQLYSKAVQRAPHNAMLYGNRAAAYMKRKWDGDHYDALRDCLKAISLNPCHLKAHFRLARCLFELKYVAEALECLDDFKGKFPEQAHSSACDALGRDITAALFSKNDGEEKKGPGGGAPVRLRSTSRKDSISEDEMVLRERSYDYQFRYCGHCNTTTDIKEANFFGSNAQYIVSGSDDGSFFIWEKETTNLVRVLQGDESIVNCLQPHPSYCFLATSGIDPVVRLWNPRPESEDLTGRVVEDMEGASQANQRRMNADPLEVMLLNMGYRITGLSSGGAGASDDEDSSEGQVQCRPS

SEQ ID NO: 1042 - protein, 615 aa, Homo sapiens
MAKVNITRDLIRRQIKERGALSFERRYHVTDPFIRRLGLEAELQGHSGCVNCLEWNEKGDLLASGSDDQHTIVWDPLHHKKLLSMHTGHTANIFSVKFLPHAGDRILITGAADSKVHVHDLTVKETIHMFGDHTNRVKRIATAPMWPNTFWSAAEDGLIRQYDLRENSKHSEVLIDLTEYCGQLVEAKCLTVNPQDNNCLAVGASGPFVRLYDIRMIHNHRKSMKQSPSAGVHTFCDRQKPLPDGAAQYYVAGHLPVKLPDYNNRLRVLVATYVTFSPNGTELLVNMGGEQVYLFDLTYKQRPYTFLLPRKCHSSGEVQNGKMSTNGVSNGVSNGLHLHSNGFRLPESRGHVSPQVELPPYLERVKQQANEAFACQQWTQAIQLYSKAVQRAPHNAMLYGNRAAAYMKRKWDGDHYDALRDCLKAISLNPCHLKAHFRLARCLFELKYVAEALECLDDFKGKFPEQAHSSACDALGRDITAALFSKNDGEEKKGPGGGAPVRLRSTSRKDSISEDEMVLRERSYDYQFRYCGHCNTTTDIKEANFFGRRPPTWSVCSKGMSPLSTACSHTPATASWPPVASILLCGSGTPDQRVKTSQAESWKIWRVLHRPTSGA

SEQ ID NO: 1043 - protein, 597 aa, Homo sapiens
MAKVNITRDLIRRQIKERGALSFERRYHVTDPFIRRLGLEAELQGHSGCVNCLEWNEKGDLLASGSDDQHTIVWDPLHHKKLLSMHTGHTANIFSVKFLPHAGDRILITGAADSKVHVHDLTVKETIHMFGDHTNRVKRIATAPMWPNTFWSAAEDGLIRQYDLRENSKHSEVLIDLTEYCGQLVEAKCLTVNPQDNNCLAVGASGPFVRLYDIRMIHNHRKSMKQSPSAGVHTFCDRQKPLPDGAAQYYVAGHLPVKLPDYNNRLRVLVATYVTFSPNGTELLVNMGGEQVYLFDLTYKQRPYTFLLPRKCHSSGEVQNGKMSTNGVSNGVSNGLHLHSNGFRLPESRGHVSPQVELPPYLERVKQQANEAFACQQWTQAIQLYSKAVQRAPHNAMLYGNRAAAYMKRKWDGDHYDALRDCLKAISLNPCHLKAHFRLARCLFELKYVAEALECLDDFKGKFPEQAHSSACDALGRDITAALFSKNDGEEKKGPGGGAPVRLRSTSRKDSISEDEMVLRERSYDYQFRYCGHCNTTTDIKEANFFGRSEALKRRVQPSWQREVEWGVLGHNGFREESQIPALPLYPWANGFTFVSL

SEQ ID NO: 1044 - protein, 676 aa, Homo sapiens
MAKVNITRDLIRRQIKERGALSFERRYHVTDPFIRRLGLEAELQGHSGCVNCLEWNEKGDLLASGSDDQHTIVWDPLHHKKLLSMHTGHTANIFSVKFLPHAGDRILITGAADSKVHVHDLTVKETIHMFGDHTNRVKRIATAPMWPNTFWSAAEDGLIRQYDLRENSKHSEVLIDLTEYCGQLVEAKCLTVNPQDNNCLAVGASGPFVRLYDIRMIHNHRKSMKQSPSAGVHTFCDRQKPLPDGAAQYYVAGHLPVKLPDYNNRLRVLVATYVTFSPNGTELLVNMGGEQVYLFDLTYKQRPYTFLLPRKCHSSGVQNGKMSTNGVSNGVSNGLHLHSNGFRLPESRGHVSPQVELPPYLERVKQQANEAFACQQWTQAIQLYSKAVQRAPHNAMLYGNRAAAYMKRKWDGDHYDALRDCLKAISLNPCHLKAHFRLARCLFELKYVAEALECLDDFKGKFPEQAHSSACDALGRDITAALFSKNDGEEKKGPGGGAPVRLRSTSRKDSISEDEMVLRERSYDYQFRYCGHCNTTTDIKEANFFGSNAQYIVSGSDDGSFFIWEKETTNLVRVLQGDESIVNCLQPHPSYCFLATSGIDPVVRLWNPRPESEDLTGRVVEDMEGASQANQRRMNADPLEVMLLNMGYRITGLSSGGAGASDDEDSSEGQVQCRPS

SEQ ID NO: 1045 - protein, 596 aa, Homo sapiens
MAKVNITRDLIRRQIKERGALSFERRYHVTDPFIRRLGLEAELQGHSGCVNCLEWNEKGDLLASGSDDQHTIVWDPLHHKKLLSMHTGHTANIFSVKFLPHAGDRILITGAADSKVHVHDLTVKETIHMFGDHTNRVKRIATAPMWPNTFWSAAEDGLIRQYDLRENSKHSEVLIDLTEYCGQLVEAKCLTVNPQDNNCLAVGASGPFVRLYDIRMIHNHRKSMKQSPSAGVHTFCDRQKPLPDGAAQYYVAGHLPVKLPDYNNRLRVLVATYVTFSPNGTELLVNMGGEQVYLFDLTYKQRPYTFLLPRKCHSSGVQNGKMSTNGVSNGVSNGLHLHSNGFRLPESRGHVSPQVELPPYLERVKQQANEAFACQQWTQAIQLYSKAVQRAPHNAMLYGNRAAAYMKRKWDGDHYDALRDCLKAISLNPCHLKAHFRLARCLFELKYVAEALECLDDFKGKFPEQAHSSACDALGRDITAALFSKNDGEEKKGPGGGAPVRLRSTSRKDSISEDEMVLRERSYDYQFRYCGHCNTTTDIKEANFFGRSEALKRRVQPSWQREVEWGVLGHNGFREESQIPALPLYPWANGFTFVSL

SEQ ID NO: 1046 - protein, 614 aa, Homo sapiens
MAKVNITRDLIRRQIKERGALSFERRYHVTDPFIRRLGLEAELQGHSGCVNCLEWNEKGDLLASGSDDQHTIVWDPLHHKKLLSMHTGHTANIFSVKFLPHAGDRILITGAADSKVHVHDLTVKETIHMFGDHTNRVKRIATAPMWPNTFWSAAEDGLIRQYDLRENSKHSEVLIDLTEYCGQLVEAKCLTVNPQDNNCLAVGASGPFVRLYDIRMIHNHRKSMKQSPSAGVHTFCDRQKPLPDGAAQYYVAGHLPVKLPDYNNRLRVLVATYVTFSPNGTELLVNMGGEQVYLFDLTYKQRPYTFLLPRKCHSSGVQNGKMSTNGVSNGVSNGLHLHSNGFRLPESRGHVSPQVELPPYLERVKQQANEAFACQQWTQAIQLYSKAVQRAPHNAMLYGNRAAAYMKRKWDGDHYDALRDCLKAISLNPCHLKAHFRLARCLFELKYVAEALECLDDFKGKFPEQAHSSACDALGRDITAALFSKNDGEEKKGPGGGAPVRLRSTSRKDSISEDEMVLRERSYDYQFRYCGHCNTTTDIKEANFFGRRPPTWSVCSKGMSPLSTACSHTPATASWPPVASILLCGSGTPDQRVKTSQAESWKIWRVLHRPTSGA

SEQ ID NO: 1047 - protein, 775 aa, Homo sapiens
MVGPEDAGACSGRNPKLLPVPAPDPVGQDRKVIRATGGFGGGVGAVEPPEEADEEEEADEEEETPPRQLLQRYLAAAGEQLEPGLCYCPLPAGQAGAPPPSAAPRSDACLLGSGSKHRGAEVADGRAPRHEGMTNGDSGFLPGRDCRDLEEARGLARAGGRESRRRRPYGRLRLEGPGDEDADGAGSPSDWASPLEDPLRSCCLVAADAQEPEGAGSDSGDSPASSCSSSEDSEQRGVGAGGPEEGAPPATSAERTNGGAEPRLGFSDIHFNSRNTFQVSRGQSARDHLPPAGPPVPLPAAEQGPAGASARARRSGGFADFFTRNLFPKRTKELKSVVHSAPGWKLFGKVPPRENLQKTSKIIQQEYEARTGRTCKPPPQSSRRKNFEFEPLSTTALILEDRPSNLPAKSVEEALRHRQEYDEMVAEAKKREIKEAHKRKRIMKERFKQEENIASAMVIWINEILPNWEVMRSTRRVRELWWQGLPPSVRGKVWSLAVGNELNITPELYEIFLSRAKERWKSFSETSSENDTEGVSVADREASLELIKLDISRTFPSLYIFQKGGPYHDVLHSILGAYTCYRPDVGYVQGMSFIAAVLILNLEEADAFIAFANLLNKPCQLAFFRVDHSMMLKYFATFEVFFEENLSKLFLHFKSYSLTPDIYLIDWIFTLYSKSLPLDLACRVWDVFCRDGEEFLFRTGLGILRLYEDILLQMDFIHIAQFLTKLPEDITSEKLFSCIAAIQMQNSTKKWTQVFASVMKDIKEGDKNSSPALKS

SEQ ID NO: 1048 - protein, 345 aa, Homo sapiens
MSNNGADLTFGYISCFVAILLFGSNFVPLKKFDTGDGMFLQWVLCAAIWLVALVVNLILHCPKFWPFAMLGGCIWATGNIAVVPIIKTIGLGLGILIWGSFNALTGWASSRFGWFGLDAEEVSNPLLNYIGAGLSVVSAFIFLFIKSEIPNNTCSMDTTPLITEHVINTTQDPCSWVDKLSTVHHRIVGCSLAVISGVLYGSTFVPIIYIKDHSKRNDSIYAGASQYDLDYVFAHFSGIFLTSTVYFLAYCIAMKNSPKLYPEAVLPGFLSGVLWAIATCCWFIANHSLSAVVSFPIITAGPGFIAAMWGIFMFKEIKGLQNYLLMILAFCIILTGALCTAFSKI

SEQ ID NO: 1049 - protein, 169 aa, Homo sapiens
MSNNGADLTFGYISCFVAILLFGSNFVPLKKFDTGDGMFLQWVLCAAIWLVALVVNLILHCPKFWPFAMLGGCIWATGNIAVVPIIKTIGLGLGILIWGSFNALTGWASSRFGWFGLDAEEVSNPLLNYIGAGLSVVSAFIFLFIKSEIPNNTCSMDTTPLITEHVSIV

SEQ ID NO: 1050 - protein, 449 aa, Homo sapiens
MRECISVHVGQAGVQIGNACWELFCLEHGIQADGTFDAQASKINDDDSFTTFFSETGNGKHVPRAVMIDLEPTVVDEVRAGTYRQLFHPEQLITGKEDAANNYARGHYTVGKESIDLVLDRIRKLTDACSGLQGFLIFHSFGGGTGSGFTSLLMERLSLDYGKKSKLEFAIYPAPQVSTAVVEPYNSILTTHTTLEHSDCAFMVDNEAIYDICRRNLDIERPTYTNLNRLISQIVSSITASLRFDGALNVDLTEFQTNLVPYPRIHFPLVTYAPIISAEKAYHEQLSVAEITSSCFEPNSQMVKCDPRHGKYMACCMLYRGDVVPKDVNVAIAAIKTKRTIQFVDWCPTGFKVGINYQPPTVVPGGDLAKVQRAVCMLSNTTAIAEAWARLDHKFDLMYAKRAFVHWYVGEGMEEGEFSEAREDLAALEKDYEEVGTDSFEEENEGEEF

SEQ ID NO: 1051 - protein, 383 aa, Homo sapiens
MIDLEPTVVDEVRAGTYRQLFHPEQLITGKEDAANNYARGHYTVGKESIDLVLDRIRKLTDACSGLQGFLIFHSFGGGTGSGFTSLLMERLSLDYGKKSKLEFAIYPAPQVSTAVVEPYNSILTTHTTLEHSDCAFMVDNEAIYDICRRNLDIERPTYTNLNRLISQIVSSITASLRFDGALNVDLTEFQTNLVPYPRIHFPLVTYAPIISAEKAYHEQLSVAEITSSCFEPNSQMVKCDPRHGKYMACCMLYRGDVVPKDVNVAIAAIKTKRTIQFVDWCPTGFKVGINYQPPTVVPGGDLAKVQRAVCMLSNTTAIAEAWARLDHKFDLMYAKRAFVHWYVGEGMEEGEFSEAREDLAALEKDYEEVGTDSFEEENEGEEF

SEQ ID NO: 1052 - protein, 497 aa, Homo sapiens
MEGSGEQPGPQPQHPGDHRIRDGDFVVLKREDVFKAVQVQRRKKVTFEKQWFYLDNVIGHSYGTAFEVTSGGSLQPKKKREEPTAETKEAGTDNRNIVDDGKSQKLTQDDIKALKDKGIKGEEIVQQLIENSTTFRDKTEFAQDKYIKKKKKKYEAIITVVKPSTRILSIMYYAREPGKINHMRYDTLAQMLTLGNIRAGNKMIVMETCAGLVLGAMMERMGGFGSIIQLYPGGGPVRAATACFGFPKSFLSGLYEFPLNKVDSLLHGTFSAKMLSSEPKDSALVEESNGTLEEKQASEQENEDSMAEAPESNHPEDQETMETISQDPEHKGPKERGSKKDYIQEKQRRQEEQRKRHLEAAALLSERNADGLIVASRFHPTPLLLSLLDFVAPSRPFVVYCQYKEPLLECYTKLRERGGVINLRLSETWLRNYQVLPDRSHPKLLMSGGGGYLLSGFTVAMDNLKADTSLKSNASTLESHETEEPAAKKRKCPESDS

SEQ ID NO: 1053 - protein, 399 aa, Homo sapiens
MEGSGEQPGPQPQHPGDHRIRDGDFVVLKREDVFKAVQVQRRKKVTFEKQWFYLDNVIGHSYGTAFEVTSGGSLQPKKKREEPTAETKEAGTDNRNIVDDGKSQKLTQDDIKALKDKGIKGEEIVQQLIENSTTFRDKTEFAQDKYIKKKKKKYEAIITVVKPSTRILSIMYYAREPGKINHMRYDTLAQMLTLGNIRAGNKMIVMETCAGLVLGAMMERMGGFGSIIQLYPGGGPVRAATACFGFPKSFLSGLYEFPLNKVDSLLHGTFSAKMLSSEPKDSALVEESNGTLEEKQASEQENEDSMAEAPESNHPEDQETMETISQDPEHKGPKERGSKKDYIQEKQRRQEEQRKRHLEAAALLSERNADGCVDGRRQETPQCMWALLQTDWHSLSPCL

SEQ ID NO: 1054 - protein, 365 aa, Homo sapiens
MEGSGEQPGPQPQHPGDHRIRDGDFVVLKREDVFKAVQVQRRKKVTFEKQWFYLDNVIGHSYGTAFEVTSGGSLQPKKKREEPTAETKEAGTDNRNIVDDGKSQKLTQDDIKALKDKGIKGEEIVQQLIENSTTFRDKTEFAQDKYIKKKKKKYEAIITVVKPSTRILSIMYYAREPGKINHMRYDTLAQMLTLGNIRAGNKMIVMETCAGLVLGAMMERMGGFGSIIQLYPGGGPVRAATACFGFPKSFLSGLYEFPLNKVDSLLHGTFSAKMLSSEPKDSALVEESNGTLEEKQASEQENEDSMAEAPESNHPEDQETMETISQDPEHKGPKERGSKKDYISGKNRGRQGRSSGKDFWGCRFA

SEQ ID NO: 1055 - protein, 327 aa, Homo sapiens
MYYAREPGKINHMRYDTLAQMLTLGNIRAGNKMIVMETCAGLVLGAMMERMGGFGSIIQLYPGGGPVRAATACFGFPKSFLSGLYEFPLNKVDSLLHGTFSAKMLSSEPKDSALVEESNGTLEEKQASEQENEDSMAEAPESNHPEDQETMETISQDPEHKGPKERGSKKDYIQEKQRRQEEQRKRHLEAAALLSERNADGLIVASRFHPTPLLLSLLDFVAPSRPFVVYCQYKEPLLECYTKLRERGGVINLRLSETWLRNYQVLPDRSHPKLLMSGGGGYLLSGFTVAMDNLKADTSLKSNASTLESHETEEPAAKKRKCPESDS

SEQ ID NO: 1056 - protein, 403 aa, Homo sapiens
MALRSAQGDGPTSGHWDGGAEKADFNAKRKKKVAEIHQALNSDPTDVAALRRMAISEGGLLTDEIRRKVWPKLLNVNANDPPPISGKNLRQMSKDYQQVLLDVRRSLRRFPPGMPEEQREGLQEELIDIILLILERNPQLHYYQGYHDIVVTFLLVVGERLATSLVEKLSTHHLRDFMDPTMDNTKHILNYLMPIIDQVNPELHDFMQSAEVGTIFALSWLITWFGHVLSDFRHVVRLYDFFLACHPLMPIYFAAVIVLYREQEVLDCDCDMASVHHLLSQIPQDLPYETLISRAGDLFVQFPPSELAREAAAQQQAERTAASTFKDFELASAQQRPDMVLRQRFRGLLRPEDRTKDVLTKPRTNRFVKLAVMGLTVALGAAALAVVKSALEWAPKFQLQLFP

SEQ ID NO: 1057 - protein, 172 aa, Homo sapiens
MPIIDQVNPELHDFMQRYICVCISVCMHTHAHTPPHLKHSSQAERSFLIVLGGFVKFSPVVPVTSNLGNSVLGAFLGTVLFGGHSPSLEFTSSGERWIRYVCQGKMLRLLPQEKHKVLWDPVARRGRPTMGCFISQVPKRRNIFLQIPCDVLFLLCLVGNVFLANASFFKIF

SEQ ID NO: 1058 - protein, 428 aa, Homo sapiens
MPSGCYVPRSEPRLLPAPPPAGARVGALRSAQGDGPTSGHWDGGAEKADFNAKRKKKVAEIHQALNSDPTDVAALRRMAISEGGLLTDEIRRKVWPKLLNVNANDPPPISGKNLRQMSKDYQQVLLDVRRSLRRFPPGMPEEQREGLQEELIDIILLILERNPQLHYYQGYHDIVVTFLLVVGERLATSLVEKLSTHHLRDFMDPTMDNTKHILNYLMPIIDQVNPELHDFMQSAEVGTIFALSWLITWFGHVLSDFRHVVRLYDFFLACHPLMPIYFAAVIVLYREQEVLDCDCDMASVHHLLSQIPQDLPYETLISRAGDLFVQFPPSELAREAAAQQQAERTAASTFKDFELASAQQRPDMVLRQRFRGLLRPEDRTKDVLTKPRTNRFVKLAVMGLTVALGAAALAVVKSALEWAPKFQLQLFP

SEQ ID NO: 1059 - protein, 1327 aa, Homo sapiens
MAASRRSQHHHHHHQQQLQPAPGASAPPPPPPPPLSPGLAPGTTPASPTASGLAPFASPRHGLALPEGDGSRDPPDRPRSPDPVDGTSCCSTTSTICTVAAAPVVPAVSTSSAAGVAPNPAGSGSNNSPSSSSSPTSSSSSSPSSPGSSLAESPEAAGVSSTAPLGPGAAGPGTGVPAVSGALRELLEACRNGDVSRVKRLVDAANVNAKDMAGRKSSPLHFAAGFGRKDVVEHLLQMGANVHARDDGGLIPLHNACSFGHAEVVSLLLCQGADPNARDNWNYTPLHEAAIKGKIDVCIVLLQHGADPNIRNTDGKSALDLADPSAKAVLTGEYKKDELLEAARSGNEEKLMALLTPLNVNCHASDGRKSTPLHLAAGYNRVRIVQLLLQHGADVHAKDKGGLVPLHNACSYGHYEVTELLLKHGACVNAMDLWQFTPLHEAASKNRVEVCSLLLSHGADPTLVNCHGKSAVDMAPTPELRERLTYEFKGHSLLQAAREADLAKVKKTLALEIINFKQPQSHETALHCAVASLHPKRKQVTELLLRKGANVNEKNKDFMTPLHVAAERAHNDVMEVLHKHGAKMNALDTLGQTALHRAALAGHLQTCRLLLSYGSDPSIISLQGFTAAQMGNEAVQQILSESTPIRTSDVDYRLLEASKAGDLETVKQLCSSQNVNCRDLEGRHSTPLHFAAGYNRVSVVEYLLHHGADVHAKDKGGLVPLHNACSYGHYEVAELLVRHGASVNVADLWKFTPLHEAAAKGKYEICKLLLKHGADPTKKNRDGNTPLDLVKEGDTDIQDLLRGDAALLDAAKKGCLARVQKLCTPENINCRDTQGRNSTPLHLAAGYNNLEVAEYLLEHGADVNAQDKGGLIPLHNAASYGHVDIAALLIKYNTCVNATDKWAFTPLHEAAQKGRTQLCALLLAHGADPTMKNQEGQTPLDLATADDIRALLIDAMPPEALPTCFKPQATVVSASLISPASTPSCLSAASSIDNLTGPLAELAVGGASNAGDGAAGTERKEGEVAGLDMNISQFLKSLGLEHLRDIFETEQITLDVLADMGHEELKEIGINAYGHRHKLIKGVERLLGGQQGTNPYLTFHCVNQGTILLDLAPEDKEYQSVEEEMQSTIREHRDGGNAGGIFNRYNVIRIQKVVNKKLRERFCHRQKEVSEENHNHHNERMLFHGSPFINAIIHKGFDERHAYIGGMFGAGIYFAENSSKSNQYVYGIGGGTGCPTHKDRSCYICHRQMLFCRVTLGKSFLQFSTMKMAHAPPGHHSVIGRPSVNGLAYAEYVIYRGEQAYPEYLITYQIMKPEAPSQTATAAEQKT

SEQ ID NO: 1060 - protein, 643 aa, Homo sapiens
MAASRRSQHHHHHHQQQLQPAPGASAPPPPPPPPLSPGLAPGTTPASPTASGLAPFASPRHGLALPEGDGSRDPPDRPRSPDPVDGTSCCSTTSTICTVAAAPVVPAVSTSSAAGVAPNPAGSGSNNSPSSSSSPTSSSSSSPSSPGSSLAESPEAAGVSSTAPLGPGAAGPGTGVPAVSGALRELLEACRNGDVSRVKRLVDAANVNAKDMAGRKSSPLHFAAGFGRKDVVEHLLQMGANVHARDDGGLIPLHNACSFGHAEVVSLLLCQGADPNARDNWNYTPLHEAAIKGKIDVCIVLLQHGADPNIRNTDGKSALDLADPSAKAVLTGEYKKDELLEAARSGNEEKLMALLTPLNVNCHASDGRKSTPLHLAAGYNRVRIVQLLLQHGADVHAKDKGGLVPLHNACSYGHYEVTELLLKHGACVNAMDLWQFTPLHEAASKNRVEVCSLLLSHGADPTLVNCHGKSAVDMAPTPELRERLTYEFKGHSLLQAAREADLAKVKKTLALEIINFKQPQSHETALHCAVASLHPKRKQVTELLLRKGANVNEKNKDFMTPLHVAAERAHNDVMEVLHKHGAKMNALDTLGQTALHRAALAGHLQTCRLLLSYGSDPSIISLQGFTAAQMGNEAVQQILSGHS

SEQ ID NO: 1061 - protein, 508 aa, Homo sapiens
MAKSNGENGPRAPAAGESLSGTRESLAQGPDAATTDELSSLGSDSEANGFAERRIDKFGFIVGSQGAEGALEEVPLEVLRQRESKWLDMLNNWDKWMAKKHKKIRLRCQKGIPPSLRGRAWQYLSGGKVKLQQNPGKFDELDMSPGDPKWLDVIERDLHRQFPFHEMFVSRGGHGQQDLFRVLKAYTLYRPEEGYCQAQAPIAAVLLMHMPAEQAFWCLVQICEKYLPGYYSEKLEAIQLDGEILFSLLQKVSPVAHKHLSRQKIDPLLYMTEWFMCAFSRTLPWSSVLRVWDMFFCEGVKIIFRVGLVLLKHALGSPEKVKACQGQYETIERLRSLSPKIMQEAFLVQEVVELPVTERQIEREHLIQLRRWQETRGELQCRSPPRLHGAKAILDAEPGPRPALQPSPSIRLPLDAPLPGSKAKPKPPKQAQKEQRKQMKGRGQLEKPPAPNQAMVVAAAGDACPPQHVPPKDSAPKDSAPQDLAPQVSAHHRSQESLTSQESEDTYL

SEQ ID NO: 1062 - protein, 515 aa, Homo sapiens
MAKSNGENGPRAPAAGESLSGTRESLAQGPDAATTDELSSLGSDSEANGFAERRIDKFGFIVGSQGAEGAPCPLLHRLEEVPLEVLRQRESKWLDMLNNWDKWMAKKHKKIRLRCQKGIPPSLRGRAWQYLSGGKVKLQQNPGKFDELDMSPGDPKWLDVIERDLHRQFPFHEMFVSRGGHGQQDLFRVLKAYTLYRPEEGYCQAQAPIAAVLLMHMPAEQAFWCLVQICEKYLPGYYSEKLEAIQLDGEILFSLLQKVSPVAHKHLSRQKIDPLLYMTEWFMCAFSRTLPWSSVLRVWDMFFCEGVKIIFRVGLVLLKHALGSPEKVKACQGQYETIERLRSLSPKIMQEAFLVQEVVELPVTERQIEREHLIQLRRWQETRGELQCRSPPRLHGAKAILDAEPGPRPALQPSPSIRLPLDAPLPGSKAKPKPPKQAQKEQRKQMKGRGQLEKPPAPNQAMVVAAAGDACPPQHVPPKDSAPKDSAPQDLAPQVSAHHRSQESLTSQESEDTYL

SEQ ID NO: 1063 - protein, 416 aa, Homo sapiens
MYRHGISSQRSWPLWTTIFIFLGVAAILGVTIGLLVHFLAVEKTYYYQGDFHISGVTYNDNCENAASQASTNLSKDIETKMLNAFQNSSIYKEYVKSEVIKLLPNANGSNVQLQLKFKFPPAEGVSMRTKIKAKLHQMLKNNMASWNAVPASIKLMEISKAASEMLTNNCCGRQVANSIITGNKIVNGKSSLEGAWPWQASMQWKGRHYCGASLISSRWLLSAAHCFAKKNNSKDWTVNFGIVVNKPYMTRKVQNIIFHENYSSPGLHDDIALVQLAEEVSFTEYIRKICLPEAKMKLSENDNVVVTGWGTLYMNGSFPVILQEDFLKIIDNKICNASYAYSGFVTDTMLCAGFMSGEADACQNDSGGPLAYPDSRNIWHLVGIVSWGDGCGKKNKPGVYTRVTSYRNWITSKTGL

SEQ ID NO: 1064 - protein, 109 aa, Homo sapiens
MLLITSMLVLWMQLSQVNGQQVMQIPQYQHVQEGEDFTTYCNSSTTLSNIQWYKQRPGGHPVFLIQLVKSGEVKKQKRLTFQFGEAKKNSSLHITATQTTDVGTYFCAG

SEQ ID NO: 1065 - protein, 419 aa, Homo sapiens
MGPLSAPPCTQRITWKGVLLTASLLNFWNPPTTAQVTIEAQPPKVSEGKDVLLLVHNLPQNLAGYIWYKGQMTYLYHYITSYVVDGQRIIYGPAYSGRERVYSNASLLIQNVTQEDAGSYTLHIIKRRDGTGGVTGHFTFTLHLETPKPSISSSNLNPREAMEAVILTCDPATPAASYQWWMNGQSLPMTHRLQLSKTNRTLFIFGVTKYIAGPYECEIRNPVSASRSDPVTLNLLPKLSKPYITINNLNPRENKDVLTFTCEPKSKNYTYIWWLNGQSLPVSPRVKRPIENRILILPNVTRNETGPYQCEIRDRYGGIRSDPVTLNVLYGPDLPSIYPSFTYYRSGENLYLSCFAESNPRAQYSWTINGKFQLSGQKLSIPQITTKHSGLYACSVRNSATGKESSKSITVKVSDWILP

SEQ ID NO: 1066 - protein, 326 aa, Homo sapiens
MGPLSAPPCTQRITWKGVLLTASLLNFWNPPTTAQVTIEAQPPKVSEGKDVLLLVHNLPQNLAGYIWYKGQMTYLYHYITSYVVDGQRIIYGPAYSGRERVYSNASLLIQNVTQEDAGSYTLHIIKRRDGTGGVTGHFTFTLHLETPKPSISSSNLNPREAMEAVILTCDPATPAASYQWWMNGQSLPMTHRLQLSKTNRTLFIFGVTKYIAGPYECEIRNPVSASRSDPVTLNLLHGPDLPSIYPSFTYYRSGENLYLSCFAESNPRAQYSWTINGKFQLSGQKLSIPQITTKHSGLYACSVRNSATGKESSKSITVKVSDWILP

SEQ ID NO: 1067 - protein, 326 aa, Homo sapiens
MGPLSAPPCTQRITWKGVLLTASLLNFWNPPTTAQVTIEAQPPKVSEGKDVLLLVHNLPQNLAGYIWYKGQMTYLYHYITSYVVDGQRIIYGPAYSGRERVYSNASLLIQNVTQEDAGSYTLHIIKRRDGTGGVTGHFTFTLHPKLSKPYITINNLNPRENKDVLTFTCEPKSKNYTYIWWLNGQSLPVSPRVKRPIENRILILPNVTRNETGPYQCEIRDRYGGIRSDPVTLNVLYGPDLPSIYPSFTYYRSGENLYLSCFAESNPRAQYSWTINGKFQLSGQKLSIPQITTKHSGLYACSVRNSATGKESSKSITVKVSDWILP

SEQ ID NO: 1068 - protein, 700 aa, Homo sapiens
MEPLCPLLLVGFSLPLARALRGNETTADSNETTTTSGPPDPGASQPLLAWLLLPLLLLLLVLLLAAYFFRFRKQRKAVVSTSDKKMPNGILEEQEQQRVMLLSRSPSGPKKYFPIPVEHLEEEIRIRSADDCKQFREEFNSLPSGHIQGTFELANKEENREKNRYPNILPNDHSRVILSQLDGIPCSDYINASYIDGYKEKNKFIAAQGPKQETVNDFWRMVWEQKSATIVMLTNLKERKEEKCHQYWPDQGCWTYGNIRVCVEDCVVLVDYTIRKFCIQPQLPDGCKAPRLVSQLHFTSWPDFGVPFTPIGMLKFLKKVKTLNPVHAGPIVVHCSAGVGRTGTFIVIDAMMAMMHAEQKVDVFEFVSRIRNQRPQMVQTDMQYTFIYQALLEYYLYGDTELDVSSLEKHLQTMHGTTTHFDKIGLEEEFRKLTNVRIMKENMRTGNLPANMKKARVIQIIPYDFNRVILSMKRGQEYTDYINASFIDGYRQKDYFIATQGPLAHTVEDFWRMIWEWKSHTIVMLTEVQEREQDKCYQYWPTEGSVTHGEITIEIKNDTLSEAISIRDFLVTLNQPQARQEEQVRVVRQFHFHGWPEIGIPAEGKGMIDLIAAVQKQQQQTGNHPITVHCSAGAGRTGTFIALSNILERVKAEGLLDVFQAVKSLRLQRPHMVQTLEQYEFCYKVVQDFIDIFSDYANFK

SEQ ID NO: 1069 - protein, 642 aa, Homo sapiens
MSNRSSFSRLTWFRKQRKAVVSTSDKKMPNGILEEQEQQRVMLLSRSPSGPKKYFPIPVEHLEEEIRIRSADDCKQFREEFNSLPSGHIQGTFELANKEENREKNRYPNILPNDHSRVILSQLDGIPCSDYINASYIDGYKEKNKFIAAQGPKQETVNDFWRMVWEQKSATIVMLTNLKERKEEKCHQYWPDQGCWTYGNIRVCVEDCVVLVDYTIRKFCIQPQLPDGCKAPRLVSQLHFTSWPDFGVPFTPIGMLKFLKKVKTLNPVHAGPIVVHCSAGVGRTGTFIVIDAMMAMMHAEQKVDVFEFVSRIRNQRPQMVQTDMQYTFIYQALLEYYLYGDTELDVSSLEKHLQTMHGTTTHFDKIGLEEEFRKLTNVRIMKENMRTGNLPANMKKARVIQIIPYDFNRVILSMKRGQEYTDYINASFIDGYRQKDYFIATQGPLAHTVEDFWRMIWEWKSHTIVMLTEVQEREQDKCYQYWPTEGSVTHGEITIEIKNDTLSEAISIRDFLVTLNQPQARQEEQVRVVRQFHFHGWPEIGIPAEGKGMIDLIAAVQKQQQQTGNHPITVHCSAGAGRTGTFIALSNILERVKAEGLLDVFQAVKSLRLQRPHMVQTLEQYEFCYKVVQDFIDIFSDYANFK

SEQ ID NO: 1070 - protein, 615 aa, Homo sapiens
MPNGILEEQEQQRVMLLSRSPSGPKKYFPIPVEHLEEEIRIRSADDCKQFREEFNSLPSGHIQGTFELANKEENREKNRYPNILPNDHSRVILSQLDGIPCSDYINASYIDGYKEKNKFIAAQGPKQETVNDFWRMVWEQKSATIVMLTNLKERKEEKCHQYWPDQGCWTYGNIRVCVEDCVVLVDYTIRKFCIQPQLPDGCKAPRLVSQLHFTSWPDFGVPFTPIGMLKFLKKVKTLNPVHAGPIVVHCSAGVGRTGTFIVIDAMMAMMHAEQKVDVFEFVSRIRNQRPQMVQTDMQYTFIYQALLEYYLYGDTELDVSSLEKHLQTMHGTTTHFDKIGLEEEFRKLTNVRIMKENMRTGNLPANMKKARVIQIIPYDFNRVILSMKRGQEYTDYINASFIDGYRQKDYFIATQGPLAHTVEDFWRMIWEWKSHTIVMLTEVQEREQDKCYQYWPTEGSVTHGEITIEIKNDTLSEAISIRDFLVTLNQPQARQEEQVRVVRQFHFHGWPEIGIPAEGKGMIDLIAAVQKQQQQTGNHPITVHCSAGAGRTGTFIALSNILERVKAEGLLDVFQAVKSLRLQRPHMVQTLEQYEFCYKVVQDFIDIFSDYANFK

SEQ ID NO: 1071 - protein, 152 aa, Homo sapiens
MPAHSLVMSSPALPAFLLCSTLLVIKMYVVAIITGQVRLRKKAFANPEDALRHGGPQYCRSDPDVERCLRAHRNDMETIYPFLFLGFVYSFLGPNPFVAWMHFLVFLVGRVAHTVAYLGKLRAPIRSVTYTLAQLPCASMALQILWEAARHL

SEQ ID NO: 1072 - protein, 1907 aa, Homo sapiens
MAPEPAPGRTMVPLVPALVMLGLVAGAHGDSKPVFIKVPEDQTGLSGGVASFVCQATGEPKPRITWMKKGKKVSSQRFEVIEFDDGAGSVLRIQPLRVQRDEAIYECTATNSLGEINTSAKLSVLEEEQLPPGFPSIDMGPQLKVVEKARTATMLCAAGGNPDPEISWFKDFLPVDPATSNGRIKQLRSGALQIESSEESDQGKYECVATNSAGTRYSAPANLYVRVRRVAPRFSIPPSSQEVMPGGSVNLTCVAVGAPMPYVKWMMGAEELTKEDEMPVGRNVLELSNVVRSANYTCVAISSLGMIEATAQVTVKALPKPPIDLVVTETTATSVTLTWDSGNSEPVTYYGIQYRAAGTEGPFQEVDGVATTRYSIGGLSPFSEYAFRVLAVNSIGRGPPSEAVRARTGEQAPSSPPRRVQARMLSASTMLVQWEPPEEPNGLVRGYRVYYTPDSRRPPNAWHKHNTDAGLLTTVGSLLPGITYSLRVLAFTAVGDGPPSPTIQVKTQQGVPAQPADFQAEVESDTRIQLSWLLPPQERIIMYELVYWAAEDEDQQHKVTFDPTSSYTLEDLKPDTLYRFQLAARSDMGVGVFTPTIEARTAQSTPSAPPQKVMCVSMGSTTVRVSWVPPPADSRNGVITQYSVAYEAVDGEDRGRHVVDGISREHSSWDLVGLEKWTEYRVWVRAHTDVGPGPESSPVLVRTDEDVPSGPPRKVEVEPLNSTAVHVYWKLPVPSKQHGQIRGYQVTYVRLENGEPRGLPIIQDVMLAEAQWRPEESEDYETTISGLTPETTYSVTVAAYTTKGDGARSKPKIVTTTGAVPGRPTMMISTTAMNTALLQWHPPKELPGELLGYRLQYCRADEARPNTIDFGKDDQHFTVTGLHKGTTYIFRLAAKNRAGLGEEFEKEIRTPEDLPSGFPQNLHVTGLTTSTTELAWDPPVLAERNGRIISYTVVFRDINSQQELQNITTDTRFTLTGLKPDTTYDIKVRAWTSKGSGPLSPSIQSRTMPVEQVFAKNFRVAAAMKTSVLLSWEVPDSYKSAVPFKILYNGQSVEVDGHSMRKLIADLQPNTEYSFVLMNRGSSAGGLQHLVSIRTAPDLLPHKPLPASAYIEDGRFDLSMPHVQDPSLVRWFYIVVVPIDRVGGSMLTPRWSTPEELELDELLEAIEQGGEEQRRRRRQAERLKPYVAAQLDVLPETFTLGDKKNYRGFYNRPLSPDLSYQCFVLASLKEPMDQKRYASSPYSDEIVVQVTPAQQQEEPEMLWVTGPVLAVILIILIVIAILLFKRKRTHSPSSKDEQSIGLKDSLLAHSSDPVEMRRLNYQTPGMRDHPPIPITDLADNIERLKANDGLKFSQEYESIDPGQQFTWENSNLEVNKPKNRYANVIAYDHSRVILTSIDGVPGSDYINANYIDGYRKQNAYIATQGPLPETMGDFWRMVWEQRTATVVMMTRLEEKSRVKCDQYWPARGTETCGLIQVTLLDTVELATYTVRTFALHKSGSSEKRELRQFQFMAWPDHGVPEYPTPILAFLRRVKACNPLDAGPMVVHCSAGVGRTGCFIVIDAMLERMKHEKTVDIYGHVTCMRSQRNYMVQTEDQYVFIHEALLEAATCGHTEVPARNLYAHIQKLGQVPPGESVTAMELEFKLLASSKAHTSRFISANLPCNKFKNRLVNIMPYELTRVCLQPIRGVEGSDYINASFLDGYRQQKAYIATQGPLAESTEDFWRMLWEHNSTIIVMLTKLREMGREKCHQYWPAERSARYQYFVVDPMAEYNMPQYILREFKVTDARDGQSRTIRQFQFTDWPEQGVPKTGEGFIDFIGQVHKTKEQFGQDGPITVHCSAGVGRTGVFITLSIVLERMRYEGVVDMFQTVKTLRTQRPAMVQTEDQYQLCYRAALEYLGSFDHYAT

SEQ ID NO: 1073 - protein, 1898 aa, Homo sapiens
MAPEPAPGRTMVPLVPALVMLGLVAGAHGDSKPVFIKVPEDQTGLSGGVASFVCQATGEPKPRITWMKKGKKVSSQRFEVIEFDDGAGSVLRIQPLRVQRDEAIYECTATNSLGEINTSAKLSVLEEEQLPPGFPSIDMGPQLKVVEKARTATMLCAAGGNPDPEISWFKDFLPVDPATSNGRIKQLRSGALQIESSEESDQGKYECVATNSAGTRYSAPANLYVRVRRVAPRFSIPPSSQEVMPGGSVNLTCVAVGAPMPYVKWMMGAEELTKEDEMPVGRNVLELSNVVRSANYTCVAISSLGMIEATAQVTVKALPKPPIDLVVTETTATSVTLTWDSGNSEPVTYYGIQYRAAGTEGPFQEVDGVATTRYSIGGLSPFSEYAFRVLAVNSIGRGPPSEAVRARTGEQAPSSPPRRVQARMLSASTMLVQWEPPEEPNGLVRGYRVYYTPDSRRPPNAWHKHNTDAGLLTTVGSLLPGITYSLRVLAFTAVGDGPPSPTIQVKTQQGVPAQPADFQAEVESDTRIQLSWLLPPQERIIMYELVYWAAEDEDQQHKVTFDPTSSYTLEDLKPDTLYRFQLAARSDMGVGVFTPTIEARTAQSTPSAPPQKVMCVSMGSTTVRVSWVPPPADSRNGVITQYSVAYEAVDGEDRGRHVVDGISREHSSWDLVGLEKWTEYRVWVRAHTDVGPGPESSPVLVRTDEDVPSGPPRKVEVEPLNSTAVHVYWKLPVPSKQHGQIRGYQVTYVRLENGEPRGLPIIQDVMLAEAQETTISGLTPETTYSVTVAAYTTKGDGARSKPKIVTTTGAVPGRPTMMISTTAMNTALLQWHPPKELPGELLGYRLQYCRADEARPNTIDFGKDDQHFTVTGLHKGTTYIFRLAAKNRAGLGEEFEKEIRTPEDLPSGFPQNLHVTGLTTSTTELAWDPPVLAERNGRIISYTVVFRDINSQQELQNITTDTRFTLTGLKPDTTYDIKVRAWTSKGSGPLSPSIQSRTMPVEQVFAKNFRVAAAMKTSVLLSWEVPDSYKSAVPFKILYNGQSVEVDGHSMRKLIADLQPNTEYSFVLMNRGSSAGGLQHLVSIRTAPDLLPHKPLPASAYIEDGRFDLSMPHVQDPSLVRWFYIVVVPIDRVGGSMLTPRWSTPEELELDELLEAIEQGGEEQRRRRRQAERLKPYVAAQLDVLPETFTLGDKKNYRGFYNRPLSPDLSYQCFVLASLKEPMDQKRYASSPYSDEIVVQVTPAQQQEEPEMLWVTGPVLAVILIILIVIAILLFKRKRTHSPSSKDEQSIGLKDSLLAHSSDPVEMRRLNYQTPGMRDHPPIPITDLADNIERLKANDGLKFSQEYESIDPGQQFTWENSNLEVNKPKNRYANVIAYDHSRVILTSIDGVPGSDYINANYIDGYRKQNAYIATQGPLPETMGDFWRMVWEQRTATVVMMTRLEEKSRVKCDQYWPARGTETCGLIQVTLLDTVELATYTVRTFALHKSGSSEKRELRQFQFMAWPDHGVPEYPTPILAFLRRVKACNPLDAGPMVVHCSAGVGRTGCFIVIDAMLERMKHEKTVDIYGHVTCMRSQRNYMVQTEDQYVFIHEALLEAATCGHTEVPARNLYAHIQKLGQVPPGESVTAMELEFKLLASSKAHTSRFISANLPCNKFKNRLVNIMPYELTRVCLQPIRGVEGSDYINASFLDGYRQQKAYIATQGPLAESTEDFWRMLWEHNSTIIVMLTKLREMGREKCHQYWPAERSARYQYFVVDPMAEYNMPQYILREFKVTDARDGQSRTIRQFQFTDWPEQGVPKTGEGFIDFIGQVHKTKEQFGQDGPITVHCSAGVGRTGVFITLSIVLERMRYEGVVDMFQTVKTLRTQRPAMVQTEDQYQLCYRAALEYLGSFDHYAT

SEQ ID NO: 1074 - protein, 358 aa, Homo sapiens
MAEGERQPPPDSSEEAPPATQNFIIPKKEIHTVPDMGKWKRSQAYADYIGFILTLNEGVKGKKLTFEYRVSEMWNEVHEEKEQAAKQSVSCDECIPLPRAGHCAPSEAIEKLVALLNTLDRWIDETPPVDQPSRFGNKAYRTWYAKLDEEAENLVATVVPTHLAAAVPEVAVYLKESVGNSTRIDYGTGHEAAFAAFLCCLCKIGVLRVDDQIAIVFKVFNRYLEVMRKLQKTYRMEPAGSQGVWGLDDFQFLPFIWGSSQLIDHPYLEPRHFVDEKAVNENHKDYMFLECILFITEMKTGPFAEHSNQLWNISAVPSWSKVNQGLIRMYKAECLEKFPVIQHFKFGSLLPIHPVTSG

SEQ ID NO: 1075 - protein, 323 aa, Homo sapiens
MAEGERQPPPDSSEEAPPATQNFIIPKKEIHTVPDMGKWKRSQAYADYIGFILTLNEGVKGKKLTFEYRVSEAIEKLVALLNTLDRWIDETPPVDQPSRFGNKAYRTWYAKLDEEAENLVATVVPTHLAAAVPEVAVYLKESVGNSTRIDYGTGHEAAFAAFLCCLCKIGVLRVDDQIAIVFKVFNRYLEVMRKLQKTYRMEPAGSQGVWGLDDFQFLPFIWGSSQLIDHPYLEPRHFVDEKAVNENHKDYMFLECILFITEMKTGPFAEHSNQLWNISAVPSWSKVNQGLIRMYKAECLEKFPVIQHFKFGSLLPIHPVTSG

SEQ ID NO: 1076 - protein, 294 aa, Homo sapiens
MAEGERQPPPDSSEEAPPATQNFIIPKKEIHTVPDMGKWKRSQAIEKLVALLNTLDRWIDETPPVDQPSRFGNKAYRTWYAKLDEEAENLVATVVPTHLAAAVPEVAVYLKESVGNSTRIDYGTGHEAAFAAFLCCLCKIGVLRVDDQIAIVFKVFNRYLEVMRKLQKTYRMEPAGSQGVWGLDDFQFLPFIWGSSQLIDHPYLEPRHFVDEKAVNENHKDYMFLECILFITEMKTGPFAEHSNQLWNISAVPSWSKVNQGLIRMYKAECLEKFPVIQHFKFGSLLPIHPVTSG

SEQ ID NO: 1077 - protein, 281 aa, Homo sapiens
MAEGERQPPPDSSEEAPPATQNFIIPKKEIHTVPDMGKWKRSQAYADYIGFILTLNEGVKGKKLTFEYRVSEEAENLVATVVPTHLAAAVPEVAVYLKESVGNSTRIDYGTGHEAAFAAFLCCLCKIGVLRVDDQIAIVFKVFNRYLEVMRKLQKTYRMEPAGSQGVWGLDDFQFLPFIWGSSQLIDHPYLEPRHFVDEKAVNENHKDYMFLECILFITEMKTGPFAEHSNQLWNISAVPSWSKVNQGLIRMYKAECLEKFPVIQHFKFGSLLPIHPVTSG

SEQ ID NO: 1078 - protein, 402 aa, Homo sapiens
MAETSEEVAVLVQRVVKDITNAFRRNPHIDEIGLIPCPEARYNRSPIVLVENKLGVESWCVKFLLPYVHNKLLLYRTRKQWLNRDELIDVTCTLLLLNPDFTTAWNVRKELILSGTLNPIKDLHLGKLALTKFPKSPETWIHRRWVLQQLIQETSLPSFVTKGNLGTIPTERAQRLIQEEMEVCGEAAGRYPSNYNAWSHRIWVLQHLAKLDVKILLDELSSTKHWASMHVSDHSGFHYRQFLLKSLISQTVIDSSVMEQNPLRSEPALVPPKDEEAAVSTEEPRINLPHLLEEEVEFSTDLIDSYPGHETLWCHRRHIFYLQHHLNAGSQLSQAMEVDGLNDSSKQGYSQETKRLKRTPVPDSLGLEMEHRFIDQVLSTCRNVEQARFASAYRKWLVTLSQ

SEQ ID NO: 1079 - protein, 531 aa, Homo sapiens
MDGIVPDIAVGTKRGSDELFSTCVTNGPFIMSSNSASAANGNDSKKFKGDSRSAGVPSRVIHIRKLPIDVTEGEVISLGLPFGKVTNLLMLKGKNQAFIEMNTEEAANTMVNYYTSVTPVLRGQPIYIQFSNHKELKTDSSPNQARAQAALQAVNSVQSGNLALAASAAAVDAGMAMAGQSPVLRIIVENLFYPVTLDVLHQIFSKFGTVLKIITFTKNNQFQALLQYADPVSAQHAKLSLDGQNIYNACCTLRIDFSKLTSLNVKYNNDKSRDYTRPDLPSGDSQPSLDQTMAAAFGLSVPNVHGALAPLAIPSAAAAAAAAGRIAIPGLAGAGNSVLLVSNLNPERVTPQSLFILFGVYGDVQRVKILFNKKENALVQMADGNQAQLAMSHLNGHKLHGKPIRITLSKHQNVQLPREGQEDQGLTKDYGNSPLHRFKKPGSKNFQNIFPPSATLHLSNIPPSVSEEDLKVLFSSNGGVVKGFKFFQKDRKMALIQMGSVEEAVQALIDLHNHDLGENHHLRVSFSKSTI

SEQ ID NO: 1080 - protein, 550 aa, Homo sapiens
MDGIVPDIAVGTKRGSDELFSTCVTNGPFIMSSNSASAANGNDSKKFKGDSRSAGVPSRVIHIRKLPIDVTEGEVISLGLPFGKVTNLLMLKGKNQAFIEMNTEEAANTMVNYYTSVTPVLRGQPIYIQFSNHKELKTDSSPNQARAQAALQAVNSVQSGNLALAASAAAVDAGMAMAGQSPVLRIIVENLFYPVTLDVLHQIFSKFGTVLKIITFTKNNQFQALLQYADPVSAQHAKLSLDGQNIYNACCTLRIDFSKLTSLNVKYNNDKSRDYTRPDLPSGDSQPSLDQTMAAAFASPYAGAGFPPTFAIPQAAGLSVPNVHGALAPLAIPSAAAAAAAAGRIAIPGLAGAGNSVLLVSNLNPERVTPQSLFILFGVYGDVQRVKILFNKKENALVQMADGNQAQLAMSHLNGHKLHGKPIRITLSKHQNVQLPREGQEDQGLTKDYGNSPLHRFKKPGSKNFQNIFPPSATLHLSNIPPSVSEEDLKVLFSSNGGVVKGFKFFQKDRKMALIQMGSVEEAVQALIDLHNHDLGENHHLRVSFSKSTI

SEQ ID NO: 1081 - protein, 557 aa, Homo sapiens
MDGIVPDIAVGTKRGSDELFSTCVTNGPFIMSSNSASAANGNDSKKFKGDSRSAGVPSRVIHIRKLPIDVTEGEVISLGLPFGKVTNLLMLKGKNQAFIEMNTEEAANTMVNYYTSVTPVLRGQPIYIQFSNHKELKTDSSPNQARAQAALQAVNSVQSGNLALAASAAAVDAGMAMAGQSPVLRIIVENLFYPVTLDVLHQIFSKFGTVLKIITFTKNNQFQALLQYADPVSAQHAKLSLDGQNIYNACCTLRIDFSKLTSLNVKYNNDKSRDYTRPDLPSGDSQPSLDQTMAAAFGAPGIISASPYAGAGFPPTFAIPQAAGLSVPNVHGALAPLAIPSAAAAAAAAGRIAIPGLAGAGNSVLLVSNLNPERVTPQSLFILFGVYGDVQRVKILFNKKENALVQMADGNQAQLAMSHLNGHKLHGKPIRITLSKHQNVQLPREGQEDQGLTKDYGNSPLHRFKKPGSKNFQNIFPPSATLHLSNIPPSVSEEDLKVLFSSNGGVVKGFKFFQKDRKMALIQMGSVEEAVQALIDLHNHDLGENHHLRVSFSKSTI

SEQ ID NO: 1082 - protein, 195 aa, Homo sapiens
MAPAASRLRAEAGLGALPRRALAQYLLFLRLYPVLTKAATSGILSALGNFLAQMIEKKRKKENSRSLDVGGPLRYAVYGFFFTGPLSHFFYFFMEHWIPPEVPLAGLRRLLLDRLVFAPAFLMLFFLIMNFLEGKDASAFAAKMRGGFWPALRMNWRVWTPLQFININYVPLKFRVLFANLAALFWYAYLASLGK

SEQ ID NO: 1083 - protein, 406 aa, Homo sapiens
MAASAPPPPDKLEGGGGPAPPPAPPSTGRKQGKAGLQMKSPEKKRRKSNTQGPAYSHLTEFAPPPTPMVDHLVASNPFEDDFGAPKVGVAAPPFLGSPVPFGGFRVQGGMAGQVPPGYSTGGGGGPQPLRRQPPPFPPNPMGPAFNMPPQGPGYPPPGNMNFPSQPFNQPLGQNFSPPSGQMMPGPVGGFGPMISPTMGQPPRAELGPPSLSQRFAQPGAPFGPSPLQRPGQGLPSLPPNTSPFPGPDPGFPGPGGEDGGKPLNPPASTAFPQEPHSGSPAAAVNGNQPSFPPNSSGRGGGTPDANSLAPPGKAGGGSGPQPPPGLVYPCGACRSEVNDDQDAILCEASCQKWFHRECTGMTESAYGLLTTEASAVWACDLCLKTKEIQSVYIREGMGQLVAANDG

SEQ ID NO: 1084 - protein, 209 aa, Homo sapiens
MSNLKPDGEHGGSTGTGSGAGSGGALEEEVRTLFVSGLPVDIKPRELYLLFRPFKGYEGSLIKLTARQPVGFVIFDSRAGAEAAKNALNGIRFDPENPQTLRLEFAKANTKMAKSKLMATPNPSNVHPALGAHFIARDPYDLMGAALIPASPEAWAPYPLYTTELTPAISHAAFTYPTATAAAAALHAQVRWYPSSDTTQQGWKYRQFC

SEQ ID NO: 1085 - protein, 98 aa, Homo sapiens
MAKSKLMATPNPSNVHPALGAHFIARDPYDLMGAALIPASPEAWAPYPLYTTELTPAISHAAFTYPTATAAAAALHAQVRWYPSSDTTQQGWKYRQFC

SEQ ID NO: 1086 - protein, 239 aa, Homo sapiens
MLLQPAPCAPSAGFPRPLAAPGAMHGSQKDTTFTKIFVGGLPYHTTDASLRKYFEGFGDIEEAVVITDRQTGKSRGYGFVTMADRAAAERACKDPNPIIDGRKANVNLAYLGAKPRSLQTGFAIGVQQLHPTLIQRTYGLTPHYIYPPAIVQPSVVIPAAPVPSLSSPYIEYTPASPAYAQYPPATYDQYPYAASPATAASFVGYSYPAAVPQALSAAAPAGTTFVQYQAPQLQPDRMQ

SEQ ID NO: 1087 - protein, 121 aa, Homo sapiens
MLLQPAPCAPSAGFPRPLAAPGAMHGSQKDTTFTKIFVGGLPYHTTDASLRKYFEGFGDIEEAVVITDRQTGKSRGYGFVTMADRAAAERACKDPNPIIDGRKANVNLAYLGAKPRSLQTG

SEQ ID NO: 1088 - protein, 740 aa, Homo sapiens
MEADGDGEELARLRSVFAACDANRSGRLEREEFRALCTELRVRPADAEAVFQRLDADRDGAITFQEFARGFLGSLRGGRRRDWGPLDPAPAVSEAGPETHDSEEDEGDEDAAAALATSCGPASPGRAWQDFQARLGDEAKFIPREEQVSTLYQNINLVEPRLIQPYEHVIKNFIREIRLQSTEMENLAIAVKRAQDKAAMQLSELEEEMDQRIQAAEHKTRKDEKRKAEEALSDLRRQYETEVGDLQVTIKKLRKLEEQSKRVSQKEDVAALKKQIYDLSMENQKVKKDLLEAQTNIAFLQSELDALKSDYADQSLNTERDLEIIRAYTEDRNSLERQIEILQTANRKLHDSNDGLRSALENSYSKFNRSLHINNISPGNTISRSSPKFIGHSPQPLGYDRSSRSSYVDEDCDSLALCDPLQRTNCEVDSLPESCFDSGLSTLRDPNEYDSEVEYKHQRGFQRSHGVQESFGGDASDTDVPDIRDEETFGLEDVASVLDWKPQGSVSEGSIVSSSRKPISALSPQTDLVDDNAKSFSSQKAYKIVLAGDAAVGKSSFLMRLCKNEFRENISATLGVDFQMKTLIVDGERTVLQLWDTAGQERFRSIAKSYFRKADGVLLLYDVTCEKSFLNIREWVDMIEDAAHETVPIMLVGNKADIRDTAATEGQKCVPGHFGEKLAMTYGALFCETSAKDGSNIVEAVLHLAREVKKRTDKDDSRSITNLTGTNSKKSPQMKNCCNG

SEQ ID NO: 1089 - protein, 189 aa, Homo sapiens
MEADGDGEELARLRSVFAACDANRSGRLEREEFRALCTELRVRPADAEAVFQRLDADRDGAITFQEFARGFLGSLRGGRRRDWGPLDPAPAVSEAGPETHDSEEDEGDEDAAAALATSCGPASPGRAWQDFQARLGDEAKFIPRFGYTISKPAFVFVRHLITLCALSWAKKEGRETLWTIEEGGAKMAE

SEQ ID NO: 1090 - protein, 1007 aa, Homo sapiens
MVSKMIIENFEALKSWLSKTLEPICDADPSALAKYVLALVKKDKSEKELKALCIDQLDVFLQKETQIFVEKLFDAVNTKSYLPPPEQPSSGSLKVEFFPHQEKDIKKEEITKEEEREKKFSRRLNHSPPQSSSRYRENRSRDERKKDDRSRKRDYDRNPPRRDSYRDRYNRRRGRSRSYSRSRSRSWSKERLRERDRDRSRTRSRSRTRSRERDLVKPKYDLDRTDPLENNYTPVSSVPSISSGHYPVPTLSSTITVIAPTHHGNNTTESWSEFHEDQVDHNSYVRPPMPKKRCRDYDEKGFCMRGDMCPFDHGSDPVVVEDVNLPGMLPFPAQPPVVEGPPPPGLPPPPPILTPPPVNLRPPVPPPGPLPPSLPPVTGPPPPLPPLQPSGMDAPPNSATSSVPTVVTTGIHHQPPPAPPSLFTADTYDTDGYNPEAPSITNTSRPMYRHRVHAQRPNLIGLTSGDMDLPPREKPPNKSSMRIVVDSESRKRTIGSGEPGVPTKKTWFDKPNFNRTNSPGFQKKVQFGNENTKLELRKVPPELNNISKLNEHFSRFGTLVNLQVAYNGDPEGALIQFATYEEAKKAISSTEAVLNNRFIKVYWHREGSTQQLQTTSPKVMQPLVQQPILPVVKQSVKERLGPVPSSTIEPAEAQSASSDLPQNVTKLSVKDRLGFVSKPSVSATEKVLSTSTGLTKTVYNPAALKAAQKTLLVSTSAVDNNEAQKKKQEALKLQQDVRKRKQEILEKHIETQKMLISKLEKNKTMKSEDKAEIMKTLEVLTKNITKLKDEVKAASPGRCLPKSIKTKTQMQKELLDTELDLYKKMQAGEEVTELRRKYTELQLEAAKRGILSSGRGRGIHSRGRGAVHGRGRGRGRGRGVPGHAVVDHRPRALEISAFTESDREDLLPHFAQYGEIEDCQIDDSSLHAVITFKTRAEAEAAAVHGARFKGQDLKLAWNKPVTNISAVETEEVEPDEEEFQEESLVDDSLLQDDDEEEEDNESRSWRR

SEQ ID NO: 1091 - protein, 983 aa, Homo sapiens
MVSKMIIENFEALKSWLSKTLEPICDADPSALAKYVLALVKKDKSEKELKALCIDQLDVFLQKETQIFVEKLFDAVNTKSYLPPPEQPSSGSLKVEFFPHQEKDIKKEEITKEEEREKKFSRRLNHSPPQSSSRYRENRSRDERKKDDRSRKRDYDRNPPRRDSYRDRYNRRRGRSRSYSRSRSRSWSKERLRERDRDRSRTRSRSRTRSRERDLVKPKYDLDRTDPLENNYTPVSSVPSISSGHYPVPTLSSTITVIAPTHHGNNTTESWSEFHEDQVDHNSYVRPPMPKKRCRDYDEKGFCMRGDMCPFDHGSDPVVVEDVNLPGMLPFPAQPPVVEGPPPPGLPPPPPILTPPPVNLRPPVPPPGPLPPSLPPVTGPPPPLPPLQPSGMDAPPNSATSSVPTVVTTGIHHQPPPAPPSLFTADTYDTDGYNPEAPSITNTSRPMYRHRVHAQRPNLIGLTSGDMDLPPREKPPNKSSMRIVVDSESRKRTIGSGEPGVPTKKTWFDKPNFNRTNSPGFQKKVQFGNENTKLELRKVPPELNNISKLNEHFSRFGTLVNLQVAYNGDPEGALIQFATYEEAKKAISSTEAVLNNRFIKVYWHREGSTQQLQTTSPKVMQPLVQQPILPVVKQSVKERLGPVPSSTIEPAEAQSASSDLPQVLSTSTGLTKTVYNPAALKAAQKTLLVSTSAVDNNEAQKKKQEALKLQQDVRKRKQEILEKHIETQKMLISKLEKNKTMKSEDKAEIMKTLEVLTKNITKLKDEVKAASPGRCLPKSIKTKTQMQKELLDTELDLYKKMQAGEEVTELRRKYTELQLEAAKRGILSSGRGRGIHSRGRGAVHGRGRGRGRGRGVPGHAVVDHRPRALEISAFTESDREDLLPHFAQYGEIEDCQIDDSSLHAVITFKTRAEAEAAAVHGARFKGQDLKLAWNKPVTNISAVETEEVEPDEEEFQEESLVDDSLLQDDDEEEEDNESRSWRR

SEQ ID NO: 1092 - protein, 980 aa, Homo sapiens
MVSKMIIENFEALKSWLSKTLEPICDADPSALAKYVLALVKKDKSEKELKALCIDQLDVFLQKETQIFVEKLFDAVNTKSYLPPPEQPSSGSLKVEFFPHQEKDIKKEEITKEEEREKKFSRRLNHSPPQSSSRYRENRSRDERKKDDRSRKRDYDRNPPRRDSYRDRYNRRRGRSRSYSRSRSRSWSKERLRERDRDRSRTRSRSRTRSRERDLVKPKYDLDRTDPLENNYTPVSSVPSISSGHYPVPTLSSTITVIAPTHHGNNTTESWSEFHEDQVDHNSYVRPPMPKKRCRDYDEKGFCMRGDMCPFDHGSDPVVVEDVNLPGMLPFPAQPPVVEGPPPPGLPPPPPILTPPPVNLRPPVPPPGPLPPSLPPVTGPPPPLPPLQPSGMDAPPNSATSSVPTVVTTGIHHQPPPAPPSLFTADTYDTDGYNPEAPSITNTSRPMYRHRVHAQRPNLIGLTSGDMDLPPREKPPNKSSMRIVVDSESRKRTIGSGEPGVPTKKTWFDKPNFNRTNSPGFQKKVQFGNENTKLELRKVPPELNNISKLNEHFSRFGTLVNLQVAYNGDPEGALIQFATYEEAKKAISSTEAVLNNRFIKVYWHREGSTQQLQTTSPKPLVQQPILPVVKQSVKERLGPVPSSTIEPAEAQSASSDLPQVLSTSTGLTKTVYNPAALKAAQKTLLVSTSAVDNNEAQKKKQEALKLQQDVRKRKQEILEKHIETQKMLISKLEKNKTMKSEDKAEIMKTLEVLTKNITKLKDEVKAASPGRCLPKSIKTKTQMQKELLDTELDLYKKMQAGEEVTELRRKYTELQLEAAKRGILSSGRGRGIHSRGRGAVHGRGRGRGRGRGVPGHAVVDHRPRALEISAFTESDREDLLPHFAQYGEIEDCQIDDSSLHAVITFKTRAEAEAAAVHGARFKGQDLKLAWNKPVTNISAVETEEVEPDEEEFQEESLVDDSLLQDDDEEEEDNESRSWRR

SEQ ID NO: 1093 - protein, 558 aa, Homo sapiens
MYRHRVHAQRPNLIGLTSGDMDLPPREKPPNKSSMRIVVDSESRKRTIGSGEPGVPTKKTWFDKPNFNRTNSPGFQKKVQFGNENTKLELRKVPPELNNISKLNEHFSRFGTLVNLQVAYNGDPEGALIQFATYEEAKKAISSTEAVLNNRFIKVYWHREGSTQQLQTTSPKPLVQQPILPVVKQSVKERLGPVPSSTIEPAEAQSASSDLPQNVTKLSVKDRLGFVSKPSVSATEKVLSTSTGLTKTVYNPAALKAAQKTLLVSTSAVDNNEAQKKKQEALKLQQDVRKRKQEILEKHIETQKMLISKLEKNKTMKSEDKAEIMKTLEVLTKNITKLKDEVKAASPGRCLPKSIKTKTQMQKELLDTELDLYKKMQAGEEVTELRRKYTELQLEAAKRGILSSGRGRGIHSRGRGAVHGRGRGRGRGRGVPGHAVVDHRPRALEISAFTESDREDLLPHFAQYGEIEDCQIDDSSLHAVITFKTRAEAEAAAVHGARFKGQDLKLAWNKPVTNISAVETEEVEPDEEEFQEESLVDDSLLQDDDEEEEDNESRSWRR

SEQ ID NO: 1094 - protein, 534 aa, Homo sapiens
MYRHRVHAQRPNLIGLTSGDMDLPPREKPPNKSSMRIVVDSESRKRTIGSGEPGVPTKKTWFDKPNFNRTNSPGFQKKVQFGNENTKLELRKVPPELNNISKLNEHFSRFGTLVNLQVAYNGDPEGALIQFATYEEAKKAISSTEAVLNNRFIKVYWHREGSTQQLQTTSPKPLVQQPILPVVKQSVKERLGPVPSSTIEPAEAQSASSDLPQVLSTSTGLTKTVYNPAALKAAQKTLLVSTSAVDNNEAQKKKQEALKLQQDVRKRKQEILEKHIETQKMLISKLEKNKTMKSEDKAEIMKTLEVLTKNITKLKDEVKAASPGRCLPKSIKTKTQMQKELLDTELDLYKKMQAGEEVTELRRKYTELQLEAAKRGILSSGRGRGIHSRGRGAVHGRGRGRGRGRGVPGHAVVDHRPRALEISAFTESDREDLLPHFAQYGEIEDCQIDDSSLHAVITFKTRAEAEAAAVHGARFKGQDLKLAWNKPVTNISAVETEEVEPDEEEFQEESLVDDSLLQDDDEEEEDNESRSWRR

SEQ ID NO: 1095 - protein, 120 aa, Homo sapiens
MVSKMIIENFEALKSWLSKTLEPICDADPSALAKYVLALVKKDKSEKELKALCIDQLDVFLQKETQIFVEKLFDAVNTKSYLPPPEQPSSGSLKVEFFPHQEKDIKKEEVTICVNTLQVI

SEQ ID NO: 1096 - protein, 156 aa, Homo sapiens
MQIFVKTLTGKTITLEVEPSDTIENVKAKIQDKEGIPPDQQRLIFAGKQLEDGRTLSDYNIQKESTLHLVLRLRGGAKKRKKKSYTTPKKNKHKRKKVKLAVLKYYKVDENGKISRLRRECPSDECGAGVFMASHFDRHYCGKCCLTYCFNKPEDK

SEQ ID NO: 1097 - protein, 86 aa, Homo sapiens
MSLPLNPKPFLNGLTGKPVMVKLKWGMEYKGYLVSVDGYMNMQLANTEEYIDGALSGHLGEVLIRCNNVLYIRGVEEEEEDGEMRE

SEQ ID NO: 1098 - protein, 205 aa, Homo sapiens
MLRALSRLGAGTPCRPRAPLVLPARGRKTRHDPLAKSKIERVNMPPAVDPAEFFVLMERYQHYRQTVRALRMEFVSEVQRKVHEARAGVLAERKALKDAAEHRELMAWNQAENRRLHELRIARLRQEEREQEQRQALEQARKAEEVQAWAQRKEREVLQLQEEVKNFITRENLEARVEAALDSRKNYNWAITREGLVVRPQRRDS

SEQ ID NO: 1099 - protein, 243 aa, Homo sapiens
MTDYGEEQRNELEALESIYPDSFTVLSENPPSFTITVTSEAGENDETVQTTLKFTYSEKYPDEAPLYEIFSQENLEDNDVSDILKLLALQAEENLGMVMIFTLVTAVQEKLNEIVDQIKTRREEEKKQKEKEAEEAEKQLFHGTPVTIENFLNWKAKFDAELLEIKKKRMKEEEQAGKNKLSGKQLFETDHNLDTSDIQFLEDAGNNVEVDESLFQEMDDLELEDDEDDPDYNPADPESDSAD

SEQ ID NO: 1100 - protein, 147 aa, Homo sapiens
MVMIFTLVTAVQEKLNEIVDQIKTRREEEKKQKEKEAEEAEKQLFHGTPVTIENFLNWKAKFDAELLEIKKKRMKEEEQAGKNKLSGKQLFETDHNLDTSDIQFLEDAGNNVEVDESLFQEMDDLELEDDEDDPDYNPADPESDSAD

SEQ ID NO: 1101 - protein, 106 aa, Homo sapiens
MSSLSEYAFRMSRLSARLFGEVTRPTNSKSMKVVKLFSELPLAKKKETYDWYPNHHTYAELMQTLRFLGLYRDEHQDFMDEQKRLKKLRGKEKPKKGEGKRAAKRK

SEQ ID NO: 1102 - protein, 102 aa, Homo sapiens
MFLTALLWRGRIPGRQWIGKHRRPRFVSLRAKQNMIRRLEIEAENHYWLSMPYMTREQERGHAAVRRREAFEAIKAAATSKFPPHRFIADQLDHLNVTKKWS

SEQ ID NO: 1103 - protein, 306 aa, Homo sapiens
MGCDGGTIPKRHELVKGPKKVEKVDKDAELVAQWNYCTLSQEILRRPIVACELGRLYNKDAVIEFLLDKSAEKALGKAASHIKSIKNVTELKLSDNPAWEGDKGNTKGDKHDDLQRARFICPVVGLEMNGRHRFCFLRCCGCVFSERALKEIKAEVCHTCGAAFQEDDVIMLNGTKEDVDVLKTRMEERRLRAKLEKKTKKPKAAESVSKPDVSEEAPGPSKVKTGKPEEASLDSREKKTNLAPKSTAMNESSSGKAGKPPCGATKRSIADSEESEAYKSLFTTHSSAKRSKEESAHWVTHTSYCF

SEQ ID NO: 1104 - protein, 569 aa, Homo sapiens
MSEASGNLNSLRMANVALREELNALRGENANLGLQLGRALAEVNSLRGNVSSYIRWPVPIVPVLAEENLEFALSEIEVIPGGELPFLCRPPPRAEPDCISDDLLINVIQDRSTPDGPADPPLLPIPPPPALPPPASKEPPPQPPLAPLERPEIEPFSGDPVYLAEFLMQLETFIADHEVHFPGGAERVAFLISFFTGEAKDWAISVTQEGSPLHANFPRFLDEIRKEFCGPIPPRVAKKAIRKLKQGHCTLGSYADAFQFLAQFLSWDDCRLQNQFLKGLSEFFRKELLWSTEMADLDELILECVEIERKVRVPKPIPLPGVRNIIFPFAPSPNEEESEDEEYYSEDEDQEARRHRLHSKDQRKRMRAFQQEMKEKEEEEMKKEEEMKKKEEKEEEEEEEMKQKEEEEEIRNKNEEEGESKDEEDEDEDGGQKPEGEPQQDPGTEETYGEVEEEPLDEAQDDDLDELMEMEPTFVHASSQTSGPTSGYHAENFLGASPPIIQPSRRRNQNRVPLLEGLPGTNSPFYSSPQLIRRTGRLGQRQVRRRPPVLFRLTPRQGGHRAARGRIRV

SEQ ID NO: 1105 - protein, 113 aa, Homo sapiens
MDGRVQLIKALLALPIRPATRRWRNPIPFPETFDGDTDRLPEFIVQTGSYMFVDENTFSSDALKVTFLITRLTGPALQWVIPYIKKESPLLNDYRGFLAEMKRVFGWEEDEDF

SEQ ID NO: 1106 - protein, 239 aa, Homo sapiens
MVQPQTSKAESPALAASPNAQMDDVIDTLTSLRLTNSALRREASTLRAEKANLTNMLESVMAELTLLRTRARIPGALQITPPISSITSNGTRPMTTPPTSLPEPFSGDPGRLAGFLMQMDRFMIFQASRFPGEAERVAFLVSRLTGEAEKWAIPHMQPDSPLRNNYQGFLAELRRTYKSPLRHARRAQIRKTSASNRAVRERQMLCRQLASAGTGPCPVHPASNGTSPAPALPARARNL

SEQ ID NO: 1107 - protein, 437 aa, Homo sapiens
MTQFLPPNLLALFAPRDPIPYLPPLEKLPHEKHHNQPYCGIAPYIREFEDPRDAPPPTRAETREERMERKRREKIERRQQEVETELKMWDPHNDPNAQGDAFKTLFVARVNYDTTESKLRREFEVYGPIKRIHMVYSKRSGKPRGYAFIEYEHERDMHSAYKHADGKKIDGRRVLVDVERGRTVKGWRPRRLGGGLGGTRRGGADVNIRHSGRDDTSRYDERPGPSPLPHRDRDRDRERERRERSRERDKERERRRSRSRDRRRRSRSRDKEERRRSRERSKDKDRDRKRRSSRSRERARRERERKEELRGGGGDMAEPSEAGDAPPDDGPPGELGPDGPDGPEEKGRDRDRERRRSHRSERERRRDRDRDRDRDREHKRGERGSERGRDEARGGGGGQDNGLEGLGNDSRDMYMESEGGDGYLAPENGYLMEAAPE

SEQ ID NO: 1108 - protein, 428 aa, Homo sapiens
MTQFLPPNLLALFAPRDPIPYLPPLEKLPHEKHHNQPYCGIAPYIREFEDPRDAPPPTRAETREERMERKRREKIERRQQEVETELKMWDPHNDPNAQGDAFKTLFVARVNYDTTESKLRREFEVYGPIKRIHMVYSKRSGKPRGYAFIEYEHERDMHSAYKHADGKKIDGRRVLVDVERGRTVKGWRPRRLGGGLGGTRRGGADVNIRHSGRDDTSRYDERDRDRDRERERRERSRERDKERERRRSRSRDRRRRSRSRDKEERRRSRERSKDKDRDRKRRSSRSRERARRERERKEELRGGGGDMAEPSEAGDAPPDDGPPGELGPDGPDGPEEKGRDRDRERRRSHRSERERRRDRDRDRDRDREHKRGERGSERGRDEARGGGGGQDNGLEGLGNDSRDMYMESEGGDGYLAPENGYLMEAAPE

SEQ ID NO: 1109 - protein, 166 aa, Homo sapiens
MTQFLPPNLLALFAPRDPIPYLPPLEKLPHEKHHNQPYCGIAPYIREFEDPRDAPPPTRAETREERMERKRREKIERRQQEVETELKMWDPHNDPNAQGDAFKTLFVARVNYDTTESKLRREFEVYGPIKRIHMVYSKRSGKPRGYAFIEYEHERDMHSTTQLACS

SEQ ID NO: 1110 - protein, 341 aa, Homo sapiens
MEQALHRFGRGLVWLSVAWLSVGRVRVRDDGDTGRGFCRAGPVLTRGPSGDSSPLPLPTSVTAAYKHADGKKIDGRRVLVDVERGRTVKGWRPRRLGGGLGGTRRGGADVNIRHSGRDDTSRYDERPGPSPLPHRDRDRDRERERRERSRERDKERERRRSRSRDRRRRSRSRDKEERRRSRERSKDKDRDRKRRSSRSRERARRERERKEELRGGGGDMAEPSEAGDAPPDDGPPGELGPDGPDGPEEKGRDRDRERRRSHRSERERRRDRDRDRDRDREHKRGERGSERGRDEARGGGGGQDNGLEGLGNDSRDMYMESEGGDGYLAPENGYLMEAAPE

SEQ ID NO: 1111 - protein, 366 aa, Homo sapiens
MAGPRVEVDGSIMEGGGQILRVSTALSCLLGLPLRVQKIRAGRSTPGLRPQHLSGLEMIRDLCDGQLEGAEIGSTEITFTPEKIKGGIHTADTKTAGSVCLLMQVSMPCVLFAASPSELHLKGGTNAEMAPQIDYTVMVFKPIVEKFGFIFNCDIKTRGYYPKGGGEVIVRMSPVKQLNPINLTERGCVTKIYGRAFVAGVLPFKVAKDMAAAAVRCIRKEIRDLYVNIQPVQEPKDQAFGNGNGIIIIAETSTGCLFAGSSLGKRGVNADKVGIEAAEMLLANLRHGGTVDEYLQDQLIVFMALANGVSRIKTGPVTLHTQTAIHFAEQIAKAKFIVKKSEDEEDAAKDTYIIECQGIGMTNPNL

SEQ ID NO: 1112 - protein, 379 aa, Homo sapiens
MAGPRVEVDGSIMEGGGQILRVSTALSCLLGLPLRVQKIRAGRSTPGLSSGGWKSKIKVLTRPQHLSGLEMIRDLCDGQLEGAEIGSTEITFTPEKIKGGIHTADTKTAGSVCLLMQVSMPCVLFAASPSELHLKGGTNAEMAPQIDYTVMVFKPIVEKFGFIFNCDIKTRGYYPKGGGEVIVRMSPVKQLNPINLTERGCVTKIYGRAFVAGVLPFKVAKDMAAAAVRCIRKEIRDLYVNIQPVQEPKDQAFGNGNGIIIIAETSTGCLFAGSSLGKRGVNADKVGIEAAEMLLANLRHGGTVDEYLQDQLIVFMALANGVSRIKTGPVTLHTQTAIHFAEQIAKAKFIVKKSEDEEDAAKDTYIIECQGIGMTNPNL

SEQ ID NO: 1113 - protein, 397 aa, Homo sapiens
MSGQVGDLSPSQEKSLAQFRENIQDVLSALPNPDDYFLLRWLQARSFDLQKSEDMLRKHMEFRKQQDLANILAWQPPEVVRLYNANGICGHDGEGSPVWYHIVGSLDPKGLLLSASKQELLRDSFRSCELLLRECELQSQKLGKRVEKIIAIFGLEGLGLRDLWKPGIELLQEFFSALEANYPEILKSLIVVRAPKLFAVAFNLVKSYMSEETRRKVVILGDNWKQELTKFISPDQLPVEFGGTMTDPDGNPKCLTKINYGGEVPKSYYLCKQVRLQYEHTRSVGRGSSLQVENEILFPGCVLRWQFASDGGDIGFGVFLKTKMGERQRAREMTEVLPSQRYNAHMVPEDGILTCLQAGSYVLRFYNTYSLVHSKRISYTVEVLLPDQTFMEKMEKF

SEQ ID NO: 1114 - protein, 446 aa, Homo sapiens
MEASFVQTTMALGLSSKKASSRNVAVERKNLITVCRFSVKTLLEKYTAEPIDDSSEEFVNFAAILEQILSHRFKACAPAGPVSWFSSDGQRGFWDYIRLACSKVPNNCVSSIENMENISTARAKGRAWIRVALMEKRMSEYITTALRDTRTTRRFYDSGAIMLRDEATILTGMLIGLSAIDFSFCLKGEVLDGKTPVVIDYTPYLKFTQSYDYLTDEEERHSAESSTSEDNSPEHPYLPLVTDEDSWYSKWHKMEQKFRIVYAQKGYLEELVRLRESQLKDLEAENRRLQLQLEEAAAQNQREKRELEGVILELQEQLTGLIPSDHAPLAQGSKELTTPLVNQWPSLGTLNGAEGASNSKLYRRHSFMSTEPLSAEASLSSDSQRLGEGTRDEEPWGPIGKDPTPSMLGLCGSLASIPSCKSLASFKSNECLVSDSPEGSPALSPS

SEQ ID NO: 1115 - protein, 400 aa, Homo sapiens
MEASFVQTTMALGLSSKKASSRNVAVERKNLITVCRFSVKTLLEKYTAEPIDDSSEEFVNFAAILEQILSHRFKGPVSWFSSDGQRGFWDYIRLACSKVPNNCVSSIENMENISTARAKGRAWIRVALMEKRMSEYITTALRDTRTTRRFYDSGAIMLRDEATILTGMLIGLSAIDFSFCLKGEVLDGKTPVVIDYTPYLKFTQSYDYLTDEEERHSAESSTSEDNSPEHPYLPLVTDEDSWYSKWHKMEQKFRIVYAQKGYLEELVRLRESQLKDLEAENRRLQLQLEEAAAQNQREKRELEGVILELQEQLTGLIPSDHAPLAQGSKELTTPLVNQWPSLGTLNGAEGASNSKLYRRHSFMSTEPLSAEASLSSDSQRLGEGTRDEEPWGPIGSSEPN

SEQ ID NO: 1116 - protein, 405 aa, Homo sapiens
MEASFVQTTMALGLSSKKASSRNVAVERKNLITVCRFSVKTLLEKYTAEPIDDSSEEFVNFAAILEQILSHRFKACAPAGPVSWFSSDGQRGFWDYIRLACSKVPNNCVSSIENMENISTARAKGRAWIRVALMEKRMSEYITTALRDTRTTRRFYDSGAIMLRDEATILTGMLIGLSAIDFSFCLKGEVLDGKTPVVIDYTPYLKFTQSYDYLTDEEERHSAESSTSEDNSPEHPYLPLVTDEDSWYSKWHKMEQKFRIVYAQKGYLEELVRLRESQLKDLEAENRRLQLQLEEAAAQNQREKRELEGVILELQEQLTGLIPSDHAPLAQGSKELTTPLVNQWPSLGTLNGAEGASNSKLYRRHSFMSTEPLSAEASLSSDSQRLGEGTRDEEPWGPIGSSEPN

SEQ ID NO: 1117 - protein, 364 aa, Homo sapiens
MEASFVQTTMALGLSSKKASSRNVAVERKNLITVCRFSVKTLLEKYTAEPIDDSSEEFVNFAAILEQILSHRFKACAPAGPVSWFSSDGQRGFWDYIRLACSKVPNNCVSSIENMENISTARAKGRAWIRVALMEKRMSEYITTALRDTRTTRRFYDSGAIMLRDEATILTGMLIGLSAIDFSFCLKGEVLDGKTPVVIDYTPYLKFTQSYDYLTDEEERHSAESSTSEDNSPEHPYLPLVTDEDSWYSKWHKMEQKFRIVYAQKGYLEELVRLRESQLKDLEAENRRLQLQLEEAAAQNQREKRELEGVILELQEQLTGLIPSDHAPLAQGSKELTTPLVNQWPSLGTLNGAEGASNSKLYRR

SEQ ID NO: 1118 - protein, 190 aa, Homo sapiens
MAGSRLETVGSIFSRTRDLVRAGVLKEKPLWFDVYDAFPPLREPVFQRPRVRYGKAKAPIQDIWYHEDRIRAKFYSVYGSGQRAFDLFNPNFKSTCQRFVEKYTELQKLGETDEEKLFVETGKALLAEGVILRRVGEARTQHGGSHVSRKSEHLSVRPQTALEENETQKEVPQDQHLEAPADQSKGLLPP

SEQ ID NO: 1119 - protein, 581 aa, Homo sapiens
MPAPRAREQPRVPGERQPLLPRGARGPRRWRRAAGAAVLLVEMLERAAFFGVTANLVLYLNSTNFNWTGEQATRAALVFLGASYLLAPVGGWLADVYLGRYRAVALSLLLYLAASGLLPATAFPDGRSSFCGEMPASPLGPACPSAGCPRSSPSPYCAPVLYAGLLLLGLAASSVRSNLTSFGADQVMDLGRDATRRFFNWFYWSINLGAVLSLLVVAFIQQNISFLLGYSIPVGCVGLAFFIFLFATPVFITKPPMGSQVSSMLKLALQNCCPQLWQRHSARDRQCARVLADERSPQPGASPQEDIANFQVLVKILPVMVTLVPYWMVYFQMQSTYVLQGLHLHIPNIFPANPANISVALRAQGSSYTIPEAWLLLANVVVVLILVPLKDRLIDPLLLRCKLLPSALQKMALGMFFGFTSVIVAGVLEMERLHYIHHNETVSQQIGEVLYNAAPLSIWWQIPQYLLIGISEIFASIPGLEFAYSEAPRSMQGAIMGIFFCLSGVGSLLGSSLVALLSLPGGWLHCPKDFGNINNCRMDLYFFLLAGIQAVTALLFVWIAGRYERASQGPASHSRFSRDRG

SEQ ID NO: 1120 - protein, 87 aa, Homo sapiens
MAKHLKFIARTVMVQEGNVESAYRTLNRILTMDGLIEDIKHRRYYEKPCCRRQRESYERCRRIYNMEMARKINFLMRKNRADPWQGC

SEQ ID NO: 1121 - protein, 240 aa, Homo sapiens [sequence omitted]

SEQ ID NO: 1122 - protein, 244 aa, Homo sapiens
MMDSQTVGKSSKMLQHIDYRMRCILQDGRIFIGTFKAFDKHMNLILCDCDEFRKIKPKNAKQPEREEKRVLGLVLLRGENLVSMTVEGPPPKDTGIARVPLAGAAGGPGVGRAAGRGVPAGVPIPQAPAGLAGPVRGVGGPSQQVMTPQGRGTVAAAAVAATASIAGAPTQYPPGRGTPPPPVGRATPPPGIMAPPPGMRPPMGPPIGLPPARGTPIGMPPPGMRPPPPGIRGPPPPGMRPPRP

SEQ ID NO: 1123 - protein, 592 aa, Homo sapiens
MATCWQALWAYRSYLIVFFVPILLLPLPILVPSKEAYCAYAIILMALFWCTEALPLAVTALFPLILFPMMGIVDASEVAVEYLKDSNLLFFGGLLVAIAVEHWNLHKRIALRVLLIVGVRPAPLILGFMLVTAFLSMWISNTATSAMMVPIAHAVLDQLHSSQASSNVEEGSNNPTFELQEPSPQKEVTKLDNGQALPVTSASSEGRAHLSQKHLHLTQCMSLCVCYSASIGGIATLTGTAPNLVLQGQINSLFPQNGNVVNFASWFSFAFPTMVILLLLAWLWLQILFLGFNFRKNFGIGEKMQEQQQAAYCVIQTEHRLLGPMTFAEKAISILFVILVLLWFTREPGFFLGWGNLAFPNAKGESMVSDGTVAIFIGIIMFIIPSKFPGLTQDPENPGKLKAPLGLLDWKTVNQKMPWNIVLLLGGGYALAKGSERSGLSEWLGNKLTPLQSVPAPAIAIILSLLVATFTECTSNVATTTIFLPILASMAQAICLHPLYVMLPCTLATSLAFMLPVATPPNAIVFSFGDLKVLDMARAGFLLNIIGVLIIALAINSWGIPLFSLHSFPSWAQSNTTAQCLPSLANTTTPSP

SEQ ID NO: 1124 - protein, 597 aa, Homo sapiens
MALFWCTEALPLAVTALFPLILFPMMGIVDASEIIQRPFPSSFESPGECQSVGMSVTASHNLGGTVGDSRVFPPLSHVSTCQVAVEYLKDSNLLFFGGLLVAIAVEHWNLHKRIALRVLLIVGVRPAPLILGFMLVTAFLSMWISNTATSAMMVPIAHAVLDQLHSSQASSNVEEGSNNPTFELQEPSPQKEVTKLDNGQALPVTSASSEGRAHLSQKHLHLTQCMSLCVCYSASIGGIATLTGTAPNLVLQGQINSLFPQNGNVVNFASWFSFAFPTMVILLLLAWLWLQILFLGFNFRKNFGIGEKMQEQQQAAYCVIQTEHRLLGPMTFAEKAISILFVILVLLWFTREPGFFLGWGNLAFPNAKGESMVSDGTVAIFIGIIMFIIPSKFPGLTQDPENPGKLKAPLGLLDWKTVNQKMPWNIVLLLGGGYALAKGSERSGLSEWLGNKLTPLQSVPAPAIAIILSLLVATFTECTSNVATTTIFLPILASMAQAICLHPLYVMLPCTLATSLAFMLPVATPPNAIVFSFGDLKVLDMARAGFLLNIIGVLIIALAINSWGIPLFSLHSFPSWAQSNTTAQCLPSLANTTTPSP

SEQ ID NO: 1125 - protein, 641 aa, Homo sapiens
MATCWQALWAYRSYLIVFFVPILLLPLPILVPSKEAYCAYAIILMALFWCTEALPLAVTALFPLILFPMMGIVDASEIIQRPFPSSFESPGECQSVGMSVTASHNLGGTVGDSRVFPPLSHVSTCQVAVEYLKDSNLLFFGGLLVAIAVEHWNLHKRIALRVLLIVGVRPAPLILGFMLVTAFLSMWISNTATSAMMVPIAHAVLDQLHSSQASSNVEEGSNNPTFELQEPSPQKEVTKLDNGQALPVTSASSEGRAHLSQKHLHLTQCMSLCVCYSASIGGIATLTGTAPNLVLQGQINSLFPQNGNVVNFASWFSFAFPTMVILLLLAWLWLQILFLGFNFRKNFGIGEKMQEQQQAAYCVIQTEHRLLGPMTFAEKAISILFVILVLLWFTREPGFFLGWGNLAFPNAKGESMVSDGTVAIFIGIIMFIIPSKFPGLTQDPENPGKLKAPLGLLDWKTVNQKMPWNIVLLLGGGYALAKGSERSGLSEWLGNKLTPLQSVPAPAIAIILSLLVATFTECTSNVATTTIFLPILASMAQAICLHPLYVMLPCTLATSLAFMLPVATPPNAIVFSFGDLKVLDMARAGFLLNIIGVLIIALAINSWGIPLFSLHSFPSWAQSNTTAQCLPSLANTTTPSP

SEQ ID NO: 1126 - protein, 1099 aa, Homo sapiens
MSLNNSSNVFLDSVPSNTNRFQVSVINENHESSAAADDNTDPPHYEETSFGDEAQKRLRISFRPGNQECYDNFLQSGETAKTDASFHAYDSHTNTYYLQTFGHNTMDAVPKIEYYRNTGSISGPKVNRPSLLEIHEQLAKNVAVTPSSADRVANGDGIPGDEQAENKEDDQAGVVKFGWVKGVLVRCMLNIWGVMLFIRLSWIVGEAGIGLGVLIILLSTMVTSITGLSTSAIATNGFVRGGGAYYLISRSLGPEFGGSIGLIFAFANAVAVAMYVVGFAETVVDLLKESDSMMVDPTNDIRIIGSITVVILLGISVAGMEWEAKAQVILLVILLIAIANFFIGTVIPSNNEKKSRGFFNYQASIFAENFGPRFTKGEGFFSVFAIFFPAATGILAGANISGDLEDPQDAIPRGTMLAIFITTVAYLGVAICVGACVVRDATGNMNDTIISGMNCNGSAACGLGYDFSRCRHEPCQYGLMNNFQVMSMVSGFGPLITAGIFSATLSSALASLVSAPKVFQALCKDNIYKALQFFAKGYGKNNEPLRGYILTFLIAMAFILIAELNTIAPIISNFFLASYALINFSCFHASYAKSPGWRPAYGIYNMWVSLFGAVLCCAVMFVINWWAAVITYVIEFFLYVYVTCKKPDVNWGSSTQALSYVSALDNALELTTVEDHVKNFRPQCIVLTGGPMTRPALLDITHAFTKNSGLCICCEVFVGPRKLCVKEMNSGMAKKQAWLIKNKIKAFYAAVAADCFRDGVRSLLQASGLGRMKPNTLVIGYKKNWRKAPLTEIENYVGIIHDAFDFEIGVVIVRISQGFDISQVLQVQEELERLEQERLALEATIKDNECEEESGGIRGLFKKAGKLNITKTTPKKDGSINTSQSMHVGEFNQKLVEASTQFKKKQEKGTIDVWWLFDDGGLTLLIPYILTLRKKWKDCKLRIYVGGKINRIEEEKIVMASLLSKFRIKFADIHIIGDINIRPNKESWKVFEEMIEPYRLHESCKDLTTAEKLKRETPWKITDAELEAVKEKSYRQVRLNELLQEHSRAANLIVLSLPVARKGSISDLLYMAWLEILTKNLPPVLLVRGNHKNVLTFYS

SEQ ID NO: 1127 - protein, 1099 aa, Homo sapiens
MSLNNSSNVFLDSVPSNTNRFQVSVINENHESSAAADDNTDPPHYEETSFGDEAQKRLRISFRPGNQECYDNFLQSGETAKTDASFHAYDSHTNTYYLQTFGHNTMDAVPKIEYYRNTGSISGPKVNRPSLLEIHEQLAKNVAVTPSSADRVANGDGIPGDEQAENKEDDQAGVVKFGWVKGVLVRCMLNIWGVMLFIRLSWIVGEAGIGLGVIIIGLSVVVTTLTGISMSAICTNGVVRGGGAYYLISRSLGPEFGGSIGLIFAFANAVAVAMYVVGFAETVVDLLKESDSMMVDPTNDIRIIGSITVVILLGISVAGMEWEAKAQVILLVILLIAIANFFIGTVIPSNNEKKSRGFFNYQASIFAENFGPRFTKGEGFFSVFAIFFPAATGILAGANISGDLEDPQDAIPRGTMLAIFITTVAYLGVAICVGACVVRDATGNMNDTIISGMNCNGSAACGLGYDFSRCRHEPCQYGLMNNFQVMSMVSGFGPLITAGIFSATLSSALASLVSAPKVFQALCKDNIYKALQFFAKGYGKNNEPLRGYILTFLIAMAFILIAELNTIAPIISNFFLASYALINFSCFHASYAKSPGWRPAYGIYNMWVSLFGAVLCCAVMFVINWWAAVITYVIEFFLYVYVTCKKPDVNWGSSTQALSYVSALDNALELTTVEDHVKNFRPQCIVLTGGPMTRPALLDITHAFTKNSGLCICCEVFVGPRKLCVKEMNSGMAKKQAWLIKNKIKAFYAAVAADCFRDGVRSLLQASGLGRMKPNTLVIGYKKNWRKAPLTEIENYVGIIHDAFDFEIGVVIVRISQGFDISQVLQVQEELERLEQERLALEATIKDNECEEESGGIRGLFKKAGKLNITKTTPKKDGSINTSQSMHVGEFNQKLVEASTQFKKKQEKGTIDVWWLFDDGGLTLLIPYILTLRKKWKDCKLRIYVGGKINRIEEEKIVMASLLSKFRIKFADIHIIGDINIRPNKESWKVFEEMIEPYRLHESCKDLTTAEKLKRETPWKITDAELEAVKEKSYRQVRLNELLQEHSRAANLIVLSLPVARKGSISDLLYMAWLEILTKNLPPVLLVRGNHKNVLTFYS

SEQ ID NO: 1128 - protein, 914 aa, Homo sapiens
MASESSPLLAYRLLGEEGVALPANGAGGPGGASARKLSTFLGVVVPTVLSMFSIVVFLRIGFVVGHAGLLQALAMLLVAYFILALTVLSVCAIATNGAVQGGGAYFMISRTLGPEVGGSIGLMFYLANVCGCAVSLLGLVESVLDVFGADATGPSGLRVLPQGYGWNLLYGSLLLGLVGGVCTLGAGLYARASFLTFLLVSGSLASVLISFVAVGPRDIRLTPRPGPNGSSLPPRFGHFTGFNSSTLKDNLGAGYAEDYTTGAVMNFASVFAVLFNGCTGIMAGANMSGELKDPSRAIPLGTIVAVAYTFFVYVLLFFLSSFTCDRTLLQEDYGFFRAISLWPPLVLIGIYATALSASMSSLIGASRILHALARDDLFGVILAPAKVVSRGGNPWAAVLYSWGLVQLVLLAGKLNTLAAVVTVFYLVAYAAVDLSCLSLEWASAPNFRPTFSLFSWHTCLLGVASCLLMMFLISPGAAGGSLLLMGLLAALLTARGGPSSWGYVSQALLFHQVRKYLLRLDVRKDHVKFWRPQLLLLVGNPRGALPLLRLANQLKKGGLYVLGHVTLGDLDSLPSDPVQPQYGAWLSLVDRAQVKAFVDLTLSPSVRQGAQHLLRISGLGGMKPNTLVLGFYDDAPPQDHFLTDPAFSEPADSTREGSSPALSTLFPPPRAPGSPRALNPQDYVATVADALKMNKNVVLARASGALPPERLSRGSGGTSQLHHVDVWPLNLLRPRGGPGYVDVCGLFLLQMATILGMVPAWHSARLRIFLCLGPREAPGAAEGRLRALLSQLRIRAEVQEVVWGEGAGAGEPEAEEEGDFVNSGRGDAEAEALARSANALVRAQQGRGTGGGPGGPEGGDAEGPITALTFLYLPRPPADPARYPRYLALLETLTRDLGPTLLVHGVTPVTCTDL

SEQ ID NO: 1129 - protein, 538 aa, Homo sapiens
MASESSPLLAYRLLGEEGVALPANGAGGPGGASARKLSTFLGVVVPTVLSMFSIVVFLRIDATGPSGLRVLPQGYGWNLLYGSLLLGLVGGVCTLGAGLYARASFLTFLLVSGSLASVLISFVAVGPRDIRLTPRPGPNGSSLPPRFGHFTGFNSSTLKDNLGAGYAEDYTTGAVMNFASVFAVLFNGCTGIMAGANMSGELKDPSRAIPLGTIVAVAYTFFVYVLLFFLSSFTCDRTLLQEDYGFFRAISLWPPLVLIGIYATALSASMSSLIGASRILHALARDDLFGVILAPAKVVSRGGNPWAAVLYSWGLVQLVLLAGKLNTLAAVVTVFYLVAYAAVDLSCLSLEWASAPNFRPTFSLFSWHTCLLGVASCLLMMFLISPGAAGGSLLLMGLLAALLTARGGPSSWGYVSQALLFHQVRKYLLRLDVRKDHVKFWRPQLLLLVGNPRGALPLLRLANQLKKGGLYVLGHVTLGDLDSLPSDPVQPQYGAWLSLVDRAQVKAFVDLTLSPSVRQGAQHLLRISGLESNSHPLP

SEQ ID NO: 1130 - protein, 627 aa, Homo sapiens
MASESSPLLAYRLLGEEGVALPANGAGGPGGASARKLSTFLGVVVPTVLSMFSIVVFLRIGFVVGHAGLLQALAMLLVAYFILALTVLSVCAIATNGAVQGGGAYFMISRTLGPEVGGSIGLMFYLANVCGCAVSLLGLVESVLDVFGADATGPSGLRVLPQGYGWNLLYGSLLLGLVGGVCTLGAGLYARASFLTFLLVSGSLASVLISFVAVGPRDIRLTPRPGPNGSSLPPRFGHFTGFNSSTLKDNLGAGYAEDYTTGAVMNFASVFAVLFNGCTGIMAGANMSGELKDPSRAIPLGTIVAVAYTFFVYVLLFFLSSFTCDRTLLQEDYGFFRAISLWPPLVLIGIYATALSASMSSLIGASRILHALARDDLFGVILAPAKVVSRGGNPWAAVLYSWGLVQLVLLAGKLNTLAAVVTVFYLVAYAAVDLSCLSLEWASAPNFRPTFSLFSWHTCLLGVASCLLMMFLISPGAAGGSLLLMGLLAALLTARGGPSSWGYVSQALLFHQVRKYLLRLDVRKDHVKFWRPQLLLLVGNPRGALPLLRLANQLKKGGLYVLGHVTLGDLDSLPSDPVQPQYGAWLSLVDRAQVKAFVDLTLSPSVRQGAQHLLRISGLESNSHPLP

SEQ ID NO: 1131 - protein, 631 aa, Homo sapiens
MASESSPLLAYRLLGEEGVALPANGAGGPGGASARKLSTFLGVVVPTVLSMFSIVVFLRIGFVVGHAGLLQALAMLLVAYFILALTVLSVCAIATNGAVQGGGAYFMISRTLGPEVGGSIGLMFYLANVCGCAVSLLGLVESVLDVFGADATGPSGLRVLPQGYGWNLLYGSLLLGLVGGVCTLGAGLYARASFLTFLLVSGSLASVLISFVAVGPRDIRLTPRPGPNGSSLPPRFGHFTGFNSSTLKDNLGAGYAEDYTTGAVMNFASVFAVLFNGCTGIMAGANMSGELKDPSRAIPLGTIVAVAYTFFVYVLLFFLSSFTCDRTLLQEDYGFFRAISLWPPLVLIGIYATALSASMSSLIGASRILHALARDDLFGVILAPAKVVSRGGNPWAAVLYSWGLVQLVLLAGKLNTLAAVVTVFYLVAYAAVDLSCLSLEWASAPNFRPTFSLFSWHTCLLGVASCLLMMFLISPGAAGGSLLLMGLLAALLTARGGPSSWGYVSQALLFHQVRKYLLRLDVRKDHVKFWRPQLLLLVGNPRGALPLLRLANQLKKGGLYVLGHVTLGDLDSLPSDPVQPQYGAWLSLVDRAQVKAFVDLTLSPSVRQGAQHLLRISGLESGTLLPWGFRS

SEQ ID NO: 1132 - protein, 337 aa, Homo sapiens
MRAVFIQGAEEHPAAFCYQVNGSCPRTVHTLGIQLVIYLACAAGMLIIVLGNVFVAFAVSYFKALHTPTNFLLLSLALADMFLGLLVLPLSTIRSVESCWFFGDFLCRLHTYLDTLFCLTSIFHLCFISIDRHCAICDPLLYPSKFTVRVALRYILAGWGVPAAYTSLFLYTDVVETRLSQWLEEMPCVGSCQLLLNKFWGWLNFPLFFVPCLIMISLYVKIFVVATRQAQQITTLSKSLAGAAKHERKAAKTLGIAVGIYLLCWLPFTIDTMVDSLLHFITPPLVFDIFIWFAYFNSACNPIIYVFSYQWFRKALKLTLSQKVFSPQTRTVDLYQE

SEQ ID NO: 1133 - protein, 345 aa, Homo sapiens
MSSNSSLLVAVQLCYANVNGSCVKIPFSPGSRVILYIVFGFGAVLAVFGNLLVMISILHFKQLHSPTNFLVASLACADFLVGVTVMPFSMVRTVESCWYFGRSFCTFHTCCDVAFCYSSLFHLCFISIDRYIAVTDPLVYPTKFTVSVSGICISVSWILPLMYSGAVFYTGVYDDGLEELSDALNCIGGCQTVVNQNWVLTDFLSFFIPTFIMIILYGNIFLVARRQAKKIENTGSKTESSSESYKARVARRERKAAKTLGVTVVAFMISWLPYSIDSLIDAFMGFITPACIYEICCWCAYYNSAMNPLIYALFYPWFRKAIKVIVTGQVLKNSSATMNLFSEHI

SEQ ID NO: 1134 - protein, 342 aa, Homo sapiens
MTSNFSQPVVQLCYEDVNGSCIETPYSPGSRVILYTAFSFGSLLAVFGNLLVMTSVLHFKQLHSPTNFLIASLACADFLVGVTVMLFSMVRTVESCWYFGAKFCTLHSCCDVAFCYSSVLHLCFICIDRYIVVTDPLVYATKFTVSVSGICISVSWILPLTYSGAVFYTGVNDDGLEELVSALNCVGGCQIIVSQGWVLIDFLLFFIPTLVMIILYSKIFLIAKQQAIKIETTSSKVESSSESYKIRVAKRERKAAKTLGVTVLAFVISWLPYTVDILIDAFMGFLTPAYIYEICCWSAYYNSAMNPLIYALFYPWFRKAIKLILSGDVLKASSSTISLFLE

SEQ ID NO: 1135 - protein, 348 aa, Homo sapiens
MVNNFSQAEAVELCYKNVNESCIKTPYSPGPRSILYAVLGFGAVLAAFGNLLVMIAILHFKQLHTPTNFLIASLACADFLVGVTVMPFSTVRSVESCWYFGDSYCKFHTCFDTSFCFASLFHLCCISVDRYIAVTDPLTYPTKFTVSVSGICIVLSWFFSVTYSFSIFYTGANEEGIEELVVALTCVGGCQAPLNQNWVLLCFLLFFIPNVAMVFIYSKIFLVAKHQARKIESTASQAQSSSESYKERVAKRERKAAKTLGIAMAAFLVSWLPYLVDAVIDAYMNFITPPYVYEILVWCVYYNSAMNPLIYAFFYQWFGKAIKLIVSGKVLRTDSSTTNLFSEEVETD

SEQ ID NO: 1136 - protein, 644 aa, Homo sapiens
MDDIADRMRMDAGEVTLVNHNSVFKTHLLPQTGFPEDQLSLSDQQILSSRQGHLDRSFTCSTRSAAYNPSYYSDNPSSDSFLGSGDLRTFGQSANGQWRNSTPSSSSSLQKSRNSRSLYLETRKTSSGLSNSFAGKSNHHCHVSAYEKSFPIKPVPSPSWSGSCRRSLLSPKKTQRRHVSTAEETVQEEEREIYRQLLQMVTGKQFTIAKPTTHFPLHLSRCLSSSKNTLKDSLFKNGNSCASQIIGSDTSSSGSASILTNQEQLSHSVYSLSSYTPDVAFGSKDSGTLHHPHHHHSVPHQPDNLAASNTQSEGSDSVILLKVKDSQTPTPSSTFFQAELWIKELTSVYDSRARERLRQIEEQKALALQLQNQRLQEREHSVHDSVELHLRVPLEKEIPVTVVQETQKKGHKLTDSEDEFPEITEEMEKEIKNVFRNGNQDEVLSEAFRLTITRKDIQTLNHLNWLNDEIINFYMNMLMERSKEKGLPSVHAFNTFFFTKLKTAGYQAVKRWTKKVDVFSVDILLVPIHLGVHWCLAVVDFRKKNITYYDSMGGINNEACRILLQYLKQESIDKKRKEFDTNGWQLFSKKSQEIPQQMNGSDCGMFACKYADCITKDRPINFTQQHMPYFRKRMVWEILHRKLL

SEQ ID NO: 1137 - protein, 643 aa, Homo sapiens
MDDIADRMRMDAGEVTLVNHNSVFKTHLLPQTGFPEDQLSLSDQQILSSRQGHLDRSFTCSTRSAAYNPSYYSDNPSSDSFLGSGDLRTFGQSANGQWRNSTPSSSSSLQKSRNSRSLYLETRKTSSGLSNSFAGKSNHHCHVSAYEKSFPIKPVPSPSWSGSCRRSLLSPKKTQRRHVSTAEETVQEEEREIYRQLLQMVTGKQFTIAKPTTHFPLHLSRCLSSSKNTLKDSLFKNGNSCASQIIGSDTSSSGSASILTNQEQLSHSVYSLSSYTPDVAFGSKDSGTLHHPHHHHSVPHQPDNLAASNTQSEGSDSVILLKVKDSQTPTPSSTFFQAELWIKELTSVYDSRARERLRQIEEQKALALQLQNQRLQEREHSVHDSVELHLRVPLEKEIPVTVVQETQKKGHKLTDSEDEFPEITEEMEKEIKNVFRNGNQDEVLSEAFRLTITRKDIQTLNHLNWLNDEIINFYMNMLMERSKEKGLPSVHAFNTFFFTKLKTAGYQAVKRWTKKVDVFSVDILLVPIHLGVHWCLAVVDFRKKNITYYDSMGGINNEACRILLQYLKQESIDKKRKEFDTNGWQLFSKKSQIPQQMNGSDCGMFACKYADCITKDRPINFTQQHMPYFRKRMVWEILHRKLL

SEQ ID NO: 1138 - protein, 1137 aa, Homo sapiens
MKVKEEKAGVGKLDHTNHRRRFPDQKECPPIHIGLPVPTYPQRKTDQKGHLSGLQKVHWGLRPDQPQQELTGPGSGASSQDSSMDLISRTRSPAAEQLQDILGEEDEAPNPTLFTEMDTLQHDGDQMEWKESARWIKFEEKVEEGGERWSKPHVSTLSLHSLFELRTCLQTGTVLLDLDSGSLPQIIDDVIEKQIEDGLLRPELRERVSYVLLRRHRHQTKKPIHRSLADIGKSVSTTNRSPARSPGAGPSLHHSTEDLRMRQSANYGRLCHAQSRSMNDISLTPNTDQRKNKFMKKIPKDSEASNVLVGEVDFLDQPFIAFVRLIQSAMLGGVTEVPVPTRFLFILLGPSGRAKSYNEIGRAIATLMVDDLFSDVAYKARNREDLIAGIDEFLDEVIVLPPGEWDPNIRIEPPKKVPSADKRKSVFSLAELGQMNGSVGGGGGAPGGGNGGGGGGGSGGGAGSGGAGGTSSGDDGEMPAMHEIGEELIWTGRFFGGLCLDIKRKLPWFPSDFYDGFHIQSISAILFIYLGCITNAITFGGLLGDATDNYQGVMESFLGTAMAGSLFCLFSGQPLIILSSTGPILIFEKLLFDFSKGNGLDYMEFRLWIGLHSAVQCLILVATDASFIIKYITRFTEEGFSTLISFIFIYDAIKKMIGAFKYYPINMDFKPNFITTYKCECVAPDTVNTTVFNASAPLAPDTNASLYNLLNLTALDWSLLSKKECLSYGGRLLGNSCKFIPDLALMSFILFFGTYSMTLTLKKFKFSRYFPTKVRALVADFSIVFSILMFCGIDACFGLETPKLHVPSVIKPTRPDRGWFVAPFGKNPWWVYPASILPALLVTILIFMDQQITAVIVNRKENKLKKAAGYHLDLFWVGILMALCSFMGLPWYVAATVISIAHIDSLKMETETSAPGEQPQFLGVREQRVTGIIVFILTGISVFLAPILKCIPLPVLYGVFLYMGVASLNGIQMGTGGSEFKIQKKLTPFWERCKLFLMPAKHQPDHAFLRHVPLRRIHLFTLVQILCLAVLWILKSTVAAIIFPVMILGLIIVRRLLDFIFSQHDLAWIDNILPEKEKKETDKKRKRKKGAHEDCDEEPQFPPPSVIKIPMESVQSDPQNGIHCIARKRSSSWSYSL

SEQ ID NO: 1139 - protein, 1143 aa, Homo sapiens
MKVKEEKAGVGKLDHTNHRRRFPDQKECPPIHIGLPVPTYPQRKTDQKGHLSGLQKVHWGLRPDQPQQELTGPGSGASSQDSSMDLISRTRSPAAEQLQDILGEEDEAPNPTLFTEMDTLQHDGDQMEWKESARWIKFEEKVEEGGERWSKPHVSTLSLHSLFELRTCLQTGTVLLDLDSGSLPQIIDDVIEKQIEDGLLRPELRERVSYVLLRRHRHQTKKPIHRSLADIGKSVSTTNRSPARSPGAGPSLHHSTEDLRMRQSANYGRLCHAQSRSMNDISLTPNTDQRKNKFMKKIPKDSEASNVLVGEVDFLDQPFIAFVRLIQSAMLGGVTEVPVPTRFLFILLGPSGRAKSYNEIGRAIATLMVDDLFSDVAYKARNREDLIAGIDEFLDEVIVLPPGEWDPNIRIEPPKKVPSADKRKSVFSLAELGQMNGSVGGGGGAPGGGNGGGGGGGSGGGAGSGGAGGTSSGDDGEMPAMHEIGEELIWTGRFFGGLCLDIKRKLPWFPSDFYDGFHIQSISAILFIYLGCITNAITFGGLLGDATDNYQGVMESFLGTAMAGSLFCLFSGQPLIILSSTGPILIFEKLLFDFSKGNGLDYMEFRLWIGLHSAVQCLILVATDASFIIKYITRFTEEGFSTLISFIFIYDAIKKMIGAFKYYPINMDFKPNFITTYKCECVAPDTVNTTVFNASAPLAPDTNASLYNLLNLTALDWSLLSKKECLSYGGRLLGNSCKFIPDLALMSFILFFGTYSMTLTLKKFKFSRYFPTKVRALVADFSIVFSILMFCGIDACFGLETPKLHVPSVIKPTRPDRGWFVAPFGKNPWWVYPASILPALLVTILIFMDQQITAVIVNRKENKLKKAAGYHLDLFWVGILMALCSFMGLPWYVAATVISIAHIDSLKMETETSAPGEQPQFLGVREQRVTGIIVFILTGISVFLAPILKCIPLPVLYGVFLYMGVASLNGIQMGTGGSEFKIQKKLTPFWERCKLFLMPAKHQPDHAFLRHVPLRRIHLFTLVQILCLAVLWILKSTVAAIIFPVMSLSTTDILGLIIVRRLLDFIFSQHDLAWIDNILPEKEKKETDKKRKRKKGAHEDCDEEPQFPPPSVIKIPMESVQSDPQNGIHCIARKRSSSWSYSL

SEQ ID NO: 1140 - protein, 1121 aa, Homo sapiens
MKVKEEKAGVGKLDHTNHRRRFPDQKECPPIHIGLPVPTYPQRKTDQKGHLSGLQKVHWGLRPDQPQQELTGPGSGASSQDSSMDLISRTRSPAAEQLQDILGEEDEAPNPTLFTEMDTLQHDGDQMEWKESARWIKFEEKVEEGGERWSKPHVSTLSLHSLFELRTCLQTGTVLLDLDSGSLPQIIDDVIEKQIEDGLLRPELRERVSYVLLRRHRHQTKKPIHRSLADIGKSVSTTNRSPARSPGAGPSLHHSTEDLRMRQSANYGRLCHAQSRSMNDISLTPNTDQRKNKFMKKIPKDSEASNVLVGEVDFLDQPFIAFVRLIQSAMLGGVTEVPVPTRFLFILLGPSGRAKSYNEIGRAIATLMVDDLFSDVAYKARNREDLIAGIDEFLDEVIVLPPGEWDPNIRIEPPKKVPSADKRKSVFSLAELGQMNGSVGGGGGAPGGGNGGGGGGGSGGGAGSGGAGGTSSGDDGEMPAMHEIGEELIWTGRFFGGLCLDIKRKLPWFPSDFYDGFHIQSISAILFIYLGCITNAITFGGLLGDATDNYQGVMESFLGTAMAGSLFCLFSGQPLIILSSTGPILIFEKLLFDFSKGNGLDYMEFRLWIGLHSAVQCLILVATDASFIIKYITRFTEEGFSTLISFIFIYDAIKKMIGAFKYYPINMDFKPNFITTYKCECVAPDTVNTTVFNASAPLAPDTNASLYNLLNLTALDWSLLSKKECLSYGGRLLGNSCKFIPDLALMSFILFFGTYSMTLTLKKFKFSRYFPTKVRALVADFSIVFSILMFCGIDACFGLETPKLHVPSVIKPTRPDRGWFVAPFGKNPWWVYPASILPALLVTILIFMDQQITAVIVNRKENKLKKAAGYHLDLFWVGILMALCSFMGLPWYVAATVISIAHIDSLKMETETSAPGEQPQFLGVREQRVTGIIVFILTGISVFLAPILKCIPLPVLYGVFLYMGVASLNGIQFWERCKLFLMPAKHQPDHAFLRHVPLRRIHLFTLVQILCLAVLWILKSTVAAIIFPVMILGLIIVRRLLDFIFSQHDLAWIDNILPEKEKKETDKKRKRKKGAHEDCDEEPQFPPPSVIKIPMESVQSDPQNGIHCIARKRSSSWSYSL

SEQ ID NO: 1141 - protein, 1040 aa, Homo sapiens
MKVKEEKAGVGKLDHTNHRRRFPDQKECPPIHIGLPVPTYPQRKTDQKGHLSGLQKVHWGLRPDQPQQELTGPGSGASSQDSSMDLISRTRSPAAEQLQDILGEEDEAPNPTLFTEMDTLQHDGDQMEWKESARWIKFEEKVEEGGERWSKPHVSTLSLHSLFELRTCLQTGTVLLDLDSGSLPQIIDDVIEKQIEDGLLRPELRERVSYVLLRRHRHQTKKPIHRSLADIGKSVSTTNRSPARSPGAGPSLHHSTEDLRMRQSANYGRLCHAQSRSMNDISLTPNTDQRKNKFMKKIPKDSEASNVLVGEVDFLDQPFIAFVRLIQSAMLGGVTEVPVPTRFLFILLGPSGRAKSYNEIGRAIATLMVDDLFSDVAYKARNREDLIAGIDEFLDEVIVLPPGEWDPNIRIEPPKKVPSADKRKSVFSLAELGQMNGSVGGGGGAPGGGNGGGGGGGSGGGAGSGGAGGTSSGDDGEMPAMHEIGEELIWTGRFFGGLCLDIKRKLPWFPSDFYDGFHIQSISAILFIYLGCITNAITFGGLLGDATDNYQGVMESFLGTAMAGSLFCLFSGQPLIILSSTGPILIFEKLLFDFSKGNGLDYMEFRLWIGLHSAVQCLILVATDASFIIKYITRFTEEGFSTLISFIFIYDAIKKMIGAFKYYPINMDFKPNFITTYKCECVAPDTVNTTVFNASAPLAPDTNASLYNLLNLTALDWSLLSKKECLSYGGRLLGNSCKFIPDLALMSFILFFGTYSMTLTLKKFKFSRYFPTKVRALVADFSIVFSILMFCGIDACFGLETPKLHVPSVIKPTRPDRGWFVAPFGKNPWWVYPASILPALLVTILIFMDQQITAVIVNRKENKLKKAAGYHLDLFWVGILMALCSFMGLPWYVAATVISIAHIDSLKMETETSAPGEQPQFLGVREQRVTGIIVFILTGISVFLAPILKILGLIIVRRLLDFIFSQHDLAWIDNILPEKEKKETDKKRKRKKGAHEDCDEEPQFPPPSVIKIPMESVQSDPQNGIHCIARKRSSSWSYSL

SEQ ID NO: 1142 - protein, 993 aa, Homo sapiens
MKVKEEKAGVGKLDHTNHRRRFPDQKECPPIHIGLPVPTYPQRKTDQKGHLSGLQKVHWGLRPDQPQQELTGPGSGASSQDSSMDLIEHKGSPAAEQLQDILGEEDEAPNPTLFTEMDTLQHDGDQMEWKESARWIKFEEKVEEGGERWSKPHVSTLSLHSLFELRTCLQTGTVLLDLDSGSLPQIIDDVIEKQIEDGLLRPELRERVSYVLLRRHRHQTKKPIHRSLADIGKSVSTTNRSPARSPGAGPSLHHSTEDLRMRQSANYGRLCHAQSRSMNDISLTPNTDQRKNKFMKKIPKDSEASNVLVGEVDFLDQPFIAFVRLIQSAMLGGVTEVPVPTRFLFILLGPSGRAKSYNEIGRAIATLMVDDLFSDVAYKARNREDLIAGIDEFLDEVIVLPPGEWDPNIRIEPPKKVPSADKRKSVFSLAELGQMNGSVGGGGGAPGGGNGGGGGGGSGGGAGSGGAGGTSSGDDGEMPAMHEIGEELIWTGRFFGGLCLDIKRKLPWFPSDFYDGFHIQSISAILFIYLGCITNAITFGGLLGDATDNYQGVMESFLGTAMAGSLFCLFSGQPLIILSSTGPILIFEKLLFDFSKGNGLDYMEFRLWIGLHSAVQCLILVATDASFIIKYITRFTEEGFSTLISFIFIYDAIKKMIGAFKYYPINMDFKPNFITTYKCECVAPDTVNTTVFNASAPLAPDTNASLYNLLNLTALDWSLLSKKECLSYGGRLLGNSCKFIPDLALMSFILFFGTYSMTLTLKKFKFSRYFPTKVRALVADFSIVFSILMFCGIDACFGLETPKLHVPSVIKPTRPDRGWFVAPFGKNPWWVYPASILPALLVTILIFMDQQITAVIVNRKENKLKGTESNRHHRLHPDGNLCLPGSHPKVYPPAGAVRSLPLHGRGLPEWHPVLGTLQALPDASQAPAGPCLPAARAAAPDPPLHPGADPLPGGALDPQIHGGCHHLPGHDPGPHHRSKASGFHLFPARPGLD

SEQ ID NO: 1143 - protein, 968 aa, Homo sapiens
MKVKEEKAGVGKLDHTNHRRRFPDQKECPPIHIGLPVPTYPQRKTDQKGHLSGLQKVHWGLRPDQPQQELTGPGSGASSQDSSMDLISRTRSPAAEQLQDILGEEDEAPNPTLFTEMDTLQHDGDQMEWKESARWIKFEEKVEEGGERWSKPHVSTLSLHSLFELRTCLQTGTVLLDLDSGSLPQIIDDVIEKQIEDGLLRPELRERVSYVLLRRHRHQTKKPIHRSLADIGKSVSTTNRSPARSPGAGPSLHHSTEDLRMRQSANYGRLCHAQSRSMNDISLTPNTDQRKNKFMKKIPKDSEASNVLVGEVDFLDQPFIAFVRLIQSAMLGGVTEVPVPTRFLFILLGPSGRAKSYNEIGRAIATLMVDDLFSDVAYKARNREDLIAGIDEFLDEVIVLPPGEWDPNIRIEPPKKVPSADKRKSVFSLAELGQMNGSVGGGGGAPGGGNGGGGGGGSGGGAGSGGAGGTSSGDDGEMPAMHEIGEELIWTGRFFGGLCLDIKRKLPWFPSDFYDGFHIQSISAILFIYLGCITNAITFGGLLGDATDNYQGVMESFLGTAMAGSLFCLFSGQPLIILSSTGPILIFEKLLFDFSKGNGLDYMEFRLWIGLHSAVQCLILVATDASFIIKYITRFTEEGFSTLISFIFIYDAIKKMIGAFKYYPINMDFKPNFITTYKCECVAPDTVNTTVFNASAPLAPDTNASLYNLLNLTALDWSLLSKKECLSYGGRLLGNSCKFIPDLALMSFILFFGTYSMTLTLKKFKFSRYFPTKPTRPDRGWFVAPFGKNPWWVYPASILPALLVTILIFMDQQITAVIVNRKENKLKREQRVTGIIVFILTGISVFLAPILKCIPLPVLYGVFLYMGVASLNGIQFWERCKLFLMPAKHQPDHAFLRHVPLRRIHLFTLVQILCLAVLWILKSTVAAIIFPVMSLSTTDILGLIIVRRLLDFIFSQHDLAWIDKIEFP

SEQ ID NO: 1144 - protein, 1019 aa, Homo sapiens
MKVKEEKAGVGKLDHTNHRRRFPDQKGSPAAEQLQDILGEEDEAPNPTLFTEMDTLQHDGDQMEWKESARWIKFEEKVEEGGERWSKPHVSTLSLHSLFELRTCLQTGTVLLDLDSGSLPQIIDDVIEKQIEDGLLRPELRERVSYVLLRRHRHQTKKPIHRSLADIGKSVSTTNRSPARSPGAGPSLHHSTEDLRMRQSANYGRLCHAQSRSMNDISLTPNTDQRKNKFMKKIPKDSEASNVLVGEVDFLDQPFIAFVRLIQSAMLGGVTEVPVPTRFLFILLGPSGRAKSYNEIGRAIATLMVDDLFSDVAYKARNREDLIAGIDEFLDEVIVLPPGEWDPNIRIEPPKKVPSADKRKSVFSLAELGQMNGSVGGGGGAPGGGNGGGGGGGSGGGAGSGGAGGTSSGDDGEMPAMHEIGEELIWTGRFFGGLCLDIKRKLPWFPSDFYDGFHIQSISAILFIYLGCITNAITFGGLLGDATDNYQGVMESFLGTAMAGSLFCLFSGQPLIILSSTGPILIFEKLLFDFSKGNGLDYMEFRLWIGLHSAVQCLILVATDASFIIKYITRFTEEGFSTLISFIFIYDAIKKMIGAFKYYPINMDFKPNFITTYKCECVAPDTVNTTVFNASAPLAPDTNASLYNLLNLTALDWSLLSKKECLSYGGRLLGNSCKFIPDLALMSFILFFGTYSMTLTLKKFKFSRYFPTKPTRPDRGWFVAPFGKNPWWVYPASILPALLVTILIFMDQQITAVIVNRKENKLKKAAGYHLDLFWVGILMALCSFMGLPWYVAATVISIAHIDSLKMETETSAPGEQPQFLGVREQRVTGIIVFILTGISVFLAPILKCIPLPVLYGVFLYMGVASLNGIQFWERCKLFLMPAKHQPDHAFLRHVPLRRIHLFTLVQILCLAVLWILKSTVAAIIFPVMILGLIIVRRLLDFIFSQHDLAWIDNILPEKEKKETDKKRKRKKGAHEDCDEEPQFPPPSVIKIPMESVQSDPQNGIHCIARKRSSSWSYSL

SEQ ID NO: 1145 - protein, 1067 aa, Homo sapiens
MKVKEEKAGVGKLDHTNHRRRFPDQKECPPIHIGLPVPTYPQRKTDQKGHLSGLQKVHWGLRPDQPQQELTGPGSGASSQDSSMDLISRTRSPAAEQLQDILGEEDEAPNPTLFTEMDTLQHDGDQMEWKESARWIKFEEKVEEGGERWSKPHVSTLSLHSLFELRTCLQTGTVLLDLDSGSLPQIIDDVIEKQIEDGLLRPELRERVSYVLLRRHRHQTKKPIHRSLADIGKSVSTTNRSPARSPGAGPSLHHSTEDLRMRQSANYGRLCHAQSRSMNDISLTPNTDQRKNKFMKKIPKDSEASNVLVGEVDFLDQPFIAFVRLIQSAMLGGVTEVPVPTRFLFILLGPSGRAKSYNEIGRAIATLMVDDLFSDVAYKARNREDLIAGIDEFLDEVIVLPPGEWDPNIRIEPPKKVPSADKRKSVFSLAELGQMNGSVGGGGGAPGGGNGGGGGGGSGGGAGSGGAGGTSSGDDGEMPAMHEIGEELIWTGRFFGGLCLDIKRKLPWFPSDFYDGFHIQSISAILFIYLGCITNAITFGGLLGDATDNYQGVMESFLGTAMAGSLFCLFSGQPLIILSSTGPILIFEKLLFDFSKGNGLDYMEFRLWIGLHSAVQCLILVATDASFIIKYITRFTEEGFSTLISFIFIYDAIKKMIGAFKYYPINMDFKPNFITTYKCECVAPDTVNTTVFNASAPLAPDTNASLYNLLNLTALDWSLLSKKECLSYGGRLLGNSCKFIPDLALMSFILFFGTYSMTLTLKKFKFSRYFPTKVRALVADFSIVFSILMFCGIDACFGLETPKLHVPSVIKPTRPDRGWFVAPFGKNPWWVYPASILPALLVTILIFMDQQITAVIVNRKENKLKKAAGYHLDLFWVGILMALCSFMGLPWYVAATVISIAHIDSLKMETETSAPGEQPQFLGVREQRVTGIIVFILTGISVFLAPILKCIPLPVLYGVFLYMGVASLNGIQMGTGGSEFKIQKKLTPFWERCKLFLMPAKHQPDHAFLRHVPLRRIHLFTLVQILCLAVLWILKSTVAAIIFPVMILGLIIVRRLLDFIFSQHDLA

SEQ ID NO: 1146 - protein, 299 aa, Homo sapiens
MDLVLRVADYYFFTPYVYPATWPEDDIFRQAISLLIVTNVGAYILYFFCATLSYYFVFDHALMKHPQFLKNQVRREIKFTVQALPWISILTVALFLLEIRGYSKLHDDLGEFPYGLFELVVSIISFLFFTDMFIYWIHRGLHHRLVYKRLHKPHHIWKIPTPFASHAFHPIDGFLQSLPYHIYPFIFPLHKVVYLSLYILVNIWTISIHDGDFRVPQILQPFINGSAHHTDHHMFFDYNYGQYFTLWDRIGGSFKNPSSFEGKGPLSYVKEMTEGKRSSHSGNGCKNEKLFNGEFTKTE

SEQ ID NO: 1147 - protein, 504 aa, Homo sapiens
MAAQRRSLLQSEQQPSWTDDLPLCHLSGVGSASNRSYSADGKGTESHPPEDSWLKFRSENNCFLYGVFNGYDGNRVTNFVAQRLSAELLLGQLNAEHAEADVRRVLLQAFDVVERSFLESIDDALAEKASLQSQLPEGVPQHQLPPQYQKILERLKTLEREISGGAMAVVAVLLNNKLYVANVGTNRALLCKSTVDGLQVTQLNVDHTTENEDELFRLSQLGLDAGKIKQVGIICGQESTRRIGDYKVKYGYTDIDLLSAAKSKPIIAEPEIHGAQPLDGVTGFLVLMSEGLYKALEAAHGPGQANQEIAAMIDTEFAKQTSLDAVAQAVVDRVKRIHSDTFASGGERARFCPRHEDMTLLVRNFGYPLGEMSQPTPSPAPAAGGRVYPVSVPYSSAQSTSKTSVTLSLVMPSQGQMVNGAHSASTLDEATPTLTNQSPTLTLQSTNTHTQSSSSSSDGGLFRSRPAHSLPPGEDGRVEPYVDFAEFYRLWSVDHGEQSVVTAP

SEQ ID NO: 1148 - protein, 462 aa, Homo sapiens
MAAQRRSLLQSEQQPSWTDDLPLCHLSGVGSASNRSYSADGKGTESHPPEDSWLKFRSENNCFLYGVFNGYDGNRVTNFVAQRLSAELLLGQLNAEHAEADVRRVLLQAFDVVERSFLESIDDALAEKASLQSQLPEGVPQHQLPPQYQKILERLKTLEREISGGAMAVVAVLLNNKLYVANVGTNRALLCKSTVDGLQVTQLNVDHTTENEDELFRLSQLGLDAGKIKQVGIICGQESTRRIGDYKVKYGYTDIDLLSAAKSKPIIAEPEIHGAQPLDGVTGFLVLMSEGLYKALEAAHGPGQANQEIAAMIDTEFAKQTSLDAVAQAVVDRVKRIHSDTFASGGERARFCPRHEDMTLLVRNFGYPLGEMSQPTPSPAPAAGGRVYPVSVPYSSAQSTSKTSVTLSLVMPSQGQMVNGAHSASTLDEATPTLTKDPSRPASDLTAIPQCQLNLLGSLTPG

SEQ ID NO: 1149 - protein, 383 aa, Homo sapiens
MLSRKKTKNEVSKPAEVQGKYVKKETSPLLRNLMPSFIRHGPTIPRRTDICLPDSSPNAFSTSGDVVSRNQSFLRTPIQRTPHEIMRRESNRLSAPSYLARSLADVPREYGSSQSFVTEVSFAVENGDSGSRYYYSDNFFDGQRKRPLGDRAHEDYRYYEYNHDLFQRMPQNQGRHASGIGRVAATSLGNLTNHGSEDLPLPPGWSVDWTMRGRKYYIDHNTNTTHWSHPLEREGLPPGWERVESSEFGTYYVDHTNKKAQYRHPCAPSVPRYDQPPPVTYQPQQTERNQSLLVPANPYHTAEIPDWLQVYARAPVKYDHILKWELFQLADLDTYQGMLKLLFMKELEQIVKMYEAYRQALLTELENRKQRQQWYAQQHGKNF

SEQ ID NO: 1150 - protein, 993 aa, Homo sapiens
MGSGRVPGLCLLVLLVHARAAQYSKAAQDVDECVEGTDNCHIDAICQNTPRSYKCICKSGYTGDGKHCKDVDECEREDNAGCVHDCVNIPGNYRCTCYDGFHLAHDGHNCLDVDECAEGNGGCQQSCVNMMGSYECHCREGFFLSDNQHTCIQRPEEGMNCMNKNHGCAHICRETPKGGIACECRPGFELTKNQRDCKLTCNYGNGGCQHTCDDTEQGPRCGCHIKFVLHTDGKTCIETCAVNNGGCDSKCHDAATGVHCTCPVGFMLQPDRKTCKDIDECRLNNGGCDHICRNTVGSFECSCKKGYKLLINERNCQDIDECSFDRTCDHICVNTPGSFQCLCHRGYLLYGITHCGDVDECSINRGGCRFGCINTPGSYQCTCPAGQGRLHWNGKDCTEPLKCQGSPGASKAMLSCNRSGKKDTCALTCPSRARFLPESENGFTVSCGTPSPRAAPARAGHNGNSTNSNHCHEAAVLSIKQRASFKIKDAKCRLHLRNKGKTEEAGRITGPGGAPCSECQVTFIHLKCDSSRKGKGRRARTPPGKEVTRLTLELEAEVRAEETTASCGLPCLRQRMERRLKGSLKMLRKSINQDRFLLRLAGLDYELAHKPGLVAGERAEPMESCRPGQHRAGTKCVSCPQGTYYHGQTEQCVPCPAGTFQEREGQLSCDLCPGSDAHGPLGATNVTTCAGQCPPGQHSVDGFKPCQPCPRGTYQPEAGRTLCFPCGGGLTTKHEGAISFQDCDTKVQCSPGHYYNTSIHRCIRCAMGSYQPDFRQNFCSRCPGNTSTDFDGSTSVAQCKNRQCGGELGEFTGYIESPNYPGNYPAGVECIWNINPPPKRKILIVVPEIFLPSEDECGDVLVMRKNSSPSSITTYETCQTYERPIAFTARSRKLWINFKTSEANSARGFQIPYVTYDEDYEQLVEDIVRDGRLYASENHQEILKDKKLIKAFFEVLAHPQNYFKYTEKHKEMLPKSFIKLLRSKVSSFLRPYK

SEQ ID NO: 1151 - protein, 1009 aa, Homo sapiens
MGSGRVPGLCLLVLLVHARAAQYSKAAQDVDECVEGTDNCHIDAICQNTPRSYKCICKSGYTGDGKHCKDVDECEREDNAGCVHDCVNIPGNYRCTCYDGFHLAHDGHNCLDVDECAEGNGGCQQSCVNMMGSYECHCREGFFLSDNQHTCIQRPEEGMNCMNKNHGCAHICRETPKGGIACECRPGFELTKNQRDCKLTCNYGNGGCQHTCDDTEQGPRCGCHIKFVLHTDGKTCIGERRLEQHIPTQAVSNETCAVNNGGCDSKCHDAATGVHCTCPVGFMLQPDRKTCKDIDECRLNNGGCDHICRNTVGSFECSCKKGYKLLINERNCQDIDECSFDRTCDHICVNTPGSFQCLCHRGYLLYGITHCGDVDECSINRGGCRFGCINTPGSYQCTCPAGQGRLHWNGKDCTEPLKCQGSPGASKAMLSCNRSGKKDTCALTCPSRARFLPESENGFTVSCGTPSPRAAPARAGHNGNSTNSNHCHEAAVLSIKQRASFKIKDAKCRLHLRNKGKTEEAGRITGPGGAPCSECQVTFIHLKCDSSRKGKGRRARTPPGKEVTRLTLELEAEVRAEETTASCGLPCLRQRMERRLKGSLKMLRKSINQDRFLLRLAGLDYELAHKPGLVAGERAEPMESCRPGQHRAGTKCVSCPQGTYYHGQTEQCVPCPAGTFQEREGQLSCDLCPGSDAHGPLGATNVTTCAGQCPPGQHSVDGFKPCQPCPRGTYQPEAGRTLCFPCGGGLTTKHEGAISFQDCDTKVQCSPGHYYNTSIHRCIRCAMGSYQPDFRQNFCSRCPGNTSTDFDGSTSVAQCKNRQCGGELGEFTGYIESPNYPGNYPAGVECIWNINPPPKRKILIVVPEIFLPSEDECGDVLVMRKNSSPSSITTYETCQTYERPIAFTARSRKLWINFKTSEANSARGFQIPYVTYDEDYEQLVEDIVRDGRLYASENHQEILKDKKLIKAFFEVLAHPQNYFKYTEKHKEMLPKSFIKLLRSKVSSFLRPYK

SEQ ID NO: 1152 - protein, 68 aa, Homo sapiens
MDQVMQFVEPSRQFVKDSIRLVKRCTKPDRKEFQKIAMATAIGFAIMGFIGFFVKLIHIPINNIIVGG

SEQ ID NO: 1153 - protein, 254 aa, Homo sapiens [sequence omitted]

SEQ ID NO: 1154 - protein, 437 aa, Homo sapiens
MARVAWGLLWLLLGSAGAQYEKYSFRGFPPEDLMPLAAAYGHALEQYEGESWRESARYLEAALRLHRLLRDSEAFCHANCSGPAPAAKPDPDGGRADEWACELRLFGRVLERAACLRRCKRTLPAFQVPYPPRQLLRDFQSRLPYQYLHYALFKANRLEKAVAAAYTFLQRNPKHELTAKYLNYYQGMLDVADESLTDLEAQPYEAVFLRAVKLYNSGDFRSSTEDMERALSEYLAVFARCLAGCEGAHEQVDFKDFYPAIADLFAESLQCKVDCEANLTPNVGGYFVDKFVATMYHYLQFAYYKLNDVRQAARSAASYMLFDPKDSVMQQNLVYYRFHRARWGLEEEDFQPREEAMLYHNQTAELRELLEFTHMYLQSDDEMELEETEPPLEPEDALSDAEFEGEGDYEEGMYADWWQEPDAKGDEAEAEPEPELA

SEQ ID NO: 1155 - protein, 398 aa, Homo sapiens
MGAKSMRSWCLCQICSCGSDYCPYEIVKQPRHVPEEYKPKQGKIDLGTTYKRDLNSYKVQPVAIVRPLERQVKKGKLDTVPTYKDDYRAWDLHKSELYKPEQTYHPPTVKFGNSTTFQDDFVPQEIKPRQSFKPSSVVKRSTAPFNGITSHRLDYIPHQLELKFERPKEVYKPTDQRFEDLTTHRCDFQGLIGETAKLCRPVHTRVTQNALFEGSTEFRESFQPWEIPPPEVKKVPEYVPPTGSMLLNSTSHLDYVPYQANHVVPIRPVSQKRSNNFPFQGKSIMKEDFPAWESCRQGLIKKQQQIPNPSGKFDGLSTFRSHYVPHELIPTESCKPLNIAFKSSVPFDDVTMYSVEYTPKRQEICPASYPSPPGYIFDNTNSQGHKFFRKIIPAVKAF

SEQ ID NO: 1156 - protein, 383 aa, Homo sapiens
MPWSDYCPYEIVKQPRHVPEEYKPKQGKIDLGTTYKRDLNSYKVQPVAIVRPLERQVKKGKLDTVPTYKDDYRAWDLHKSELYKPEQTYHPPTVKFGNSTTFQDDFVPQEIKPRQSFKPSSVVKRSTAPFNGITSHRLDYIPHQLELKFERPKEVYKPTDQRFEDLTTHRCDFQGLIGETAKLCRPVHTRVTQNALFEGSTEFRESFQPWEIPPPEVKKVPEYVPPTGSMLLNSTSHLDYVPYQANHVVPIRPVSQKRSNNFPFQGKSIMKEDFPAWESCRQGLIKKQQQIPNPSGKFDGLSTFRSHYVPHELIPTESCKPLNIAFKSSVPFDDVTMYSVEYTPKRQEICPASYPSPPGYIFDNTNSQGHKFFRKIIPAVKAF

SEQ ID NO: 1157 - protein, 429 aa, Homo sapiens
MAVAVGRPSNEELRNLSLSGHVGFDSLPDQLVNKSTSQGFCFNILCVGETGIGKSTLMDTLFNTKFESDPATHNEPGVRLKARSYELQESNVRLKLTIVDTVGFGDQINKDDSYKPIVEYIDAQFEAYLQEELKIKRSLFNYHDTRIHACLYFIAPTGHSLKSLDLVTMKKLDSKVNIIPIIAKADTIAKNELHKFKSKIMSELVSNGVQIYQFPTDEETVAEINATMSVHLPFAVVGSTEEVKIGNKMAKARQYPWGVVQVENENHCDFVKLREMLIRVNMEDLREQTHTRHYELYRRCKLEEMGFKDTDPDSKPFSLQETYEAKRNEFLGELQKKEEEMRQMFVMRVKEKEAELKEAEKELHEKFDLLKRTHQEEKKKVEDKKKELEEEVNNFQKKKAAAQLLQSQAQQSGAQQTKKDKDKKNASFT

SEQ ID NO: 1158 - protein, 439 aa, Homo sapiens
MEERKPAHVLRSFKYAAFMNEELRNLSLSGHVGFDSLPDQLVNKSTSQGFCFNILCVGETGIGKSTLMDTLFNTKFESDPATHNEPGVRLKARSYELQESNVRLKLTIVDTVGFGDQINKDDSYKPIVEYIDAQFEAYLQEELKIKRSLFNYHDTRIHACLYFIAPTGHSLKSLDLVTMKKLDSKVNIIPIIAKADTIAKNELHKFKSKIMSELVSNGVQIYQFPTDEETVAEINATMSVHLPFAVVGSTEEVKIGNKMAKARQYPWGVVQVENENHCDFVKLREMLIRVNMEDLREQTHTRHYELYRRCKLEEMGFKDTDPDSKPFSLQETYEAKRNEFLGELQKKEEEMRQMFVMRVKEKEAELKEAEKELHEKFDLLKRTHQEEKKKVEDKKKELEEEVNNFQKKKAAAQLLQSQAQQSGAQQTKKDKDKKNASFT

SEQ ID NO: 1159 - protein, 599 aa, Homo sapiens [sequence omitted]

SEQ ID NO: 1160 - protein, 476 aa, Homo sapiens
MAIKFLEVIKPFCVILPEIQKPERKIQFKEKVLWTAITLFIFLVCCQIPLFGIMSSDSADPFYWMRVILASNRGTLMELGISPIVTSGLIMQLLAGAKIIEVGDTPKDRALFNGAQKLFGMIITIGQSIVYVMTGMYGDPSEMGAGICLLITIQLFVAGLIVLLLDELLQKGYGLGSGISLFIATNICETIVWKAFSPTTVNTGRGMEFEGAIIALFHLLATRTDKVRALREAFYRQNLPNLMNLIATIFVFAVVIYFQGFRVDLPIKSARYRGQYNTYPIKLFYTSNIPIILQSALVSNLYVISQMLSARFSGNLLVSLLGTWSDTSSGGPARAYPVGGLCYYLSPPESFGSVLEDPVHAVVYIVFMLGSCAFFSKTWIEVSGSSAKDVAKQLKEQQMVMRGHRETSMVHELNRYIPTAAAFGGLCIGALSVLADFLGAIGSGTGILLAVTIIYQYFEIFVKEQSEVGSMGALLF

SEQ ID NO: 1161 - protein, 356 aa, Homo sapiens
MIITIGQSIVYVMTGMYGDPSEMGAGICLLITIQLFVAGLIVLLLDELLQKGYGLGSGISLFIATNICETIVWKAFSPTTVNTGRGMEFEGAIIALFHLLATRTDKVRALREAFYRQNLPNLMNLIATIFVFAVVIYFQGFRVDLPIKSARYRGQYNTYPIKLFYTSNIPIILQSALVSNLYVISQMLSARFSGNLLVSLLGTWSDTSSGGPARAYPVGGLCYYLSPPESFGSVLEDPVHAVVYIVFMLGSCAFFSKTWIEVSGSSAKDVAKQLKEQQMVMRGHRETSMVHELNRYIPTAAAFGGLCIGALSVLADFLGAIGSGTGILLAVTIIYQYFEIFVKEQSEVGSMGALLF

SEQ ID NO: 1162 - protein, 330 aa, Homo sapiens
MPGPATDAGKIPFCDAKEEIRAGLESSEGGGGPERPGARGQRQNIVWRNVVLMSLLHLGAVYSLVLIPKAKPLTLLWAYFCFLLAALGVTAGAHRLWSHRSYRAKLPLRIFLAVANSMAFQNDIFEWSRDHRAHHKYSETDADPHNARRGFFFSHIGWLFVRKHRDVIEKGRKLDVTDLLADPVVRIQRKYYKISVVLMCFVVPTLVPWYIWGESLWNSYFLASILRYTISLNISWLVNSAAHMYGNRPYDKHISPRQNPLVALGAIGEGFHNYHHTFPFDYSASEFGLNFNPTTWFIDFMCWLGLATDRKRATKPMIEARKARTGDSSA

SEQ ID NO: 1163 - protein, 256 aa, Homo sapiens
MPGPATDAGKIPFCDAKEEIRAGLESSEGGGGPERPGARGQRQNIVWRNVVLMSLLHLGAVYSLVLIPKAKPLTLLWAYFCFLLAALGVTAGAHRLWSHRSYRAKLPLRIFLAVANSMAFQNDIFEWSRDHRAHHKYSETDADPHNARRGFFFSHIGWLFVRKHRDVIEKGRKLDVTDLLADPVVRIQRNTQHIQKEGRALNQEAACEMLREWHQGHILKVTLPGLHILALLHTHCNHSEKCCLMLRALSVSLEVF

SEQ ID NO: 1164 - protein, 476 aa, Homo sapiens
MGIKFLEVIKPFCAVLPEIQKPERKIQFREKVLWTAITLFIFLVCCQIPLFGIMSSDSADPFYWMRVILASNRGTLMELGISPIVTSGLIMQLLAGAKIIEVGDTPKDRALFNGAQKLFGMIITIGQAIVYVMTGMYGDPAEMGAGICLLIIIQLFVAGLIVLLLDELLQKGYGLGSGISLFIATNICETIVWKAFSPTTINTGRGTEFEGAVIALFHLLATRTDKVRALREAFYRQNLPNLMNLIATVFVFAVVIYFQGFRVDLPIKSARYRGQYSSYPIKLFYTSNIPIILQSALVSNLYVISQMLSVRFSGNFLVNLLGQWADVSGGGPARSYPVGGLCYYLSPPESMGAIFEDPVHVVVYIIFMLGSCAFFSKTWIEVSGSSAKDVAKQLKEQQMVMRGHRDTSMVHELNRYIPTAAAFGGLCIGALSVLADFLGAIGSGTGILLAVTIIYQYFEIFVKEQAEVGGMGALFF

SEQ ID NO: 1165 - protein, 437 aa, Homo sapiens
MGIKFLEVIKPFCAVLPEIQKPERKIQFREKVLWTAITLFIFLVCCQIPLFGIMSSDSADPFYWMRVILASNRGTLMELGISPIVTSGLIMQLLAGAKIIEVGDTPKDRALFNGAQKLFGMIITIGQAIVYVMTGMYGDPAEMGAGICLLIIIQLFVAGLIVLLLDELLQKGYGLGSGISLFIATNICETIVWKAFSPTTINTGRGTEFEGAVIALFHLLATRTDKVRALREAFYRQNLPNLMNLIATVFVFAVVIYFQGFRVDLPIKSARYRGQYSSYPIKLFYTSNIPIILQSALVSNLYVISQMLSVRFSGNFLVNLLGQWADVSGGGPARSYPVGGLCYYLSPPESMGAIFEDPVHVVVYIIFMLGSCAFFSKTWIEVSGSSAKDVAKQLKEQQMVMRGHRDTSMVHELNRPKVKLRRWKGEGRHFTKRILFY

SEQ ID NO: 1166 - protein, 454 aa, Homo sapiens
MGIKFLEVIKPFCAVLPEIQKPERKIPLFGIMSSDSADPFYWMRVILASNRGTLMELGISPIVTSGLIMQLLAGAKIIEVGDTPKDRALFNGAQKLFGMIITIGQAIVYVMTGMYGDPAEMGAGICLLIIIQLFVAGLIVLLLDELLQKGYGLGSGISLFIATNICETIVWKAFSPTTINTGRGTEFEGAVIALFHLLATRTDKVRALREAFYRQNLPNLMNLIATVFVFAVVIYFQGFRVDLPIKSARYRGQYSSYPIKLFYTSNIPIILQSALVSNLYVISQMLSVRFSGNFLVNLLGQWADVSGGGPARSYPVGGLCYYLSPPESMGAIFEDPVHVVVYIIFMLGSCAFFSKTWIEVSGSSAKDVAKQLKEQQMVMRGHRDTSMVHELNRYIPTAAAFGGLCIGALSVLADFLGAIGSGTGILLAVTIIYQYFEIFVKEQAEVGGMGALFF

SEQ ID NO: 1167 - protein, 1400 aa, Homo sapiens
MMASFQRSNSHDKVRRIVAEEGRTARNLIAWSVPLESKDDDGKPKCQTGGKSKRTIQGTHKTTKQSTAVDCKITSSTTGDKHFDKSPTKTRHPRKIDLRARYWAFLFDNLRRAVDEIYVTCESDQSVVECKEVLMMLDNYVRDFKALIDWIQLQEKLEKTDAQSRPTSLAWEVKKMSPGRHVIPSPSTDRINVTSNARRSLNFGGSTGTVPAPRLAPTGVSWADKVKAHHTGSTASSEITPAQSCPPMTVQKASRKNERKDAEGWETVQRGRPIRSRSTAVMPKVSLATEATRSKDDSDKENVCLLPDESIQKGQFVGDGTSNTIESHPKDSLHSCDHPLAEKTQFTVSTLDDVKNSGSIRDNYVRTSEISAVHIDTECVSVMLQAGTPPLQVNEEKFPAEKARIENEMDPSDISNSMAEVLAKKEELADRLEKANEEAIASAIAEEEQLTREIEAEENNDINIETDNDSDFSASMGSGSVSFCGMSMDWNDVLADYEARESWRQNTSWGDIVEEEPARPPGHGIHMHEKLSSPSRKRTIAESKKKHEEKQMKAQQLREKLREEKTLKLQKLLEREKDVRKWKEELLDQRRRMMEEKLLHAEFKREVQLQAIVKKAQEEEAKVNEIAFINTLEAQNKRHDVLSKLKEYEQRLNELQEERQRRQEEKQARDEAVQERKRALEAERQARVEELLMKRKEQEARIEQQRQEKEKAREDAARERARDREERLAALTAAQQEAMEELQKKIQLKHDESIRRHMEQIEQRKEKAAELSSGRHANTDYAPKLTPYERKKQCSLCNVLISSEVYLFSHVKGRKHQQAVRENTSIQGRELSDEEVEHLSLKKYIIDIVVESTAPAEALKDGEERQKNKKKAKKIKARMNFRAKEYESLMETKNSGSDSPYKAKLQRLAKDLLKQVQVQDSGSWANNKVSALDRTLGEITRILEKENVADQIAFQAAGGLTALEHILQAVVPATNVNTVLRIPPKSLCNAINVYNLTCNNCSENCSDVLFSNKITFLMDLLIHQLTVYVPDENNTILGRNTNKQVFEGLTTGLLKVSAVVLGCLIANRPDGNCQPATPKIPTQEMKNKPSQGDPFNNRVQDLISYVVNMGLIDKLCACFLSVQGPVDENPKMAIFLQHAAGLLHAMCTLCFAVTGRSYSIFDNNRQDPTGLTAALQATDLAGVLHMLYCVLFHGTILDPSTASPKENYTQNTIQVAIQSLRFFNSFAALHLPAFQSIVGAEGLSLAFRHMASSLLGHCSQVSCESLLHEVIVCVGYFTVNHPDNQVIVQSGRHPTVLQKLCQLPFQYFSDPRLIKVLFPSLIAACYNNHQNKIILEQEMSCVLLATFIQDLAQTPGQAENQPYQPKGKCLGSQDYLELANRFPQQAWEEARQFFLKKEKK

SEQ ID NO: 1168 - protein, 1265 aa, Homo sapiens
REATPPLRGLPAPPRHAPFPAGRFEPPRTKQGGRGSHTPWDYVINDLGIEENLKSDGKPKCQTGGKSKRTIQGTHKTTKQSTAVDCKITSSTTGDKHFDKSPTKTRHPRKIDLRARYWAFLFDNLRRAVDEIYVTCESDQSVVECKEVLMMLDNYVRDFKALIDWIQLQEKLEKTDAQSRPTSLAWEVKKMSPGRHVIPSPSTDRINVTSNARRSLNFGGSTGTVPAPRLAPTGVSWADKVKAHHTGSTASSEITPAQSCPPMTVQKASRKNERKDAEGWETVQRGRPIRSRSTAVMPKVSLATEATRSKDDSDKENVCLLPDESIQKGQFVGDGTSNTIESHPKDSLHSCDHPLAEKTQFTVSTLDDVKNSGSIRDNYVRTSEISAVHIDTECVSVMLQAGTPPLQVNEEKFPAEKARIENEMDPSDISNVSAANLSMAEVLAKKEELADRLEKANEEAIASAIAEEEQLTREIEAEENNDINIETDNDSDFSASMGSGSVSFCGMSMDWNDVLADYEARESWRQNTSWGDIVEEEPARPPGHGIHMHEKLSSPSRKRTIAESKKKHEEKQMKAQQLREKLREEKTLKLQKLLEREKDVRKWKEELLDQRRRMMEEKLLHAEFKREVQLQAIVKKAQEEEAKVNEIAFINTLEAQNKRHDVLSKLKEYEQRLNELQEERQRRQEEKQARDEAVQERKRALEAERQARVEELLMKRKEQEARIEQQRQEKEKAREDAARERARDREERLAALTAAQQEAMEELQKKIQLKHDESIRRHMEQIEQRKEKAAELSSGRHANTDYAPKLTPYERKKQCSLCNVLISSEVYLFSHVKGRKHQQAVRENTSIQGRELSDEEVEHLSLKKYIIDIVVESTAPAEALKDGEERQKNKKKAKKIKARMNFRAKEYESLMETKNSGSDSPYKAKLQRLAKDLLKQVQVQDSGSWANNKVSALDRTLGEITRILEKENVADQIAFQAAGGLTALEHILQAVVPATNVNTVLRIPPKSLCNAINVYNLTCNNCSENCSDVLFSNKITFLMDLLIHQLTVYVPDENNTILGRNTNKQVFEGLTTGLLKVSAVVLGCLIANRPDGNCQPATPKIPTQEMKNKPSQGDPFNNRVQDLISYVVNMGLIDKLCACFLSVQGPVDENPKMAIFLQHAAGLLHAMCTLCFAVTGRSYSIFDNNRQDPTGLTAALQATDLAGVLHMLYCVLFHGTILDPSTASPKENYTQNTIQVAIQSLRFFNSFAALHLPAFQVPSIGLYRC

SEQ ID NO: 1169 - protein, 1154 aa, Homo sapiens
MKTKYIFCNITERKDAEGWETVQRGRPIRSRSTAVMPKVSLATEATRSKDDSDKENVCLLPDESIQKGQFVGDGTSNTIESHPKDSLHSCDHPLAEKTQFTVSTLDDVKNSGSIRDNYVRTSEISAVHIDTECVSVMLQAGTPPLQVNEEKFPAEKARIENEMDPSDISNSMAEVLAKKEELADRLEKANEEAIASAIAEEEQLTREIEAEENNDINIETDNDSDFSASMGSGSVSFCGMSMDWNDVLADYEARESWRQNTSWGDIVEEEPARPPGHGIHMHEKLSSPSRKRTIAESKKKHEEKQMKAQQLREKLREEKTLKLQKLLEREKDVRKWKEELLDQRRRMMEEKLLHAEFKREVQLQAIVKKAQEEEAKVNEIAFINTLEAQNKRHDVLSKLKEYEQRLNELQEERQRRQEEKQARDEAVQERKRALEAERQARVEELLMKRKEQEARIEQQRQEKEKAREDAARERARDREERLAALTAAQQEAMEELQKKIQLKHDESIRRHMEQIEQRKEKAAELSSGRHANTDYAPKLTPYERKKQCSLCNVLISSEVYLFSHVKGRKHQQAVRENTSIQGRELSDEEVEHLSLKKYIIDIVVESTAPAEALKDGEERQKNKKKAKKIKARMNFRAKEYESLMETKNSGSDSPYKAKLQRLAKDLLKQVQVQDSGSWANNKVSALDRTLGEITRILEKENVADQIAFQAAGGLTALEHILQAVVPATNVNTVLRIPPKSLCNAINVYNLTCNNCSENCSDVLFSNKITFLMDLLIHQLTVYVPDENNTILGRNTNKQVFEGLTTGLLKVSAVVLGCLIANRPDGNCQPATPKIPTQEMKNKPSQGDPFNNRVQDLISYVVNMGLIDKLCACFLSVQGPVDENPKMAIFLQHAAGLLHAMCTLCFAVTGRSYSIFDNNRQDPTGLTAALQATDLAGVLHMLYCVLFHGTILDPSTASPKENYTQNTIQVAIQSLRFFNSFAALHLPAFQSIVGAEGLSLAFRHMASSLLGHCSQVSCESLLHEVIVCVGYFTVNHPDNQVIVQSGRHPTVLQKLCQLPFQYFSDPRLIKVLFPSLIAACYNNHQNKIILEQEMSCVLLATFIQDLAQTPGQAENQPYQPKGKCLGSQDYLELANRFPQQAWEEARQFFLKKEKK

SEQ ID NO: 1170 - protein, 215 aa, Homo sapiens [sequence omitted]

SEQ ID NO: 1171 - protein, 146 aa, Homo sapiens
MLLALVCLLSCLLPSSEAKLYGRCELARVLHDFGLDGYRGYSLADWVCLAYFTSGFNAAALDYEADGSTNNGIFQINSRRWCSNLTPNVPNVCRMYCSDLLNPNLKDTVICAMKITQEPQGLGYWEAWRHHCQGKDLTEWVDGCDF

SEQ ID NO: 1172 - protein, 271 aa, Homo sapiens
MEAEGLDWLLVPLHQLVSWGAAAAMVFGGVVPYVPQYRDIRRTQNADGFSTYVCLVLLVANILRILFWFGRRFESPLLWQSAIMILTMLLMLKLCTEVRVANELNARRRSFTAADSKDEEVKVAPRRSFLDFDPHHFWQWSSFSDYVQCVLAFTGVAGYITYLSIDSALFVETLGFLAVLTEAMLGVPQLYRNHRHQSTEGMSIKMVLMWTSGDAFKTAYFLLKGAPLQFSVCGLLQVLVDLAILGQAYAFARHPQKPAPHAVHPTGTKAL

SEQ ID NO: 1173 - protein, 253 aa, Homo sapiens
MEAEGLDWLLVPLHQLVSWGAAAAMVFGGVVPYVPQYRDIRRTQNADGFSTYVCLVLLVANILRILFWFGRRFESPLLWQSAIMILTMLLMLKLCTEVRVANELNARRRSFTDFDPHHFWQWSSFSDYVQCVLAFTGVAGYITYLSIDSALFVETLGFLAVLTEAMLGVPQLYRNHRHQSTEGMSIKMVLMWTSGDAFKTAYFLLKGAPLQFSVCGLLQVLVDLAILGQAYAFARHPQKPAPHAVHPTGTKAL

SEQ ID NO: 1174 - protein, 132 aa, Homo sapiens
MEAEGLDWLLVPLHQLVSWGAAAAMVFGGVVPYVPQYRDIRRTQNADGFSTYVCLVLLVANILRILFWFGRRFESPLLWQSAIMILTMLLMLKLCTEVRVANELNARRRSFTASRWCSCGPVVTPSRRPTSC

SEQ ID NO: 1175 - protein, 359 aa, Homo sapiens
MPAHLLQDDISSSYTTTTTITAPPSRVLQNGGDKLETMPLYLEDDIRPDIKDDIYDPTYKDKEGPSPKVEYVWRNIILMSLLHLGALYGITLIPTCKFYTWLWGVFYYFVSALGITAGAHRLWSHRSYKARLPLRLFLIIANTMAFQNDVYEWARDHRAHHKFSETHADPHNSRRGFFFSHVGWLLVRKHPAVKEKGSTLDLSDLEAEKLVMFQRRYYKPGLLMMCFILPTLVPWYFWGETFQNSVFVATFLRYAVVLNATWLVNSAAHLFGYRPYDKNISPRENILVSLGAVGEGFHNYHHSFPYDYSASEYRWHINFTTFFIDCMAALGLAYDRKKVSKAAILARIKRTGDGNYKSG

SEQ ID NO: 1176 - protein, 250 aa, Homo sapiens
MSIFTPTNQIRLTNVAVVRMKRAGKRFEIACYKNKVVGWRSGVEKDLDEVLQTHSVFVNVSKGQVAKKEDLISAFGTDDQTEICKQILTKGEVQVSDKERHTQLEQMFRDIATIVADKCVNPETKRPYTVILIERAMKDIHYSVKTNKSTKQQALEVIKQLKEKMKIERAHMRLRFILPVNEGKKLKEKLKPLIKVIESEDYGQQLEIVCLIDPGCFREIDELIKKETKGKGSLEVLNLKDVEEGDEKFE

SEQ ID NO: 1177 - protein, 198 aa, Homo sapiens
MSFIFEWIYNGFSSVLQFLGLYKKSGKLVFLGLDNAGKTTLLHMLKDDRLGQHVPTLHPTSEELTIAGMTFTTFDLGGHEQARRVWKNYLPAINGIVFLVDCADHSRLVESKVELNALMTDETISNVPILILGNKIDRTDAISEEKLREIFGLYGQTTGKGNVTLKELNARPMEVFMCSVLKRQGYGEGFRWLSQYID

SEQ ID NO: 1178 - protein, 155 aa, Homo sapiens
MLKDDRLGQHVPTLHPTSEELTIAGMTFTTFDLGGHEQARRVWKNYLPAINGIVFLVDCADHSRLVESKVELNALMTDETISNVPILILGNKIDRTDAISEEKLREIFGLYGQTTGKGNVTLKELNARPMEVFMCSVLKRQGYGEGFRWLSQYID

SEQ ID NO: 1179 - protein, 677 aa, Homo sapiens
MQPTLLLSLLGAVGLAAVNSMPVDNRNHNEGMVTRCIIEVLSNALSKSSAPPITPECRQVLKTSRKDVKDKETTENENTKFEVRLLRDPADASEAHESSSRGEAGAPGEEDIQGPTKADTEKWAEGGGHSRERADEPQWSLYPSDSQVSEEVKTRHSEKSQREDEEEEEGENYQKGERGEDSSEEKHLEEPGETQNAFLNERKQASAIKKEELVARSETHAAGHSQEKTHSREKSSQESGEETGSQENHPQESKGQPRSQEESEEGEEDATSEVDKRRTRPRHHHGRSRPDRSSQGGSLPSEEKGHPQEESEESNVSMASLGEKRDHHSTHYRASEEEPEYGEEIKGYPGVQAPEDLEWERYRGRGSEEYRAPRPQSEESWDEEDKRNYPSLELDKMAHGYGEESEEERGLEPGKGRHHRGRGGEPRAYFMSDTREEKRFLGEGHHRVQENQMDKARRHPQGAWKELDRNYLNYGEEGAPGKWQQQGDLQDTKENREEARFQDKQYSSHHTAEKRKRLGELFNPYYDPLQWKSSHFERRDNMNDNFLEGEEENELTLNEKNFFPEYNYDWWEKKPFSEDVNWGYEKRNLARVPKLDLKRQYDRVAQLDQLLHYRKKSAEFPDFYDSEEPVSTHQEAENEKDRADQTVLTEDEKKELENLAAMDLELQKIAEKFSQRG

SEQ ID NO: 1180 - protein, 617 aa, Homo sapiens
MAEAKTHWLGAALSLIPLIFLISGAEAASFQRNQLLQKEPDLRLENVQKFPSPEMIRALEYIENLRQQAHKEESSPDYNPYQGVSVPLQQKENGDESHLPERDSLSEEDWMRIILEALRQAENEPQSAPKENKPYALNSEKNFPMDMSDDYETQQWPERKLKHMQFPPMYEENSRDNPFKRTNEIVEEQYTPQSLATLESVFQELGKLTGPNNQKRERMDEEQKLYTDDEDDIYKANNIAYEDVVGGEDWNPVEEKIESQTQEEVRDSKENIEKNEQINDEMKRSGQLGIQEEDLRKESKDQLSDDVSKVIAYLKRLVNAAGSGRLQNGQNGERATRLFEKPLDSQSIYQLIEISRNLQIPPEDLIEMLKTGEKPNGSVEPERELDLPVDLDDISEADLDHPDLFQNRMLSKSGYPKTPGRAGTEALPDGLSVEDILNLLGMESAANQKTSYFPNPYNQEKVLPRLPYGAGRSRSNQLPKAAWIPHVENRQMAYENLNDKDQELGEYLARMLVKYPEIINSNQVKRVPGQGSSEDDLQEEEQIEQAIKEHLNQGSSQETDKLAPVSKRFPVGPPKNDDTPNRQYWDEDLLMKVLEYLNQEKAEKGREHIAKRAMENM

SEQ ID NO: 1181 - protein, 468 aa, Homo sapiens
MGFLGTGTWILVLVLPIQAFPKPGGSQDKSLHNRELSAERPLNEQIAEAEEDKIKKTYPPENKPGQSNYSFVDNLNLLKAITEKEKIEKERQSIRSSPLDNKLNVEDVDSTKNRKLIDDYDSTKSGLDHKFQDDPDGLHQLDGTPLTAEDIVHKIAARIYEENDRAVFDKIVSKLLNLGLITESQAHTLEDEVAEVLQKLISKEANNYEEDPNKPTSWTENQAGKIPEKVTPMAAIQDGLAKGENDETVSNTLTLTNGLERRTKTYSEDNFEELQYFPNFYALLKSIDSEKEAKEKETLITIMKTLIDFVKMMVKYGTISPEEGVSYLENLDEMIALQTKNKLEKNATDNISKLFPAPSEKSHEETDSTKEEAAKMEKEYGSLKDSTKDDNSNPGGKTDEPKGKTEAYLEAIRKNIEWLKKHDKKGNKEDYDLSKMRDFINKQADAYVEKGILDKEEAEAIKRIYSSL

SEQ ID NO: 1182 - protein, 236 aa, Homo sapiens
MAAIQDGLAKGENDETVSNTLTLTNGLERRTKTYSEDNFEELQYFPNFYALLKSIDSEKEAKEKETLITIMKTLIDFVKMMVKYGTISPEEGVSYLENLDEMIALQTKNKLEKNATDNISKLFPAPSEKSHEETDSTKEEAAKMEKEYGSLKDSTKDDNSNPGGKTDEPKGKTEAYLEAIRKNIEWLKKHDKKGNKEDYDLSKMRDFINKQADAYVEKGILDKEEAEAIKRIYSSL

SEQ ID NO: 1183 - protein, 105 aa, Homo sapiens
MGCCGCGSCGGCGGRCGGGCGGGCSGGCGGGCGGGCGGGCGSCTTCRCYRVGCCSSCCPCCRGCCGGCCSTPVICCCRRTCGSCGCGYGKGCCQQKCCCQKQCCC

SEQ ID NO: 1184 - protein, 309 aa, Homo sapiens
MEAARTAVLRVKRKRSAEPAEALVLACKRLRSDAVESAAQKTSEGLERAAENNVFHLVATVCSQEEPVQPLLREVLRPSRDSQQRVRRNLRASAREVRQEGRYRVLSSRRSLGTTSSGQESEYTPGNPEAAGNSGFQLLDLVHEEGEPEAASAGSCKTSDPDVILCNSVELIRERLTVSEDGPGVRRQEEQKHDDYVYDIYYLETATPGWIENILSVQPYSQEWELVNDDQEPEDIYDDEDDENSENNWRNEYPEEESSDGDEDSRGSADYNSLSEEERGSSRQRMWSKYPLDVQKEFGYDSPHDLDSD

SEQ ID NO: 1185 - protein, 1463 aa, Homo sapiens
MKKKTVCTLNMGDKKYEDMEGEENGDNTISTGLLYSEADRCPICLNCLLEKEVGFPESCNHVFCMTCILKWAETLASCPIDRKPFQAVFKFSALEGYVKVQVKKQLRETKDKKNENSFEKQVSCHENSKSCIRRKAIVREDLLSAKVCDLKWIHRNSLYSETGGKKNAAIKINKPQRSNWSTNQCFRNFFSNMFSSVSHSGESSFTYRAYCTEFIEASEISALIRQKRHELELSWFPDTLPGIGRIGFIPWNVETEVLPLISSVLPRTIFPTSTISFEHFGTSCKGYALAHTQEGEEKKQTSGTSNTRGSRRKPAMTTPTRRSTRNTRAETASQSQRSPISDNSGCDAPGNSNPSLSVPSSAESEKQTRQAPKRKSVRRGRKPPLLKKKLRSSVAAPEKSSSNDSVDEETAESDTSPVLEKEHQPDVDSSNICTVQTHVENQSANCLKSCNEQIEESEKHTANYDTEERVGSSSSESCAQDLPVLVGEEGEVKKLENTGIEANVLCLESEISENILEKGGDPLEKQDQISGLSQSEVKTDVCTVHLPNDFPTCLTSESKVYQPVSCPLSDLSENVESVVNEEKITESSLVEITEHKDFTLKTEELIESPKLESSEGEIIQTVDRQSVKSPEVQLLGHVETEDVEIIATCDTFGNEDFNNIQDSENNLLKNNLLNTKLEKSLEEKNESLTEHPRSTELPKTHIEQIQKHFSEDNNEMIPMECDSFCSDQNESEVEPSVNADLKQMNENSVTHCSENNMPSSDLADEKVETVSQPSESPKDTIDKTKKPRTRRSRFHSPSTTWSPNKDTPQEKKRPQSPSPRRETGKESRKSQSPSPKNESARGRKKSRSQSPKKDIARERRQSQSRSPKRDTTRESRRSESLSPRRETSRENKRSQPRVKDSSPGEKSRSQSRERESDRDGQRRERERRTRKWSRSRSHSRSPSRCRTKSKSSSFGRIDRDSYSPRWKGRWANDGWRCPRGNDRYRKNDPEKQNENTRKEKNDIHLDADDPNSADKHRNDCPNWITEKINSGPDPRTRNPEKLKESHWEENRNENSGNSWNKNFGSGWVSNRGRGRGNRGRGTYRSSFAYKDQNENRWQNRKPLSGNSNSSGSESFKFVEQQSYKRKSEQEFSFDTPADRSGWTSASSWAVRKTLPADVQNYYSRRGRNSSGPQSGWMKQEEETSGQDSSLKDQTNQQVDGSQLPINMMQPQMNVMQQQMNAQHQPMNIFPYPVGVHAPLMNIQRNPFNIHPQLPLHLHTGVPLMQVATPTSVSQGLPPPPPPPPPSQQVNYIASQPDGKQLQGIPSSSHVSNNMSTPVLPAPTAAPGNTGMVQGPSSGNTSSSSHSKASNAAVKLAESKVSVAVEASADSSKTDKKLQIQEKAAQEVKLAIKPFYQNKDITKEEYKEIVRKAVDKVCHSKSGEVNSTKVANLVKAYVDKYKYSRKGSQKKTLEEPVSTEKNIG

SEQ ID NO: 1186 - protein, 1148 aa, Homo sapiens
MTTPTRRSTRNTRAETASQSQRSPISDNSGCDAPGNSNPSLSVPSSAESEKQTRQAPKRKSVRRGRKPPLLKKKLRSSVAAPEKSSSNDSVDEETAESDTSPVLEKEHQPDVDSSNICTVQTHVENQSANCLKSCNEQIEESEKHTANYDTEERVGSSSSESCAQDLPVLVGEEGEVKKLENTGIEANVLCLESEISENILEKGGDPLEKQDQISGLSQSEVKTDVCTVHLPNDFPTCLTSESKVYQPVSCPLSDLSENVESVVNEEKITESSLVEITEHKDFTLKTEELIESPKLESSEGEIIQTVDRQSVKSPEVQLLGHVETEDVEIIATCDTFGNEDFNNIQDSENNLLKNNLLNTKLEKSLEEKNESLTEHPRSTELPKTHIEQIQKHFSEDNNEMIPMECDSFCSDQNESEVEPSVNADLKQMNENSVTHCSENNMPSSDLADEKVETVSQPSESPKDTIDKTKKPRTRRSRFHSPSTTWSPNKDTPQEKKRPQSPSPRRETGKESRKSQSPSPKNESARGRKKSRSQSPKKDIARERRQSQSRSPKRDTTRESRRSESLSPRRETSRENKRSQPRVKDSSPGEKSRSQSRERESDRDGQRRERERRTRKWSRSRSHSRSPSRCRTKSKSSSFGRIDRDSYSPRWKGRWANDGWRCPRGNDRYRKNDPEKQNENTRKEKNDIHLDADDPNSADKHRNDCPNWITEKINSGPDPRTRNPEKLKESHWEENRNENSGNSWNKNFGSGWVSNRGRGRGNRGRGTYRSSFAYKDQNENRWQNRKPLSGNSNSSGSESFKFVEQQSYKRKSEQEFSFDTPADRSGWTSASSWAVRKTLPADVQNYYSRRGRNSSGPQSGWMKQEEETSGQDSSLKDQTNQQVDGSQLPINMMQPQMNVMQQQMNAQHQPMNIFPYPVGVHAPLMNIQRNPFNIHPQLPLHLHTGVPLMQVATPTSVSQGLPPPPPPPPPSQQVNYIASQPDGKQLQGIPSSSHVSNNMSTPVLPAPTAAPGNTGMVQGPSSGNTSSSSHSKASNAAVKLAESKVSVAVEASADSSKTDKKLQIQEKAAQEVKLAIKPFYQNKDITKEEYKEIVRKAVDKVCHSKSGEVNSTKVANLVKAYVDKYKYSRKGSQKKTLEEPVSTEKNIG

SEQ ID NO: 1187 - protein, 404 aa, Homo sapiens
MAGRRAQTGSAPPRPAAPHPRPASRAFPQHCRPRDAERPPSPRSPLMPGCELPVGTCPDMCPAAERAQREREHRLHRLEVVPGCRQDPPRADPQRAVKEYSRPAAGKPRPPPSQLRPPSVLLATVRYLAGEVAESADIARAEVASFVADRLRAVLLDLALQGAGDAEAAVVLEAALATLLTVVARLGPDAARGPADPVLLQAQVQEGFGSLRRCYARGAGPHPRQPAFQGLFLLYNLGSVEALHEVLQLPAALRACPPLRKALAVDAAFREGNAARLFRLLQTLPYLPSCAVQCHVGHARREALARFARAFSTPKGQTLPLGFMVNLLALDGLREARDLCQAHGLPLDGEERVVFLRGRYVEEGLPPASTCKVLVESKLRGRTLEEVVMAEEEDEGTDRPGSPA

SEQ ID NO: 1188 - protein, 285 aa, Homo sapiens
MAGRRAQTGSAPPRPAAPHPRPASRAFPQHCRPRDAERPPSPRSPLMPGCELPVGTCPDMCPAAERAQREREHRLHRLEVVPGCRQDPPRADPQRAVKEYSRPAAGKPRPPPSQLRPPSVLLATVRYLAGEVAESADIARAEVASFVADRLRAVLLDLALQGAGDAEAAVVLEAALATLLTVVARLGPDAARGPADPVLLQAQVQEGFGSLRRCYARGAGPHPRQPAFQGLFLLYNLGESGSWRLGRAWGQEPTMTVEARWKPCMRFYSCLLPCAPARPSARPWR

SEQ ID NO: 1189 - protein, 347 aa, Homo sapiens
MAQSRDGGNPFAEPSELDNPFQDPAVIQHRPSRQYATLDVYNPFETREPPPAYEPPAPAPLPPPSAPSLQPSRKLSPTEPKNYGSYSTQASAAAATAELLKKQEELNRKAEELDRRERELQHAALGGTATRQNNWPPLPSFCPVQPCFFQDISMEIPQEFQKTVSTMYYLWMCSTLALLLNFLACLASFCVETNNGAGFGLSILWVLLFTPCSFVCWYRPMYKAFRSDSSFNFFVFFFIFFVQDVLFVLQAIGIPGWGFSGWISALVVPKGNTAVSVLMLLVALLFTGIAVLGIVMLKRIHSLYRRTGASFQKAQQEFAAGVFSNPAVRTAAANAAAGAAENAFRAP

SEQ ID NO: 1190 - protein, 321 aa, Homo sapiens
MAQSRDGGNPFAEPSELDNPFQPPPAYEPPAPAPLPPPSAPSLQPSRKLSPTEPKNYGSYSTQASAAAATAELLKKQEELNRKAEELDRRERELQHAALGGTATRQNNWPPLPSFCPVQPCFFQDISMEIPQEFQKTVSTMYYLWMCSTLALLLNFLACLASFCVETNNGAGFGLSILWVLLFTPCSFVCWYRPMYKAFRSDSSFNFFVFFFIFFVQDVLFVLQAIGIPGWGFSGWISALVVPKGNTAVSVLMLLVALLFTGIAVLGIVMLKRIHSLYRRTGASFQKAQQEFAAGVFSNPAVRTAAANAAAGAAENAFRAP

SEQ ID NO: 1191 - protein, 601 aa, Homo sapiens
MPERELWPAGTGSEPVTRVGSCDSMMSSTSTRSGSSDSSYDFLSTEEKECLLFLEETIGSLDTEADSGLSTDESEPATTPRGFRALPITQPTPRGGPEETITQQGRTPRTVTESSSSHPPEPQGLGLRSGSYSLPRNIHIARSQNFRKSTTQASSHNPGEPGRLAPEPEKEQVSQSSQPRQAPASPQEAALDLDVVLIPPPEAFRDTQPEQCREASLPEGPGQQGHTPQLHTPSSSQEREQTPSEAMSQKAKETVSTRYTQPQPPPAGLPQNARAEDAPLSSGEDPNSRLAPLTTPKPRKLPPNIVLKSSRSSFHSDPQHWLSRHTEAAPGDSGLISCSLQEQRKARKEALEKLGLPQDQDEPGLHLSKPTSSIRPKETRAQHLSPAPGLAQPAAPAQASAAIPAAGKALAQAPAPAPGPAQGPLPMKSPAPGNVAASKSMPISIPKAPRANSALTPPKPESGLTLQESNTPGLRQMNFKSNTLERSGVGLSSYLSTEKDASPKTSTSLGKGSFLDKISPSVLRNSRPRPASLGTGKDFAGIQVGKLADLEQEQSSKRLSYQGQSRDKLPRPPCVSVKISPKGVPNEHRREALKKLGLLKE

SEQ ID NO: 1192 - protein, 355 aa, Homo sapiens
MSQKAKETVSTRYTQPQPPPAGLPQNARAEDAPLSSGEDPNSRLAPLTTPKPRKLPPNIVLKSSRSSFHSDPQHWLSRHTEAAPGDSGLISCSLQEQRKARKEALEKLGLPQDQDEPGLHLSKPTSSIRPKETRAQHLSPAPGLAQPAAPAQASAAIPAAGKALAQAPAPAPGPAQGPLPMKSPAPGNVAASKSMPISIPKAPRANSALTPPKPESGLTLQESNTPGLRQMNFKSNTLERSGVGLSSYLSTEKDASPKTSTSLGKGSFLDKISPSVLRNSRPRPASLGTGKDFAGIQVGKLADLEQEQSSKRLSYQGQSRDKLPRPPCVSVKISPKGVPNEHRREALKKLGLLKE

SEQ ID NO: 1193 - protein, 929 aa, Homo sapiens
MESMLNKLKSTVTKVTADVTSAVMGNPVTREFDVGRHIASGGNGLAWKIFNGTKKSTKQEVAVFVFDKKLIDKYQKFEKDQIIDSLKRGVQQLTRLRHPRLLTVQHPLEESRDCLAFCTEPVFASLANVLGNWENLPSPISPDIKDYKLYDVETKYGLLQVSEGLSFLHSSVKMVHGNITPENIILNKSGAWKIMGFDFCVSSTNPSEQEPKFPCKEWDPNLPSLCLPNPEYLAPEYILSVSCETASDMYSLGTVMYAVFNKGKPIFEVNKQDIYKSFSRQLDQLSRLGSSSLTNIPEEVREHVKLLLNVTPTVRPDADQMTKIPFFDDVGAVTLQYFDTLFQRDNLQKSQFFKGLPKVLPKLPKRVIVQRILPCLTSEFVNPDMVPFVLPNVLLIAEECTKEEYVKLILPELGPVFKQQEPIQILLIFLQKMDLLLTKTPPDEIKNSVLPMVYRALEAPSIQIQELCLNIIPTFANLIDYPSMKNALIPRIKNACLQTSSLAVRVNSLVCLGKILEYLDKWFVLDDILPFLQQIPSKEPAVLMGILGIYKCTFTHKKLGITKEQLAGKVLPHLIPLSIENNLNLNQFNSFISVIKEMLNRLESEHKTKLEQLHIMQEQQKSLDIGNQMNVSEEMKVTNIGNQQIDKVFNNIGADLLTGSESENKEDGLQNKHKRASLTLEEKQKLAKEQEQAQKLKSQQPLKPQVHTPVATVKQTKDLTDTLMDNMSSLTSLSVSTPKSSASSTFTSVPSMGIGMMFSTPTDNTKRNLTNGLNANMGFQTSGFNMPVNTNQNFYSSPSTVGVTKMTLGTPPTLPNFNALSVPPAGAKQTQQRPTDMSALNNLFGPQKPKVSMNQLSQQKPNQWLNQFVPPQGSPTMGSSVMGTQMNVIGQSAFGMQGNPFFNPQNFAQPPTTMTNSSSASNDLKDLFG

SEQ ID NO: 1194 - protein, 87 aa, Homo sapiens
  MOD_RES (13)..(13): Selenocysteine
MALAVRVVYCGAXGYKSKYLQLKKKLEDEFPGRLDICGEGTPQATGFFEVMVAGKLIHSKKKGDGYVDTESKFLKLVAAIKAALAQG

SEQ ID NO: 1195 - protein, 380 aa, Homo sapiens
MLRRKPSNASEKEPTQKKKLSLQRSSSFKDFAKSKPSSPVVSEKEFNLDDNIPEDDSGVPTPEDAGKSGKKLGKKWRAVISRTMNRKMGKMMVKALSEEMADTLEEGSASPTSPDYSLDSPGPEKMALAFSEQEEHELPVLSRQASTGSELCSPSPGSGSFGEEPPAPQYTGPFCGRARVHTDFTPSPYDHDSLKLQKGDVIQIIEKPPVGTWLGLLNGKVGSFKFIYVDVLPEEAVGHARPSRRQSKGKRPKPKTLHELLERIGLEEHTSTLLLNGYQTLEDFKELRETHLNELNIMDPQHRAKLLTAAELLLDYDTGSEEAEEGAESSQEPVAHTVSEPKVDIPRDSGCFEGSESGRDDAELAGTEEQLQGLSLAGAP

SEQ ID NO: 1196 - protein, 763 aa, Homo sapiens
MDHLNEATQGKEHSEMSNNVSDPKGPPAKIARLEQNGSPLGRGRLGSTGAKMQGVPLKHSGHLMKTNLRKGTMLPVFCVVEHYENAIEYDCKEEHAEFVLVRKDMLFNQLIEMALLSLGYSHSSAAQAKGLIQVGKWNPVPLSYVTDAPDATVADMLQDVYHVVTLKIQLHSCPKLEDLPPEQWSHTTVRNALKDLLKDMNQSSLAKECPLSQSMISSIVNSTYYANVSAAKCQEFGRWYKHFKKTKDMMVEMDSLSELSQQGANHVNFGQQPVPGNTAEQPPSPAQLSHGSQPSVRTPLPNLHPGLVSTPISPQLVNQQLVMAQLLNQQYAVNRLLAQQSLNQQYLNHPPPVSRSMNKPLEQQVSTNTEVSSEIYQWVRDELKRAGISQAVFARVAFNRTQGLLSEILRKEEDPKTASQSLLVNLRAMQNFLQLPEAERDRIYQDERERSLNAASAMGPAPLISTPPSRPPQVKTATIATERNGKPENNTMNINASIYDEIQQEMKRAKVSQALFAKVAATKSQGWLCELLRWKEDPSPENRTLWENLSMIRRFLSLPQPERDAIYEQESNAVHHHGDRPPHIIHVPAEQIQQQQQQQQQQQQQQQAPPPPQPQQQPQTGPRLPPRQPTVASPAESDEENRQKTRPRTKISVEALGILQSFIQDVGLYPDEEAIQTLSAQLDLPKYTIIKFFQNQRYYLKHHGKLKDNSGLEVDVAEYKEEELLKDLEESVQDKNTNTLFSVKLEEELSVEGNTDINTDLKD

SEQ ID NO: 1197 - protein, 795 aa, Homo sapiens
MDHLNEATQGKEHSEMSNNVSDPKGPPAKIARLEQNGSPLGRGRLGSTGAKMQGVPLKHSGHLMKTNLRKGTMLPVFCVVEHYENAIEYDCKEEHAEFVLVRKDMLFNQLIEMALLSLGYSHSSAAQAKGLIQVGKWNPVPLSYVTDAPDATVADMLQDVYHVVTLKIQLHSCPKLEDLPPEQWSHTTVRNALKDLLKDMNQSSLAKECPLSQSMISSIVNSTYYANVSAAKCQEFGRWYKHFKKTKDMMVEMDSLSELSQQGANHVNFGQQPVPGNTAEQPPSPAQLSHGSQPSVRTPLPNLHPGLVSTPISPQLVNQQLVMAQLLNQQYAVNRLLAQQSLNQQYLNHPPPVSRSMNKPLEQQVSTNTEVSSEIYQWVRDELKRAGISQAVFARVAFNRTQGLLSEILRKEEDPKTASQSLLVNLRAMQNFLQLPEAERDRIYQDERERSLNAASAMGPAPLISTPPSRPPQVKTATIATERNGKPENNTMNINASIYDEIQQEMKRAKVSQALFAKVAATKSQGWLCELLRWKEDPSPENRTLWENLSMIRRFLSLPQPERDAIYEQESNAVHHHGDRPPHIIHVPAEQIQSPSPTTLGKGESRGVFLPGLPTPAPWLGAAPQQQQQQQQQQQQQQQAPPPPQPQQQPQTGPRLPPRQPTVASPAESDEENRQKTRPRTKISVEALGILQSFIQDVGLYPDEEAIQTLSAQLDLPKYTIIKFFQNQRYYLKHHGKLKDNSGLEVDVAEYKEEELLKDLEESVQDKNTNTLFSVKLEEELSVEGNTDINTDLKD

SEQ ID NO: 1198 - protein, 228 aa, Homo sapiens
MPGAGDGGKAPARWLGTGLLGLFLLPVTLSLEVSVGKATDIYAVNGTEILLPCTFSSCFGFEDLHFRWTYNSSDAFKILIEGTVKNEKSDPKVTLKDDDRITLVGSTKEKMNNISIVLRDLEFSDTGKYTCHVKNPKENNLQHHATIFLQVVDRLEEVDNTVTLIILAVVGGVIGLLILILLIKKLIIFILKKTREKKKECLVSSSGNDNTENGLPGSKAEEKPPSKV

SEQ ID NO: 1199 - protein, 118 aa, Homo sapiens
MNNISIVLRDLEFSDTGKYTCHVKNPKENNLQHHATIFLQVVDRLEEVDNTVTLIILAVVGGVIGLLILILLIKKLIIFILKKTREKKKECLVSSSGNDNTENGLPGSKAEEKPPSKV

SEQ ID NO: 1200 - protein, 94 aa, Homo sapiens
MPGAGDGGKAPARWLGTGLLVEEVDNTVTLIILAVVGGVIGLLILILLIKKLIIFILKKTREKKKECLVSSSGNDNTENGLPGSKAEEKPPSKV

SEQ ID NO: 1201 - protein, 862 aa, Homo sapiens
MRMCTPIRGLLMALAVMFGTAMAFAPIPRITWEHREVHLVQFHEPDIYNYSALLLSEDKDTLYIGAREAVFAVNALNISEKQHEVYWKVSEDKKAKCAEKGKSKQTECLNYIRVLQPLSATSLYVCGTNAFQPACDHLNLTSFKFLGKNEDGKGRCPFDPAHSYTSVMVDGELYSGTSYNFLGSEPIISRNSSHSPLRTEYAIPWLNEPSFVFADVIRKSPDSPDGEDDRVYFFFTEVSVEYEFVFRVLIPRIARVCKGDQGGLRTLQKKWTSFLKARLICSRPDSGLVFNVLRDVFVLRSPGLKVPVFYALFTPQLNNVGLSAVCAYNLSTAEEVFSHGKYMQSTTVEQSHTKWVRYNGPVPKPRPGACIDSEARAANYTSSLNLPDKTLQFVKDHPLMDDSVTPIDNRPRLIKKDVNYTQIVVDRTQALDGTVYDVMFVSTDRGALHKAISLEHAVHIIEETQLFQDFEPVQTLLLSSKKGNRFVYAGSNSGVVQAPLAFCGKHGTCEDCVLARDPYCAWSPPTATCVALHQTESPSRGLIQEMSGDASVCPDKSKGSYRQHFFKHGGTAELKCSQKSNLARVFWKFQNGVLKAESPKYGLMGRKNLLIFNLSEGDSGVYQCLSEERVKNKTVFQVVAKHVLEVKVVPKPVVAPTLSVVQTEGSRIATKVLVASTQGSSPPTPAVQATSSGAITLPPKPAPTGTSCEPKIVINTVPQLHSEKTMYLKSSDNRLLMSLFLFFFVLFLCLFFYNCYKGYLPRQCLKFRSALLIGKKKPKSDFCDREQSLKETLVEPGSFSQQNGEHPKPALDTGYETEQDTITSKVPTDREDSQRIDDLSARDKPFDVKCELKFADSDADGD

SEQ ID NO: 1202 - protein, 738 aa, Homo sapiens
MRMCTPIRGLLMALAVMFGTAMAFAPIPRITWEHREVHLVQFHEPDIYNYSALLLSEDKDTLYIGAREAVFAVNALNISEKQHEVYWKVSEDKKAKCAEKGKSKQTECLNYIRVLQPLSATSLYVCGTNAFQPACDHLNLTSFKFLGKNEDGKGRCPFDPAHSYTSVMVDGELYSGTSYNFLGSEPIISRNSSHSPLRTEYAIPWLNEPSFVFADVIRKSPDSPDGEDDRVYFFFTEVSVEYEFVFRVLIPRIARVCKGDQGGLRTLQKKWTSFLKARLICSRPDSGLVFNVLRDVFVLRSPGLKVPVFYALFTPQLNNVGLSAVCAYNLSTAEEVFSHGKYMQSTTVEQSHTKWVRYNGPVPKPRPGACIDSEARAANYTSSLNLPDKTLQFVKDHPLMDDSVTPIDNRPRLIKKDVNYTQIVVDRTQALDGTVYDVMFVSTDRGALHKAISLEHAVHIIEETQLFQDFEPVQTLLLSSKKGNRFVYAGSNSGVVQAPLAFCGKHGTCEDCVLARDPYCAWSPPTATCVALHQTESPSRGLIQEMSGDASVCPASSPKPLPPPGSSSLSCLGHVGDRRLSSPWTPWPASGAGPDSSSRVSLLPPFLSDQAQHVHALGNFYLFCQATGPADIRFVWEKNGRALETCVPVQTHALPDGRAHALSWLQDAIRESAEYRCSVLSSAGNKTSKVQVAVMRPEVTHQERWTRELSAWRAVAGEHDRMMQSWRKAWESCSKDTL

SEQ ID NO: 1203 - protein, 122 aa, Homo sapiens
MANSLLEGVFAEVKEPCSLPMLSVDMENKENGSVGVKNSMENGRPPDPADWAVMDVVNYFRTVGFEEQASAFQEQEIDGKSLLLMTRNDVLTGLQLKLGPALKIYEYHVKPLQTKHLKNNSS

SEQ ID NO: 1204 - protein, 116 aa, Homo sapiens
MRGVAEVKEPCSLPMLSVDMENKENGSVGVKNSMENGRPPDPADWAVMDVVNYFRTVGFEEQASAFQEQEIDGKSLLLMTRNDVLTGLQLKLGPALKIYEYHVKPLQTKHLKNNSS

SEQ ID NO: 1205 - protein, 92 aa, Homo sapiens
MRSCLMPGNEMSMTSPEGTEPKGKQRRWQRQKTFGGGTMHSQDSQEIDGKSLLLMTRNDVLTGLQLKLGPALKIYEYHVKPLQTKHLKNNSS

SEQ ID NO: 1206 - protein, 102 aa, Homo sapiens
MLSVDMENKENGSVGVKNSMENGRPPDPADWAVMDVVNYFRTVGFEEQASAFQEQEIDGKSLLLMTRNDVLTGLQLKLGPALKIYEYHVKPLQTKHLKNNSS

SEQ ID NO: 1207 - protein, 838 aa, Homo sapiens
MWGRLWPLLLSILTATAVPGPSLRRPSRELDATPRMTIPYEELSGTRHFKGQAQNYSTLLLEEASARLLVGARGALFSLSANDIGDGAHKEIHWEASPEMQSKCHQKGKNNQTECFNHVRFLQRLNSTHLYACGTHAFQPLCAAIDAEAFTLPTSFEEGKEKCPYDPARGFTGLIIDGGLYTATRYEFRSIPDIRRSRHPHSLRTEETPMHWLNDAEFVFSVLVRESKASAVGDDDKVYYFFTERATEEGSGSFTQSRSSHRVARVARVCKGDLGGKKILQKKWTSFLKARLICHIPLYETLRGVCSLDAETSSRTHFYAAFTLSTQWKTLEASAICRYDLAEIQAVFAGPYMEYQDGSRRWGRYEGGVPEPRPGSCITDSLRSQGYNSSQDLPSLVLDFVKLHPLMARPVVPTRGRPLLLKRNIRYTHLTGTPVTTPAGPTYDLLFLGTADGWIHKAVVLGSGMHIIEETQVFRESQSVENLVISLLQHSLYVGAPSGVIQLPLSSCSRYRSCYDCILARDPYCGWDPGTHACAAATTIANRTALIQDIERGNRGCESSRDTGPPPPLKTRSVLRGDDVLLPCDQPSNLARALWLLNGSMGLSDGQGGYRVGVDGLLVTDAQPEHSGNYGCYAEENGLRTLLASYSLTVRPATPAPAPKAPATPGAQLAPDVRLLYVLAIAALGGLCLILASSLLYVACLREGRRGRRRKYSLGRASRAGGSAVQLQTVSGQCPGEEDEGDDEGAGGLEGSCLQIIPGEGAPAPPPPPPPPPPAELTNGLVALPSRLRRMNGNSYVLLRQSNNGVPAGPCSFAEELSRILEKRKHTQLVEQLDESSV

SEQ ID NO: 1208 - protein, 843 aa, Homo sapiens
MWGRLWPLLLSILTATAVPGPSLRRPSRELDATPRMTIPYEELSGTRHFKGQAQNYSTLLLEEASARLLVGARGALFSLSANDIGDGAHKEIHWEASPEMQSKCHQKGKNNQTECFNHVRFLQRLNSTHLYACGTHAFQPLCAAIDAEAFTLPTSFEEGKEKCPYDPARGFTGLIIDGGLYTATRYEFRSIPDIRRSRHPHSLRTEETPMHWLNDAEFVFSVLVRESKASAVGDDDKVYYFFTERATEEGSGSFTQSRSSHRVARVARVCKGDLGGKKILQKKWTSFLKARLICHIPLYETLRGVCSLDAETSSRTHFYAAFTLSTQWKTLEASAICRYDLAEIQAVFAGPYMEYQDGSRRWGRYEGGVPEPRPGSCITDSLRSQGYNSSQDLPSLVLDFVKLHPLMARPVVPTRGRPLLLKRNIRYTHLTGTPVTTPAGPTYDLLFLGTADGWIHKAVVLGSGMHIIEETQVFRESQSVENLVISLLQHSLYVGAPSGVIQLPLSSCSRYRSCYDCILARDPYCGWDPGTHACAAATTIANRSQGSRTALIQDIERGNRGCESSRDTGPPPPLKTRSVLRGDDVLLPCDQPSNLARALWLLNGSMGLSDGQGGYRVGVDGLLVTDAQPEHSGNYGCYAEENGLRTLLASYSLTVRPATPAPAPKAPATPGAQLAPDVRLLYVLAIAALGGLCLILASSLLYVACLREGRRGRRRKYSLGRASRAGGSAVQLQTVSGQCPGEEDEGDDEGAGGLEGSCLQIIPGEGAPAPPPPPPPPPPAELTNGLVALPSRLRRMNGNSYVLLRQSNNGVPAGPCSFAEELSRILEKRKHTQLVEQLDESSV

SEQ ID NO: 1209 - protein, 702 aa, Homo sapiens
MWGRLWPLLLSILTATAVPGPSLRRPSRELDATPRMTIPYEELSGTRHFKGQAQNYSTLLLEEASARLLVGARGALFSLSANDIGDGAHKEIHWEASPEMQSKCHQKGKNNQTECFNHVRFLQRLNSTHLYACGTHAFQPLCAAIDAEAFTLPTSFEEGKEKCPYDPARGFTGLIIDGGLYTATRYEFRSIPDIRRSRHPHSLRTEETPMHWLNDAEFVFSVLVRESKASAVGDDDKVYYFFTERATEEGSGSFTQSRSSHRVARVARVCKGDLGGKKILQKKWTSFLKARLICHIPLYETLRGVCSLDAETSSRTHFYAAFTLSTQWKTLEASAICRYDLAEIQAVFAGPYMEYQDGSRRWGRYEGGVPEPRPGSCITDSLRSQGYNSSQDLPSLVLDFVKLHPLMARPVVPTRGRPLLLKRNIRYTHLTGTPVTTPAGPTYDLLFLGTADGWIHKAVVLGSGMHIIEETQVFRESQSVENLVISLLQHSLYVGAPSGVIQLPLSSCSRYRSCYDCILARDPYCGWDPGTHACAAATTIANRSQGSRTALIQDIERGNRGCESSRDTGRALQVHMGSMSPPSAWPCVLDGPETRQDLCQPPKPCVHSHAHMEECLSAGLQCPHPHLLLVHSCFIPASGLGVPSQLPHPIWSSSPAPCGDLFVKSLGTGQPGEVRLHHSPPLPSCVALVNQPPHSPWSFSRV

SEQ ID NO: 1210 - protein, 521 aa, Homo sapiens
MEASVLSPTSWEKRRAWLRQSRNWQTQVLEEEAAAALQDVPDPEPSSLDDVFQEGNPINKIEDWLQDCGYSEEGFSEEAGQFIYNGFCSHGTSFEDDLTLGAEATLLAANGKLFSRSFLETARPCQLLDLGCSLASSSMTGGTNKTSSSISEILDKVQEDAEDVLFSLGFGQEDHKDTSRIPARFFTTPSQAKGIDFQLFLKSQVRRIEMEDPCLMLASRFKQVQTLAVTADAFFCLYSYVSKTPVQKFTPSHMFWNCNHPTDVPSIRILSREPEPQSPRDRLRKAISKMCLYTCPRDRPPPPHNTPKRNSLDQVVLEVMDKVKEEKQFLQQDSDLGQFSQEDPVPPAEGKKLPTSPYPCVFCCEEETQQRMSTVLAPSQTLDSNPKVPCCTHSLPIEDPQWSTDPAQIRRELCSLPATNTETHPAKDETFWKRKSRARKSLFQKNLMGRKVKSLDLSITQQKWKQSVDRPELRRSLSQQPQDTFDLEEVQSNSEEEQSQSRWPSRPRHPHHHQTFAGKDS

SEQ ID NO: 1211 - protein, 383 aa, Homo sapiens
MTGGTNKTSSSISEILDKVQEDAEDVLFSLGFGQEDHKDTSRIPARFFTTPSQAKGIDFQLFLKSQVRRIEMEDPCLMLASRFKQVQTLAVTADAFFCLYSYVSKTPVQKFTPSHMFWNCNHPTDVPSIRILSREPEPQSPRDRLRKAISKMCLYTCPRDRPPPPHNTPKRNSLDQVVLEVMDKVKEEKQFLQQDSDLGQFSQEDPVPPAEGKKLPTSPYPCVFCCEEETQQRMSTVLAPSQTLDSNPKVPCCTHSLPIEDPQWSTDPAQIRRELCSLPATNTETHPAKDETFWKRKSRARKSLFQKNLMGRKVKSLDLSITQQKWKQSVDRPELRRSLSQQPQDTFDLEEVQSNSEEEQSQSRWPSRPRHPHHHQTFAGKDS

SEQ ID NO: 1212 - protein, 394 aa, Homo sapiens
MTGGTNKTSSSISEILDKVQEDAEDVLFSLGFGQEDHKDTSRIPARFFTTPSQAKGIDFQLFLKSQVRRIEMEDPCLMLASRFKQVQTLAVTADAFFCLYSYVSKTPVQKFTPSHMFWNCNHPTDVPSIRILSREPEPQSPRDRLRKAISKMCLYTCPRDRPPPPHNTPKRNSLDQVVLEVMDKVKEEKQFLQQDSDLGQFSQEDPVPPAEGKKLPTSPYPCVFCCEEETQQRMSTVLAPSQTLDSNPKVPCCTHSLPIEDPQWSTDPAQIRRELCSLPATNTETHPAKDETFWKRKSRARKSLFQKNLMGRKVKSLDLSITQQKWKQSVDRPELRRSLSQQPQDTFDLEEVQSNSEEEQSQSRWPSRPRHPHHHQTFAGKFVKLSPPPQQHVV

SEQ ID NO: 1213 - protein, 666 aa, Homo sapiens
MTPPPPGRAAPSAPRARVPGPPARLGLPLRLRLLLLLWAAAASAQGHLRSGPRIFAVWKGHVGQDRVDFGQTEPHTVLFHEPGSSSVWVGGRGKVYLFDFPEGKNASVRTVNIGSTKGSCLDKRDCENYITLLERRSEGLLACGTNARHPSCWNLVNGTVVPLGEMRGYAPFSPDENSLVLFEGDEVYSTIRKQEYNGKIPRFRRIRGESELYTSDTVMQNPQFIKATIVHQDQAYDDKIYYFFREDNPDKNPEAPLNVSRVAQLCRGDQGGESSLSVSKWNTFLKAMLVCSDAATNKNFNRLQDVFLLPDPSGQWRDTRVYGVFSNPWNYSAVCVYSLGDIDKVFRTSSLKGYHSSLPNPRPGKCLPDQQPIPTETFQVADRHPEVAQRVEPMGPLKTPLFHSKYHYQKVAVHRMQASHGETFHVLYLTTDRGTIHKVVEPGEQEHSFAFNIMEIQPFRRAAAIQTMSLDAERRKLYVSSQWEVSQVPLDLCEVYGGGCHGCLMSRDPYCGWDQGRCISIYSSERSVLQSINPAEPHKECPNPKPDKAPLQKVSLAPNSRYYLSCPMESRHATYSWRHKENVEQSCEPGHQSPNCILFIENLTAQQYGHYFCEAQEGSYFREAQHWQLLPEDGIMAEHLLGHACALAASLWLGVLPTLTLGLLVH

SEQ ID NO: 1214 - protein, 652 aa, Homo sapiens
MTPPPPGRAAPSAPRARVPGPPARLGLPLRLRLLLLLWAAAASAQGHLRSGPRIFAVWKGHVGQDRVDFGQTEPHTVLFHEPGSSSVWVGGRGKVYLFDFPEGKNASVRTDCENYITLLERRSEGLLACGTNARHPSCWNLVNGTVVPLGEMRGYAPFSPDENSLVLFEGDEVYSTIRKQEYNGKIPRFRRIRGESELYTSDTVMQNPQFIKATIVHQDQAYDDKIYYFFREDNPDKNPEAPLNVSRVAQLCRGDQGGESSLSVSKWNTFLKAMLVCSDAATNKNFNRLQDVFLLPDPSGQWRDTRVYGVFSNPWNYSAVCVYSLGDIDKVFRTSSLKGYHSSLPNPRPGKCLPDQQPIPTETFQVADRHPEVAQRVEPMGPLKTPLFHSKYHYQKVAVHRMQASHGETFHVLYLTTDRGTIHKVVEPGEQEHSFAFNIMEIQPFRRAAAIQTMSLDAERRKLYVSSQWEVSQVPLDLCEVYGGGCHGCLMSRDPYCGWDQGRCISIYSSERSVLQSINPAEPHKECPNPKPDKAPLQKVSLAPNSRYYLSCPMESRHATYSWRHKENVEQSCEPGHQSPNCILFIENLTAQQYGHYFCEAQEGSYFREAQHWQLLPEDGIMAEHLLGHACALAASLWLGVLPTLTLGLLVH

SEQ ID NO: 1215 - protein, 415 aa, Homo sapiens
MAGPNQLCIRRWTTKHVAVWLKDEGFFEYVDILCNKHRLDGITLLTLTEYDLRSPPLEIKVLGDIKRLMLSVRKLQKIHIDVLEEMGYNSDSPMGSMTPFISALQSTDWLCNGELSHDCDGPITDLNSDQYQYMNGKNKHSVRRLDPEYWKTILSCIYVFIVFGFTSFIMVIVHERVPDMQTYPPLPDIFLDSVPRIPWAFAMTEVCGMILCYIWLLVLLLHKHRSILLRRLCSLMGTVFLLRCFTMFVTSLSVPGQHLQCTGKIYGSVWEKLHRAFAIWSGFGMTLTGVHTCGDYMFSGHTVVLTMLNFFVTEYTPRSWNFLHTLSWVLNLFGIFFILAAHEHYSIDVFIAFYITTRLFLYYHTLANTRAYQQSRRARIWFPMFSFFECNVNGTVPNEYCWPFSKPAIMKRLIG

SEQ ID NO: 1216 - protein, 326 aa, Homo sapiens
MAGPNQLCIRRWTTKHVAVWLKDEGFFEYVDILCNKHRLDGITLLTLTEYDLRSPPLEIKVLGDIKRLMLSVRKLQKIHIDVLEEMGYNSDSPMGSMTPFISALQSTDWLCNGELSHDCDGPITDLNSDQYQYMNGKNKHSVRRLDPEYWKTILSCIYVFIVFGFTSFIMVIVHERVPDMQTYPPLPDIFLDSVPRIPWAFAMTEVCGMILCYIWLLVLLLHKHRSILLRRLCSLMGTVFLLRCFTMFVTSLSVPGQHLQCTGKIYGSVWEKLHRAFAIWSGFGMTLTGVHTCGDYMFSGHTVVLTMLNFFVTECKYLFSASMRIR

SEQ ID NO: 1217 - protein, 672 aa, Homo sapiens
MEEHTEAGSAPEMGAQKALIDNPADILVIAAYFLLVIGVGLWSMCRTNRGTVGGYFLAGRSMVWWPVGASLFASNIGSGHFVGLAGTGAASGLAVAGFEWNALFVVLLLGWLFAPVYLTAGVITMPQYLRKRFGGRRIRLYLSVLSLFLYIFTKISVDMFSGAVFIQQALGWNIYASVIALLGITMIYTVTGGLAALMYTDTVQTFVILGGACILMGYAFHEVGGYSGLFDKYLGAATSLTVSEDPAVGNISSFCYRPRPDSYHLLRHPVTGDLPWPALLLGLTIVSGWYWCSDQVIVQRCLAGKSLTHIKAGCILCGYLKLTPMFLMVMPGMISRILYPDEVACVVPEVCRRVCGTEVGCSNIAYPRLVVKLMPNGLRGLMLAVMLAALMSSLASIFNSSSTLFTMDIYTRLRPRAGDRELLLVGRLWVVFIVVVSVAWLPVVQAAQGGQLFDYIQAVSSYLAPPVSAVFVLALFVPRVNEQGAFWGLIGGLLMGLARLIPEFSFGSGSCVQPSACPAFLCGVHYLYFAIVLFFCSGLLTLTVSLCTAPIPRKHLHRLVFSLRHSKEEREDLDADEQQGSSLPVQNGCPESAMEMNEPQAPAPSLFRQCLLWFCGMSRGGVGSPPPLTQEEAAAAARRLEDISEDPSWARVVNLNALLMMAVAVFLWGFYA

SEQ ID NO: 1218 - protein, 458 aa, Homo sapiens
MEEHTEAGSAPEMGAQKALIDNPADILVIAAYFLLVIGVGLWSMCRTNRGTVGGYFLAGRSMVWWPVGASLFASNIGSGHFVGLAGTGAASGLAVAGFEWNALFVVLLLGWLFAPVYLTAGVITMPQYLRKRFGGRRIRLYLSVLSLFLYIFTKISVDMFSGAVFIQQALGWNIYASVIALLGITMIYTVTGGLAALMYTDTVQTFVILGGACILMGYAFHEVGGYSGLFDKYLGAATSLTVSEDPAVGNISSFCYRPRPDSYHLLRHPVTGDLPWPALLLGLTIVSGWYWCSDQVIVQRCLAGKSLTHIKAGCILCGYLKLTPMFLMVMPGMISRILYPDEVACVVPEVCRRVCGTEVGCSNIAYPRLVVKLMPNGRLLGTHRGPADGPGTPDSRVLLRLGQLCAALGVPSFPLRRALPLLRHCAVLLLWPPHPHGLPVHRAHPQKAPPPPGLQSPA

SEQ ID NO: 1219 - protein, 470 aa, Homo sapiens
MSLLGRDYNSELNSLDNGPQSPSESSSSITSENVHPAGEAGLSMMQTLIHLLKCNIGTGLLGLPLAIKNAGLLVGPVSLLAIGVLTVHCMVILLNCAQHLSQRLQKTFVNYGEATMYGLETCPNTWLRAHAVWGRYTVSFLLVITQLGFCSVYFMFMADNLQQMVEKAHVTSNICQPREILTLTPILDIRFYMLIILPFLILLVFIQNLKVLSVFSTLANITTLGSMALIFEYIMEGIPYPSNLPLMANWKTFLLFFGTAIFTFEGVGMVLPLKNQMKHPQQFSFVLYLGMSIVIILYILLGTLGYMKFGSDTQASITLNLPNCWLYQSVKLMYSIGIFFTYALQFHVPAEIIIPFAISQVSESWALFVDLSVRSALVCLTCVSAILIPRLDLVISLVGSVSSSALALIIPALLEIVIFYSEDMSCVTIAKDIMISIVGLLGCIFGTYQALYELPQPISHSMANSTGVHA

SEQ ID NO: 1220 - protein, 455 aa, Homo sapiens
MGVIISGSLPPFSSPLQVGPVSLLAIGVLTVHCMVILLNCAQHLSQRLQKTFVNYGEATMYGLETCPNTWLRAHAVWGRWNLALSPRLECSGKISAHCNPHLQGSSNSPAQASRVAGIYRYTVSFLLVITQLGFCSVYFMFMADNLQQMVEKAHVTSNICQPREILTLTPILDIRFYMLIILPFLILLVFIQNLKVLSVFSTLANITTLGSMALIFEYIMEGIPYPSNLPLMANWKTFLLFFGTAIFTFEGVGMVLPLKNQMKHPQQFSFVLYLGMSIVIILYILLGTLGYMKFGSDTQASITLNLPNCWLYQSVKLMYSIGIFFTYALQFHVPAEIIIPFAISQVSESWALFVDLSVRSALVCLTCVSAILIPRLDLVISLVGSVSSSALALIIPALLEIVIFYSEDMSCVTIAKDIMISIVGLLGCIFGTYQALYELPQPISHSMANSTGVHA

SEQ ID NO: 1221 - protein, 511 aa, Homo sapiens
MSLLGRDYNSELNSLDNGPQSPSESSSSITSENVHPAGEAGLSMMQTLIHLLKCNIGTGLLGLPLAIKNAGLLVGPVSLLAIGVLTVHCMVILLNCAQHLSQRLQKTFVNYGEATMYGLETCPNTWLRAHAVWGRWNLALSPRLECSGKISAHCNPHLQGSSNSPAQASRVAGIYRYTVSFLLVITQLGFCSVYFMFMADNLQQMVEKAHVTSNICQPREILTLTPILDIRFYMLIILPFLILLVFIQNLKVLSVFSTLANITTLGSMALIFEYIMEGIPYPSNLPLMANWKTFLLFFGTAIFTFEGVGMVLPLKNQMKHPQQFSFVLYLGMSIVIILYILLGTLGYMKFGSDTQASITLNLPNCWLYQSVKLMYSIGIFFTYALQFHVPAEIIIPFAISQVSESWALFVDLSVRSALVCLTCVSAILIPRLDLVISLVGSVSSSALALIIPALLEIVIFYSEDMSCVTIAKDIMISIVGLLGCIFGTYQALYELPQPISHSMANSTGVHA

SEQ ID NO: 1222 - protein, 297 aa, Homo sapiens
MMDSEAHEKRPPILTSSKQDISPHITNVGEMKHYLCGCCAAFNNVAITFPIQKVLFRQQLYGIKTRDAILQLRRDGFRNLYRGILPPLMQKTTTLALMFGLYEDLSCLLHKHVSAPEFATSGVAAVLAGTTEAIFTPLERVQTLLQDHKHHDKFTNTYQAFKALKCHGIGEYYRGLVPILFRNGLSNVLFFGLRGPIKEHLPTATTHSAHLVNDFICGGLLGAMLGFLFFPINVVKTRIQSQIGGEFQSFPKVFQKIWLERDRKLINLFRGAHLNYHRSLISWGIINATYEFLLKVI

SEQ ID NO: 1223 - protein, 505 aa, Homo sapiens
MASGRRAPRTGLLELRAGAGSGAGGERWQRVLLSLAEDVLTVSPADGDPGPEPGAPREQEPAQLNGAAEPGAGPPQLPEALLLQRRRVTVRKADAGGLGISIKGGRENKMPILISKIFKGLAADQTEALFVGDAILSVNGEDLSSATHDEAVQVLKKTGKEVVLEVKYMKDVSPYFKNSTGGTSVGWDSPPASPLQRQPSSPGPTPRNFSEAKHMSLKMAYVSKRCTPNDPEPRYLEICSADGQDTLFLRAKDEASARSWATAIQAQVNTLTPRVKDELQALLAATSTAGSQDIKQIGWLTEQLPSGGTAPTLALLTEKELLLYLSLPETREALSRPARTAPLIATRLVHSGPSKGSVPYDAELSFALRTGTRHGVDTHLFSVESPQELAAWTRQLVDGCHRAAEGVQEVSTACTWNGRPCSLSVHIDKGFTLWAAEPGAARAVLLRQPFEKLQMSSDDGASLLFLDFGGAEGEIQLDLHSCPKTIVFIIHSFLSAKVTRLGLLA

SEQ ID NO: 1224 - protein, 430 aa, Homo sapiens
MASGRRAPRTGLLELRAGAGSGAGGERWQRVLLSLAEDVLTVSPADGDPGPEPGAPREQEPAQLNGAAEPGAGPPQLPEALLLQRRRVTVRKADAGGLGISIKGGRENKMPILISKIFKGLAADQTEALFVGDAILSVNGEDLSSATHDEAVQVLKKTGKEVVLEVKYMKDVSPYFKNSTGGTSVGWDSPPASPLQRQPSSPGPTPRNFSEAKHMSLKMAYVSKRCTPNDPEPRYLEICSADGQDTLFLRAKDETREALSRPARTAPLIATRLVHSGPSKGSVPYDAELSFALRTGTRHGVDTHLFSVESPQELAAWTRQLVDGCHRAAEGVQEVSTACTWNGRPCSLSVHIDKGFTLWAAEPGAARAVLLRQPFEKLQMSSDDGASLLFLDFGGAEGEIQLDLHSCPKTIVFIIHSFLSAKVTRLGLLA

SEQ ID NO: 1225 - protein, 304 aa, Homo sapiens
MSSIKHLVYAVIRFLREQSQMDTYTSDEQESLEVAIQCLETVFKISPEDTHLAVSQPLTEMFTSSFCKNDVLPLSNSVPEDVGKADQLKDEGNNHMKEENYAAAVDCYTQAIELDPNNAVYYCNRAAAQSKLGHYTDAIKDCEKAIAIDSKYSKAYGRMGLALTALNKFEEAVTSYQKALDLDPENDSYKSNLKIAEQKLREVSSPTGTGLSFDMASLINNPAFISMAASLMQNPQVQQLMSGMMTNAIGGPAAGVGGLTDLSSLIQAGQQFAQQIQQQNPELIEQLRNHIRSRSFSSSAEEHS

SEQ ID NO: 1226 - protein, 702 aa, Homo sapiens
MDQHQHLNKTAESASSEKKKTRRCNGFKMFLAALSFSYIAKALGGIIMKISITQIERRFDISSSLAGLIDGSFEIGNLLVIVFVSYFGSKLHRPKLIGIGCLLMGTGSILTSLPHFFMGYYRYSKETHINPSENSTSSLSTCLINQTLSFNGTSPEIVEKDCVKESGSHMWIYVFMGNMLRGIGETPIVPLGISYIDDFAKEGHSSLYLGSLNAIGMIGPVIGFALGSLFAKMYVDIGYVDLSTIRITPKDSRWVGAWWLGFLVSGLFSIISSIPFFFLPKNPNKPQKERKISLSLHVLKTNDDRNQTANLTNQGKNVTKNVTGFFQSLKSILTNPLYVIFLLLTLLQVSSFIGSFTYVFKYMEQQYGQSASHANFLLGIITIPTVATGMFLGGFIIKKFKLSLVGIAKFSFLTSMISFLFQLLYFPLICESKSVAGLTLTYDGNNSVASHVDVPLSYCNSECNCDESQWEPVCGNNGITYLSPCLAGCKSSSGIKKHTVFYNCSCVEVTGLQNRNYSAHLGECPRDNTCTRKFFIYVAIQVINSLFSATGGTTFILLTVKIVQPELKALAMGFQSMVIRTLGGILAPIYFGALIDKTCMKWSTNSCGAQGACRIYNSVFFGRVYLGLSIALRFPALVLYIVFIFAMKKKFQGKDTKASDNERKVMDEANLEFLNNGEHFVPSAGTDSKTCNLDMQDNAAAN

SEQ ID NO: 1227 - protein, 748 aa, Homo sapiens
MDQHQHLNKTAESASSEKKKTRRCNGFKMFLAALSFSYIAKALGGIIMKISITQIERRFDISSSLAGLIDGSFEIGNLLVIVFVSYFGSKLHRPKLIGIGCLLMGTGSILTSLPHFFMGYYRYSKETHINPSENSTSSLSTCLINQTLSFNGTSPEIVEKDCVKESGSHMWIYVFMGNMLRGIGETPIVPLGISYIDDFAKEGHSSLYLGSLNAIGMIGPVIGFALGSLFAKMYVDIGYVDLSTIRITPKDSRWVGAWWLGFLVSGLFSIISSIPFFFLPKNPNKPQKERKISLSLHVLKTNDDRNQTANLTNQGKNVTKNVTGFFQSLKSILTNPLYVIFLLLTLLQVSSFIGSFTYVFKYMEQQYGQSASHANFLLGIITIPTVATGMFLGGFIIKKFKLSLVGIAKFSFLTSMISFLFQLLYFPLICESKSVAGLTLTYDGNNSVASHVDVPLSYCNSECNCDESQWEPVCGNNGITYLSPCLAGCKSSSGIKKHTVFYNCSCVEVTGLQNRNYSAHLGECPRDNTCTRKFFIYVAIQVINSLFSATGGTTFILLTVKIVQPELKALAMGFQSMVIRTLGGILAPIYFGALIDKTCMKWSTNSCGAQGACRIYNSVFFGIVQPELKALAIGFHSMIMRSLGGILVPIYFGALIDTTCMKWSTNSCGARGACRIYNSTYLGRAFFGLKVALIFPVLVLLTVFIFVVRKKSHGKDTKVLENERQVMDEANLEFLNDSEHFVPSAEEQ

SEQ ID NO: 1228 - protein, 374 aa, Homo sapiens
MDDLCEANGTFAISLFKILGEEDNSRNVFFSPMSISSALAMVFMGAKGSTAAQMSQALCLYKDGDIHRGFQSLLSEVNRTGTQYLLRTANRLFGEKTCDFLPDFKEYCQKFYQAELEELSFAEDTEECRKHINDWVAEKTEGKISEVLDAGTVDPLTKLVLVNAIYFKGKWNEQFDRKYTRGMLFKTNEEKKTVQMMFKEAKFKMGYADEVHTQVLELPYVEEELSMVILLPDDNTDLAVVEKALTYEKFKAWTNSEKLTKSKVQVFLPRLKLEESYDLEPFLRRLGMIDAFDEAKADFSGMSTEKNVPLSKVAHKCFVEVNEEGTEAAAATAVVRNSRCSRMEPRFCADHPFLFFIRHHKTNCILFCGRFSSP

SEQ ID NO: 1229 - protein, 242 aa, Homo sapiens
MDDLCEANGTFAISLFKILGEEDNSRNVFFSPMSISSALAMVFMGAKGSTAAQMSQALCLYKDGDIHRGFQSLLSEVNRTGTQYLLRTANRLFGEKTCDFLPDFKEYCQKFYQAELEELSFAEDTEECRKHINDWVAEKTEGKISEVLDAGTVDPLTKLVLVNAIYFKGKWNEQFDRKYTRGMLFKTNEEKKTVQMMFKEAKFKMGYADEVHTQVLELPYVEEELSMVILLPDDNTDLAVKE

SEQ ID NO: 1230 - protein, 192 aa, Homo sapiens
MLFKTNEEKKTVQMMFKEAKFKMGYADEVHTQVLELPYVEEELSMVILLPDDNTDLAVVEKALTYEKFKAWTNSEKLTKSKVQVFLPRLKLEESYDLEPFLRRLGMIDAFDEAKADFSGMSTEKNVPLSKVAHKCFVEVNEEGTEAAAATAVVRNSRCSRMEPRFCADHPFLFFIRHHKTNCILFCGRFSSP

SEQ ID NO: 1231 - protein, 712 aa, Homo sapiens
MDTSSKENIQLFCKTSVQPVGRPSFKTEYPSSEEKQPCCGELKVFLCALSFVYFAKALAEGYLKSTITQIERRFDIPSSLVGVIDGSFEIGNLLVITFVSYFGAKLHRPKIIGAGCVIMGVGTLLIAMPQFFMEQYKYERYSPSSNSTLSISPCLLESSSQLPVSVMEKSKSKISNECEVDTSSSMWIYVFLGNLLRGIGETPIQPLGIAYLDDFASEDNAAFYIGCVQTVAIIGPIFGFLLGSLCAKLYVDIGFVNLDHITITPKDPQWVGAWWLGYLIAGIISLLAAVPFWYLPKSLPRSQSREDSNSSSEKSKFIIDDHTDYQTPQGENAKIMEMARDFLPSLKNLFGNPVYFLYLCTSTVQFNSLFGMVTYKPKYIEQQYGQSSSRANFVIGLINIPAVALGIFSGGIVMKKFRISVCGAAKLYLGSSVFGYLLFLSLFALGCENSDVAGLTVSYQGTKPVSYHERALFSDCNSRCKCSETKWEPMCGENGITYVSACLAGCQTSNRSGKNIIFYNCTCVGIAASKSGNSSGIVGRCQKDNGCPQMFLYFLVISVITSYTLSLGGIPGYILLLRCIKPQLKSFALGIYTLAIRVLAGIPAPVYFGVLIDTSCLKWGFKRCGSRGSCRLYDSNVFRHIYLGLTVILGTVSILLSIAVLFILKKNYVSKHRSFITKRERTMVSTRFQKENYTTSDHLLQPNYWPGKETQL

SEQ ID NO: 1232 - protein, 663 aa, Homo sapiens
MDTSSKENIQLFCKTSVQPVGRPSFKTEYPSSEEKQPCCGELKVFLCALSFVYFAKALAEGYLKSTITQIERRFDIPSSLVGVIDGSFEIGNLLVITFVSYFGAKLHRPKIIGAGCVIMGVGTLLIAMPQFFMEQYKYERYSPSSNSTLSISPCLLESSSQLPVSVMEKSKSKISNGCVQTVAIIGPIFGFLLGSLCAKLYVDIGFVNLDHITITPKDPQWVGAWWLGYLIAGIISLLAAVPFWYLPKSLPRSQSREDSNSSSEKSKFIIDDHTDYQTPQGENAKIMEMARDFLPSLKNLFGNPVYFLYLCTSTVQFNSLFGMVTYKPKYIEQQYGQSSSRANFVIGLINIPAVALGIFSGGIVMKKFRISVCGAAKLYLGSSVFGYLLFLSLFALGCENSDVAGLTVSYQGTKPVSYHERALFSDCNSRCKCSETKWEPMCGENGITYVSACLAGCQTSNRSGKNIIFYNCTCVGIAASKSGNSSGIVGRCQKDNGCPQMFLYFLVISVITSYTLSLGGIPGYILLLRCIKPQLKSFALGIYTLAIRVLAGIPAPVYFGVLIDTSCLKWGFKRCGSRGSCRLYDSNVFRHIYLGLTVILGTVSILLSIAVLFILKKNYVSKHRSFITKRERTMVSTRFQKENYTTSDHLLQPNYWPGKETQL

SEQ ID NO: 1233 - protein, 730 aa, Homo sapiens
MDTSSKENIQLFCKTSVQPVGRPSFKTEYPSSEEKQPCCGELKVFLCALSFVYFAKALAEGYLKSTITQIERRFDIPSSLVGVIDGSFEIGNLLVITFVSYFGAKLHRPKIIGAGCVIMGVGTLLIAMPQFFMEQYKYERYSPSSNSTLSISPCLLESSSQLPVSVMEKSKSKISNECEVDTSSSMWIYVFLGNLLRGIGETPIQPLGIAYLDDFASEDNAAFYIGCVQTVAIIGPIFGFLLGSLCAKLYVDIGFVNLDHITITPKDPQWVGAWWLGYLIAGIISLLAAVPFWYLPKSLPRSQSREDSNSSSEKSKFIIDDHTDYQTPQGENAKIMEMARDFLPSLKNLFGNPVYFLYLCTSTVQFNSLFGMVTYKPKYIEQQYGQSSSRANFVIGLINIPAVALGIFSGGIVMKKFRISVCGAAKLYLGSSVFGYLLFLSLFALGCENSDVAGLTVSYQGTKPVSYHERALFSDCNSRCKCSETKWEPMCGENGITYVSACLAGCQTSNRSGKNIIFYNCTCVGIAASKSGNSSGIVGRCQKDNGCPQMFLYFLVISVITSYTLSLGGIPGYILLLRCIKPQLKSFALGIYTLAIRVLAGIPAPVYFGVLIDTSCLKWGFKRCGSRGSCRLYDSNVFRYQIKSIPASHCYSIPDLHNATDTNKFSCHFTACKTYISGTNCDTGHSVNSPKHCSTFHFKEKLCFKTQKFYNQERKNNGVYKIPKGKLHYK

SEQ ID NO: 1234 - protein, 612 aa, Homo sapiens
MGVGTLLIAMPQFFMEQYKYERYSPSSNSTLSISPCLLESSSQLPVSVMEKSKSKISNECEVDTSSSMWIYVFLGNLLRGIGETPIQPLGIAYLDDFASEDNAAFYIGCVQTVAIIGPIFGFLLGSLCAKLYVDIGFVNLDHITITPKDPQWVGAWWLGYLIAGIISLLAAVPFWYLPKSLPRSQSREDSNSSSEKSKFIIDDHTDYQTPQGENAKIMEMARDFLPSLKNLFGNPVYFLYLCTSTVQFNSLFGMVTYKPKYIEQQYGQSSSRANFVIGLINIPAVALGIFSGGIVMKKFRISVCGAAKLYLGSSVFGYLLFLSLFALGCENSDVAGLTVSYQGTKPVSYHERALFSDCNSRCKCSETKWEPMCGENGITYVSACLAGCQTSNRSGKNIIFYNCTCVGIAASKSGNSSGIVGRCQKDNGCPQMFLYFLVISVITSYTLSLGGIPGYILLLRCIKPQLKSFALGIYTLAIRVLAGIPAPVYFGVLIDTSCLKWGFKRCGSRGSCRLYDSNVFRYQIKSIPASHCYSIPDLHNATDTNKFSCHFTACKTYISGTNCDTGHSVNSPKHCSTFHFKEKLCFKTQKFYNQERKNNGVYKIPKGKLHYK

SEQ ID NO: 1235 - protein, 132 aa, Homo sapiens
MDVFQEGLAMVVQDPLLCDLPIQVTLEEVNSQIALEYGQAMTVRVCKMDGEVMPVVVVQSATVLDLKKAIQRYVQLKQEREGGIQHISWSYVWRTYHLTSAGEKLTEDRKKLRDYGIRNRDEVSFIKKLRQK

SEQ ID NO: 1236 - protein, 428 aa, Homo sapiens
MEPLKVEKFATAKRGNGLRAVTPLRPGELLFRSDPLAYTVCKGSRGVVCDRCLLGKEKLMRCSQCRVAKYCSAKCQKKAWPDHKRECKCLKSCKPRYPPDSVRLLGRVVFKLMDGAPSESEKLYSFYDLESNINKLTEDKKEGLRQLVMTFQHFMREEIQDASQLPPAFDLFEAFAKVICNSFTICNAEMQEVGVGLYPSISLLNHSCDPNCSIVFNGPHLLLRAVRDIEVGEELTICYLDMLMTSEERRKQLRDQYCFECDCFRCQTQDKDADMLTGDEQVWKEVQESLKKIEELKAHWKWEQVLAMCQAIISSNSERLPDINIYQLKVLDCAMDACINLGLLEEALFYGTRTMEPYRIFFPGSHPVRGVQVMKVGKLQLHQGMFPQAMKNLRLAFDIMRVTHGREHSLIEDLILLLEECDANIRAS

SEQ ID NO: 1237 - protein, 258 aa, Homo sapiens
MEEEEEKVICNSFTICNAEMQEVGVGLYPSISLLNHSCDPNCSIVFNGPHLLLRAVRDIEVGEELTICYLDMLMTSEERRKQLRDQYCFECDCFRCQTQDKDADMLTGDEQVWKEVQESLKKIEELKAHWKWEQVLAMCQAIISSNSERLPDINIYQLKVLDCAMDACINLGLLEEALFYGTRTMEPYRIFFPGSHPVRGVQVMKVGKLQLHQGMFPQAMKNLRLAFDIMRVTHGREHSLIEDLILLLEECDANIRAS

SEQ ID NO: 1238 - protein, 369 aa, Homo sapiens
MRCSQCRVAKYCSAKCQKKAWPDHKRECKCLKSCKPRYPPDSVRLLGRVVFKLMDGAPSESEKLYSFYDLESNINKLTEDKKEGLRQLVMTFQHFMREEIQDASQLPPAFDLFEAFAKVICNSFTICNAEMQEVGVGLYPSISLLNHSCDPNCSIVFNGPHLLLRAVRDIEVGEELTICYLDMLMTSEERRKQLRDQYCFECDCFRCQTQDKDADMLTGDEQVWKEVQESLKKIEELKAHWKWEQVLAMCQAIISSNSERLPDINIYQLKVLDCAMDACINLGLLEEALFYGTRTMEPYRIFFPGSHPVRGVQVMKVGKLQLHQGMFPQAMKNLRLAFDIMRVTHGREHSLIEDLILLLEECDANIRAS

SEQ ID NO: 1239 - protein, 549 aa, Homo sapiens
MDVVEVAGSWWAQEREDIIMKYEKGHRAGLPEDKGPKPFRSYNNNVDHLGIVHETELPPLTAREAKQIRREISRKSKWVDMLGDWEKYKSSRKLIDRAYKGMPMNIRGPMWSVLLNTEEMKMKNPGRYQIMKEKGKRSSEHIQRIDRDVSGTLRKHIFFRDRYGTKQRELLHILLAYEEYNPEVGYCRDLSHIAALFLLYLPEEDAFWALVQLLASERHSLQGFHSPNGGTVQGLQDQQEHVVATSQPKTMGHQDKKDLCGQCSPLGCLIRILIDGISLGLTLRLWDVYLVEGEQALMPITRIAFKVQQKRLTKTSRCGPWARFCNRFVDTWARDEDTVLKHLRASMKKLTRKQGDLPPPAKPEQGSSASRPVPASRGGKTLCKGDRQAPPGPPARFPRPIWSASPPRAPRSSTPCPGGAVREDTYPVGTQGVPSPALAQGGPQGSWRFLQWNSMPRLPTDLDVEGPWFRHYDFRQSCWVRAISQEDQLAPCWQAEHPAERVRSAFAAPSTDSDQGTPFRARDEQQCAPTSGPCLCGLHLESSQFPPGF

SEQ ID NO: 1240 - protein, 490 aa, Homo sapiens
MLAATCNKIGSPSPSPSSLSDSSSSFGKGFHPWKRSSSSSSASCNVVGSSLSSFGVSGASRNGGSSSAAAAAAAAAAAAAALVSDSFSCGGSPGSSAFSLTSSSAAAAAAAAAAAASSSPFANDYSVFQAPGVSGGSGGGGGGGGGGSSAHSQDGSHQPVFISKVHTSVDGLQGIYPRVGMAHPYESWFKPSHPGLGAAGEVGSAGASSWWDVGAGWIDVQNPNSAAALPGSLHPAAGGLQTSLHSPLGGYNSDYSGLSHSAFSSGASSHLLSPAGQHLMDGFKPVLPGSYPDSAPSPLAGAGGSMLSAGPSAPLGGSPRSSARRYSGRATCDCPNCQEAERLGPAGASLRRKGLHSCHIPGCGKVYGKTSHLKAHLRWHTGERPFVCNWLFCGKRFTRSDELQRHLRTHTGEKRFACPVCNKRFMRSDHLSKHVKTHSGGGGGGGSAGSGSGGKKGSDTDSEHSAAGSPPCHSPELLQPPEPGHRNGLE

SEQ ID NO: 1241 - protein, 448 aa, Homo sapiens
MLAATCNKIGSPSPSPSSLSDSSSSFGKGFHPWKRSSSSSSASCNVVGSSLSSFGVSGASRNGGSSSAAAAAAAAAAAAAALVSDSFSCGGSPGSSAFSLTSSGGSSAHSQDGSHQPVFISKVHTSVDGLQGIYPRVGMAHPYESWFKPSHPGLGAAGEVGSAGASSWWDVGAGWIDVQNPNSAAALPGSLHPAAGGLQTSLHSPLGGYNSDYSGLSHSAFSSGASSHLLSPAGQHLMDGFKPVLPGSYPDSAPSPLAGAGGSMLSAGPSAPLGGSPRSSARRYSGRATCDCPNCQEAERLGPAGASLRRKGLHSCHIPGCGKVYGKTSHLKAHLRWHTGERPFVCNWLFCGKRFTRSDELQRHLRTHTGEKRFACPVCNKRFMRSDHLSKHVKTHSGGGGGGGSAGSGSGGKKGSDTDSEHSAAGSPPCHSPELLQPPEPGHRNGLE

SEQ ID NO: 1242 - protein, 434 aa, Homo sapiens
MLAATCNKIGSPSPSPSSLSDSSSSFGKGFHPWKRSSSSSSASCNVVGSSLSSFGVSGASRNGGSSSAAAAAAAAAAAAAALVSDSFSCGGSSAHSQDGSHQPVFISKVHTSVDGLQGIYPRVGMAHPYESWFKPSHPGLGAAGEVGSAGASSWWDVGAGWIDVQNPNSAAALPGSLHPAAGGLQTSLHSPLGGYNSDYSGLSHSAFSSGASSHLLSPAGQHLMDGFKPVLPGSYPDSAPSPLAGAGGSMLSAGPSAPLGGSPRSSARRYSGRATCDCPNCQEAERLGPAGASLRRKGLHSCHIPGCGKVYGKTSHLKAHLRWHTGERPFVCNWLFCGKRFTRSDELQRHLRTHTGEKRFACPVCNKRFMRSDHLSKHVKTHSGGGGGGGSAGSGSGGKKGSDTDSEHSAAGSPPCHSPELLQPPEPGHRNGLE

SEQ ID NO: 1243 - protein, 508 aa, Homo sapiens
MATSLLGEEPRLGSTPLAMLAATCNKIGSPSPSPSSLSDSSSSFGKGFHPWKRSSSSSSASCNVVGSSLSSFGVSGASRNGGSSSAAAAAAAAAAAAAALVSDSFSCGGSPGSSAFSLTSSSAAAAAAAAAAAASSSPFANDYSVFQAPGVSGGSGGGGGGGGGGSSAHSQDGSHQPVFISKVHTSVDGLQGIYPRVGMAHPYESWFKPSHPGLGAAGEVGSAGASSWWDVGAGWIDVQNPNSAAALPGSLHPAAGGLQTSLHSPLGGYNSDYSGLSHSAFSSGASSHLLSPAGQHLMDGFKPVLPGSYPDSAPSPLAGAGGSMLSAGPSAPLGGSPRSSARRYSGRATCDCPNCQEAERLGPAGASLRRKGLHSCHIPGCGKVYGKTSHLKAHLRWHTGERPFVCNWLFCGKRFTRSDELQRHLRTHTGEKRFACPVCNKRFMRSDHLSKHVKTHSGGGGGGGSAGSGSGGKKGSDTDSEHSAAGSPPCHSPELLQPPEPGHRNGLE

SEQ ID NO: 1244 - protein, 828 aa, Homo sapiens
MSSKQATSPFACAADGEDAMTQDLTSREKEEGSDQHVASHLPLHPIMHNKPHSEELPTLVSTIQQDADWDSVLSSQQRMESENNKLCSLYSFRNTSTSPHKPDEGSRDREIMTSVTFGTPERRKGSLADVVDTLKQKKLEEMTRTEQEDSSCMEKLLSKDWKEKMERLNTSELLGEIKGTPESLAEKERQLSTMITQLISLREQLLAAHDEQKKLAASQIEKQRQQMDLARQQQEQIARQQQQLLQQQHKINLLQQQIQVQGHMPPLMIPIFPHDQRTLAAAAAAQQGFLFPPGITYKPGDNYPVQFIPSTMAAAAASGLSPLQLQKGHVSHPQINQRLKGLSDRFGRNLDTFEHGGGHSYNHKQIEQLYAAQLASMQVSPGAKMPSTPQPPNTAGTVSPTGIKNEKRGTSPVTQVKDEAAAQPLNLSSRPKTAEPVKSPTSPTQNLFPASKTSPVNLPNKSSIPSPIGGSLGRGSSLDILSSLNSPALFGDQDTVMKAIQEARKMREQIQREQQQQQPHGVDGKLSSINNMGLNSCRNEKERTRFENLGPQLTGKSNEDGKLGPGVIDLTRPEDAEGSKAMNGSAAKLQQYYCWPTGGATVAEARVYRDARGRASSEPHIKRPMNAFMVWAKDERRKILQAFPDMHNSNISKILGSRWKSMSNQEKQPYYEEQARLSKIHLEKYPNYKYKPRPKRTCIVDGKKLRIGEYKQLMRSRRQEMRQFFTVGQQPQIPITTGTGVVYPGAITMATTTPSPQMTSDCSSTSASPEPSLPVIQSTYGMKTDGGSLAGNEMINGEDEMEMYDDYEDDPKSDYSSENEAPEAVSAN

SEQ ID NO: 1245 - protein, 804 aa, Homo sapiens
MGRMSSKQATSPFACAADGEDAMTQDLTSREKEEGSDQHVASHLPLHPIMHNKPHSEELPTLVSTIQQDADWDSVLSSQQRMESENNKLCSLYSFRNTSTSPHKPDEGSRDREIMTSVTFGTPERRKGSLADVVDTLKQKKLEEMTRTEQEDSSCMEKLLSKDWKEKMERLNTSELLGEIKGTPESLAEKERQLSTMITQLISLREQLLAAHDEQKKLAASQIEKQRQQMDLARQQQEQIARQQQQLLQQQHKINLLQQQIQVQGHMPPLMIPIFPHDQRTLAAAAAAQQGFLFPPGITYKPGDNYPVQFIPSTMAAAAASGLSPLQLQQLYAAQLASMQVSPGAKMPSTPQPPNTAGTVSPTGIKNEKRGTSPVTQVKDEAAAQPLNLSSRPKTAEPVKSPTSPTQNLFPASKTSPVNLPNKSSIPSPIGGSLGRGSSLGKWKSQHQEETYELDILSSLNSPALFGDQDTVMKAIQEARKMREQIQREQQQQQPHGVDGKLSSINNMGLNSCRNEKERTRFENLGPQLTGKSNEDGKLGPGVIDLTRPEDAEGSKAMNGSAAKLQQYYCWPTGGATVAEARVYRDARGRASSEPHIKRPMNAFMVWAKDERRKILQAFPDMHNSNISKILGSRWKSMSNQEKQPYYEEQARLSKIHLEKYPNYKYKPRPKRTCIVDGKKLRIGEYKQLMRSRRQEMRQFFTVGQQPQIPITTGTGVVYPGAITMATTTPSPQMTSDCSSTSASPEPSLPVIQSTYGMKTDGGSLAGNEMINGEDEMEMYDDYEDDPKSDYSSENEAPEAVSAN

SEQ ID NO: 1246 - protein, 808 aa, Homo sapiens
MSSKQATSPFACAADGEDAMTQDLTSREKEEGSDQHVASHLPLHPIMHNKPHSEELPTLVSTIQQDADWDSVLSSQQRMESENNKLCSLYSFRNTSTSPHKPDEGSRDREIMTSVTFGTPERRKGSLADVVDTLKQKKLEEMTRTEQEDSSCMEKLLSKDWKEKMERLNTSELLGEIKGTPESLAEKERQLSTMITQLISLREQLLAAHDEQKKLAASQIEKQRQQMDLARQQQEQIARQQQQLLQQQHKINLLQQQIQVQGHMPPLMIPIFPHDQRTLAAAAAAQQGFLFPPGITYKPGDNYPVQFIPSTMAAAAASGLSPLQLQKGHVSHPQINQRLKGLSDRFGRNLDTFEHGGGHSYNHKQIEQLYAAQLASMQVSPGAKMPSTPQPPNTAGTVSPTGIKNEKRGTSPVTQVKDEAAAQPLNLSSRPKTAEPVKSPTSPTQNLFPASKTSPVNLPNKSSIPSPIGGSLGRGSSLDILSSLNSPALFGDQDTVMKAIQEARKMREQIQREQQQQQPHGVDGKLSSINNMGLNSCRNEKERTRFENLGPQLTGKSNEDGKLGPGVIDLTRPEDAEGGATVAEARVYRDARGRASSEPHIKRPMNAFMVWAKDERRKILQAFPDMHNSNISKILGSRWKSMSNQEKQPYYEEQARLSKIHLEKYPNYKYKPRPKRTCIVDGKKLRIGEYKQLMRSRRQEMRQFFTVGQQPQIPITTGTGVVYPGAITMATTTPSPQMTSDCSSTSASPEPSLPVIQSTYGMKTDGGSLAGNEMINGEDEMEMYDDYEDDPKSDYSSENEAPEAVSAN

SEQ ID NO: 1247 - protein, 801 aa, Homo sapiens
MSSKQATSPFACAADGEDAMTQDLTSREKEEGSDQHVASHLPLHPIMHNKPHSEELPTLVSTIQQDADWDSVLSSQQRMESENNKLCSLYSFRNTSTSPHKPDEGSRDREIMTSVTFGTPERRKGSLADVVDTLKQKKLEEMTRTEQEDSSCMEKLLSKDWKEKMERLNTSELLGEIKGTPESLAEKERQLSTMITQLISLREQLLAAHDEQKKLAASQIEKQRQQMDLARQQQEQIARQQQQLLQQQHKINLLQQQIQVQGHMPPLMIPIFPHDQRTLAAAAAAQQGFLFPPGITYKPGDNYPVQFIPSTMAAAAASGLSPLQLQQLYAAQLASMQVSPGAKMPSTPQPPNTAGTVSPTGIKNEKRGTSPVTQVKDEAAAQPLNLSSRPKTAEPVKSPTSPTQNLFPASKTSPVNLPNKSSIPSPIGGSLGRGSSLGKWKSQHQEETYELDILSSLNSPALFGDQDTVMKAIQEARKMREQIQREQQQQQPHGVDGKLSSINNMGLNSCRNEKERTRFENLGPQLTGKSNEDGKLGPGVIDLTRPEDAEGSKAMNGSAAKLQQYYCWPTGGATVAEARVYRDARGRASSEPHIKRPMNAFMVWAKDERRKILQAFPDMHNSNISKILGSRWKSMSNQEKQPYYEEQARLSKIHLEKYPNYKYKPRPKRTCIVDGKKLRIGEYKQLMRSRRQEMRQFFTVGQQPQIPITTGTGVVYPGAITMATTTPSPQMTSDCSSTSASPEPSLPVIQSTYGMKTDGGSLAGNEMINGEDEMEMYDDYEDDPKSDYSSENEAPEAVSAN

SEQ ID NO: 1248 - protein, 628 aa, Homo sapiens
MALRARALYDFRSENPGEISLREHEVLSLCSEQDIEGWLEGVNSRGDRGLFPASYVQVIRAPEPGPAGDGGPGAPARYANVPPGGFEPLPVAPPASFKPPPDAFQALLQPQQAPPPSTFQPPGAGFPYGGGALQPSPQQLYGGYQASQGSDDDWDDEWDDSSTVADEPGALGSGAYPDLDGSSSAGVGAAGRYRLSTRSDLSLGSRGGSVPPQHHPSGPKSSATVSRNLNRFSTFVKSGGEAFVLGEASGFVKDGDKLCVVLGPYGPEWQENPYPFQCTIDDPTKQTKFKGMKSYISYKLVPTHTQVPVHRRYKHFDWLYARLAEKFPVISVPHLPEKQATGRFEEDFISKRRKGLIWWMNHMASHPVLAQCDVFQHFLTCPSSTDEKAWKQGKRKAEKDEMVGANFFLTLSTPPAAALDLQEVESKIDGFKCFTKKMDDSALQLNHTANEFARKQVTGFKKEYQKVGQSFRGLSQAFELDQQAFSVGLNQAIAFTGDAYDAIGELFAEQPRQDLDPVMDLLALYQGHLANFPDIIHVQKGKAWPLEQVIWSVLCRLKGATLTAVPLWVSESYSTGEEASRDVDAWVFSLECKLDCSTGSFLLEYLALGNEYSFSKVQRVPLMTVLSF

SEQ ID NO: 1249 - protein, 624 aa, Homo sapiens
MALRARALYDFRSENPGEISLREHEVLSLCSEQDIEGWLEGVNSRGDRGLFPASYVQVIRAPEPGPAGDGGPGAPARYANVPPGGFEPLPVAPPASFKPPPDAFQALLQPQQAPPPSTFQPPGAGFPYGGGALQPSPQQLYGGYQASQGSDDDWDDEWDDSSTVADEPGALGSGAYPDLDGSSSAGVGAAGRYRLSTRSDLSLGSRGGSVPPQHHPSGPKSSATVSRNLNRFSTFVKSGGEAFVLGEASGFVKDGDKLCVVLGPYGPEWQENPYPFQCTIDDPTKQTKFKGMKSYISYKLVPTHTQVPVHRRYKHFDWLYARLAEKFPVISVPHLPEKQATGRFEEDFISKRRKGLIWWMNHMASHPVLAQCDVFQHFLTCPSSTDEKAWKQGKRKAEKDEMVGANFFLTLSTPPAAALDLQEVESKIDGFKCFTKKMDDSALQLNHTANEFARKQVTGFKKEYQKVGQSFRGLSQAFELDQQAFSVGLNQAIAFTGDAYDAIGELFAEQPRQDLDPVMDLLALYQGHLANFPDIIHVQKGALTKVKESRRHVEEGKMEVQKADGIQDRCNTISFATLAEIHHFHQIRVRDFKSQMQHFLQQQIIFFQKVTQKLEEALHKYDSV

SEQ ID NO: 1250 - protein, 591 aa, Homo sapiens
MALRARALYDFRSENPGEISLREHEVLSLCSEQDIEGWLEGVNSRGDRGLFPASYVQVIRAPEPGPAGDGGPGAPARYANVPPGGFEPLPVAPPASFKPPPDAFQALLQPQQAPPPSTFQPPGAGFPYGGGALQPSPQQLYGGYQASQGSDDDWDDEWDDSSTVADEPGALGSGAYPDLDGSSSAGVGAAGRYRLSTRSDLSLGSRGGSVPPQHHPSGPKSSATVSRNLNRFSTFVKSGGEAFVLGEASGFVKDGDKLCVVLGPYGPEWQENPYPFQCTIDDPTKQTKFKGMKSYISYKLVPTHTQVPVHRRYKHFDWLYARLAEKFPVISVPHLPEKQATGRFEEDFISKRRKGLIWWMNHMASHPVLAQCDVFQHFLTCPSSTDEKAWKQGKRKAEKDEMVGANFFLTLSTPPAAALDLQEVESKIDGFKCFTKKMDDSALQLNHTANEFARKQVTGFKKEYQKVGQSFRGLSQAFELDQQAFSVGLNQAIAFTGDAYDAIGELFAEQPRQDLDPVMDLLALYQGHLANFPDIIHVQKGKAWPLEQVIWSVLCRLKGATLTAVPLWVSESYSTGEEASRDVDAWVFSLE

SEQ ID NO: 1251 - protein, 882 aa, Homo sapiens
MLLGASWLCASKAAAAAAQSEGDEDRPGERRRRRAAATAAGAGEDMDESSLLDLLECSVCLERLDTTAKVLPCQHTFCRRCLESIVCSRHELRCPECRILVGCGVDELPANILLVRLLDGIRQRPRAGTSPGGSPPARPIPGQSAAPTLAGGGGGAAGSTPGSPVFLSAAAGSTAGSLRELATSRTAPAAKNPCLLPYGKALYSYEGKEPGDLKFNKGDIIVLRRKVDEQWYHGELHGTQGFLPASYIQCIQPLPHAPPQGKALYDFEMKDKDQDKDCLTFTKDEILTVLRRVDENWAEGMLGDKIGIFPLLYVELNDSAKQLIEMDKPCPAAASSCNASLPSDSGAVASVAPSPTLSSSGAVSAFQRRVDGKKNTKKRHSFTALSVTHRSSQAASHRHSMEISAPVLISSSDPRAAARIGDLAHLSCAAPTQDVSSSAGSTPTAVPRAASVSGEQGTPPKVQLPLNVYLALYAYKPQKSDELELHKGEMYRVLEKCQDGWFKGASLRTGVSGVFPGNYVTPVSRVPAGGAGPPRNNVVGGSPLAKGITTTMHPGSGSLSSLATATRPALPITTPQAHAQHPTASPPTGSCLRHSAQPTASQARSTISTAAHSAAQAQDRPTATVSPLRTQNSPSRLPATSLRPHSVVSPQHSHQPPVQMCPRPAIPLTSAASAITPPNVSAANLNGEAGGGPIGVLSTSSPTNTGCKLDEKKSEKKEKKSGLLKLLAGASTKKKSRSPPSVSPTHDPQVAVDALLQGAVGPEVSSLSIHGRAGSCPIESEMQGAMGMEPLHRKAGSLDLNFTSPSRQAPLSMAAIRPEPKLLPRERYRVVVSYPPQSEAEIELKEGDIVFVHKKREDGWYKGTLQRNGRTGLFPGSFVESF

SEQ ID NO: 1252 - protein, 1214 aa, Homo sapiens
MAVRKKDGGPNVKYYEAADTVTQFDNVRLWLGKNYKKYIQAEPPTNKSLSSLVVQLLQFQEEVFGKHVSNAPLTKLPIKCFLDFKAGGSLCHILAAAYKFKSDQGWRRYDFQNPSRMDRNVEMFMTIEKSLVQNNCLSRPNIFLCPEIEPKLLGKLKDIIKRHQGTVTEDKNNASHVVYPVPGNLEEEEWVRPVMKRDKQVLLHWGYYPDSYDTWIPASEIEASVEDAPTPEKPRKVHAKWILDTDTFNEWMNEEDYEVNDDKNPVSRRKKISAKTLTDEVNSPDSDRRDKKGGNYKKRKRSPSPSPTPEAKKKNAKKGPSTPYTKSKRGHREEEQEDLTKDMDEPSPVPNVEEVTLPKTVNTKKDSESAPVKGGTMTDLDEQEDESMETTGKDEDENSTGNKGEQTKNPDLHEDNVTEQTHHIIIPSYAAWFDYNSVHAIERRALPEFFNGKNKSKTPEIYLAYRNFMIDTYRLNPQEYLTSTACRRNLAGDVCAIMRVHAFLEQWGLINYQVDAESRPTPMGPPPTSHFHVLADTPSGLVPLQPKTPQQTSASQQMLNFPDKGKEKPTDMQNFGLRTDMYTKKNVPSKSKAAASATREWTEQETLLLLEALEMYKDDWNKVSEHVGSRTQDECILHFLRLPIEDPYLEDSEASLGPLAYQPIPFSQSGNPVMSTVAFLASVVDPRVASAAAKSALEEFSKMKEEVPTALVEAHVRKVEEAAKVTGKADPAFGLESSGIAGTTSDEPERIEESGNDEARVEGQATDEKKEPKEPREGGGAIEEEAKEKTSEAPKKDEEKGKEGDSEKESEKSDGDPIVDPEKEKEPKEGQEEVLKEVVESEGERKTKVERDIGEGNLSTAAAAALAAAAVKAKHLAAVEERKIKSLVALLVETQMKKLEIKLRHFEELETIMDREREALEYQRQQLLADRQAFHMEQLKYAEMRARQQHFQQMHQQQQQPPPALPPGSQPIPPTGAAGPPAVHGLAVAPASVVPAPAGSGAPPGSLGPSEQIGQAGSTAGPQQQQPAGAPQPGAVPPGVPPPGPHGPSPFPNQQTPPSMMPGAVPGSGHPGVAGNAPLGLPFGMPPPPPPPAPSIIPFGSLADSISINLPAPPNLHGHHHHLPFAPGTLPPPNLPVSMANPLHPNLPATTTMPSSLPLGPGLGSAAAQSPAIVAAVQGNLLPSASPLPDPGTPLPPDPTAPSPGTVTPVPPPQ

SEQ ID NO: 1253 - protein, 1130 aa, Homo sapiens
MAVRKKDGGPNVKYYEAADTVTQFDNVRLWLGKNYKKYIQAEPPTNKSLSSLVVQLLQFQEEVFGKHVSNAPLTKLPIKCFLDFKAGGSLCHILAAAYKFKSDQGWRRYDFQNPSRMDRNVEMFMTIEKSLVQNNCLSRPNIFLCPEIEPKLLGKLKDIIKRHQGTVTEDKNNASHVVYPVPGNLEEEEWVRPVMKRDKQVLLHWGYYPDSYDTWIPASEIEASVEDAPTPEKPRKVHAKWILDTDTFNEWMNEEDYEVNDDKNPVSRRKKISAKTLTDEVNSPDSDRRDKKGGNYKKRKRSPSPSPTPEAKKKNAKKGPSTPYTKSKRGHREEEQEDLTKDMDEPSPVPNVEEVTLPKTVNTKKDSESAPVKGGTMTDLDEQEDESMETTGKDEDENSTGNKGEQTKNPDLHEDNVTEQTHHIIIPSYAAWFDYNSVHAIERRALPEFFNGKNKSKTPEIYLAYRNFMIDTYRLNPQEYLTSTACRRNLAGDVCAIMRVHAFLEQWGLINYQVDAESRPTPMGPPPTSHFHVLADTPSGLVPLQPKTPQGRQVDADTKAGRKGKELDDLVPETAKGKPELQTSASQQMLNFPDKGKEKPTDMQNFGLRTDMYTKKNVPSKSKAAASATREWTEQETLLLLEALEMYKDDWNKVSEHVGSRTQDECILHFLRLPIEDPYLEDSEASLGPLAYQPIPFSQSGNPVMSTVAFLASVVDPRVASAAAKSALEEFSKMKEEVPTALVEAHVRKVEEAAKVTGKADPAFGLESSGIAGTTSDEPERIEESGNDEARVEGQATDEKKEPKEPREGGGAIEEEAKEKTSEAPKKDEEKGKEGDSEKESEKSDGDPIVDPEKEKEPKEGQEEVLKEVVESEGERKTKVERDIGEGNLSTAAAAALAAAAVKAKHLAAVEERKIKSLVALLVETQMKKLEIKLRHFEELETIMDREREALEYQRQQLLADRQAFHMEQLKYAEMRARQQHFQQMHQQQQQPPPALPPGSQPIPPTGAAGPPAVHGLAVAPASVVPAPAGSGAPPGSLGPSEQIGQAGSTAGPQQQQPAGAPQPGAVPPGVPPPGPHGPSPFPNQQTPPSMMPGAVPGSGHPGVADPGTPLPPDPTAPSPGTVTPVPPPQ

SEQ ID NO: 1254 - protein, 1152 aa, Homo sapiens
MAVRKKDGGPNVKYYEAADTVTQFDNVRLWLGKNYKKYIQAEPPTNKSLSSLVVQLLQFQEEVFGKHVSNAPLTKLPIKCFLDFKAGGSLCHILAAAYKFKSDQGWRRYDFQNPSRMDRNVEMFMTIEKSLVQNNCLSRPNIFLCPEIEPKLLGKLKDIIKRHQGTVTEDKNNASHVVYPVPGNLEEEEWVRPVMKRDKQVLLHWGYYPDSYDTWIPASEIEASVEDAPTPEKPRKVHAKWILDTDTFNEWMNEEDYEVNDDKNPVSRRKKISAKTLTDEVNSPDSDRRDKKGGNYKKRKRSPSPSPTPEAKKKNAKKGPSTPYTKSKRGHREEEQEDLTKDMDEPSPVPNVEEVTLPKTVNTKKDSESAPVKGGTMTDLDEQEDESMETTGKDEDENSTGNKGEQTKNPDLHEDNVTEQTHHIIIPSYAAWFDYNSVHAIERRALPEFFNGKNKSKTPEIYLAYRNFMIDTYRLNPQEYLTSTACRRNLAGDVCAIMRVHAFLEQWGLINYQVDAESRPTPMGPPPTSHFHVLADTPSGLVPLQPKTPQGRQVDADTKAGRKGKELDDLVPETAKGKPELQTSASQQMLNFPDKGKEKPTDMQNFGLRTDMYTKKNVPSKSKAAASATREWTEQETLLLLEALEMYKDDWNKVSEHVGSRTQDECILHFLRLPIEDPYLEDSEASLGPLAYQPIPFSQSGNPVMSTVAFLASVVDPRVASAAAKSALEEFSKMKEEVPTALVEAHVRKVEEAAKVTGKADPAFGLESSGIAGTTSDEPERIEESGNDEARVEGQATDEKKEPKEPREGGGAIEEEAKEKTSEAPKKDEEKGKEGDSEKESEKSDGDPIVDPEKEKEPKEGQEEVLKEVVESEGERKTKVERDIGEGNLSTAAAAALAAAAVKAKHLAAVEERKIKSLVALLVETQMKKLEIKLRHFEELETIMDREREALEYQRQQLLADRQAFHMEQLKYAEMRARQQHFQQMHQQQQQPPPALPPGSQPIPPTGAAGPPAVHGLAVAPASVVPAPAGSGAPPGSLGPSEQIGQAGSTAGPQQQQPAGAPQPGAVPPGVPPPGPHGPSPFPNQQTPPSMMPGAVPGSGHPGVAAQSPAIVAAVQGNLLPSASPLPDPGTPLPPDPTAPSPGTVTPVPPPQ

SEQ ID NO: 1255 - protein, 779 aa, Homo sapiens
MQQALELALDRAEYVIESARQRPPKRKYLSSGRKSVFQKLYDLYIEECEKEPEVKKLRRNVNLLEKLVMQETLSCLVVNLYPGNEGYSLMLRGKNGSDSETIRLPYEEGELLEYLDAEELPPILVDLLEKSQVNIFHCGCVIAEIRDYRQSSNMKSPGYQSRHILLRPTMQTLICDVHSITSDNHKWTQEDKLLLESQLILATAEPLCLDPSIAVTCTANRLLYNKQKMNTRPMKRCFKRYSRSSLNRQQDLSHCPPPPQLRLLDFLQKRKERKAGQHYDLKISKAGNCVDMWKRSPCNLAIPSEVDVEKYAKVEKSIKSDDSQPTVWPAHDVKDDYVFECEAGTQYQKTKLTILQSLGDPLYYGKIQPCKADEESDSQMSPSHSSTDDHSNWFIIGSKTDAERVVNQYQELVQNEAKCPVKMSHSSSGSASLSQVSPGKETDQTETVSVQSSVLGKGVKHRPPPIKLPSSSGNSSSGNYFTPQQTSSFLKSPTPPPSSKPSSIPRKSSVDLNQVSMLSPAALSPASSSQRTTATQVMANSAGLNFINVVGSVCGAQALMSGSNPMLGCNTGAITPAGINLSGLLPSGGLLPNALPSAMQAASQAGVPFGLKNTSSLRPLNLLQLPGGSLIFNTLQQQQQQLSQFTPQQPQQPTTCSPQQPGEQGSEQGSTSQEQALSAQQAAVINLTGVGSFMQSQAAVLSQLGSAENRPEQSLPQQRFQLSSAFQQQQQQIQQLRFLQHQMAMAAAAAQTAQLHHHRHTGSQSKSKMKRGTPTTPKF

SEQ ID NO: 1256 - protein, 733 aa, Homo sapiens
MQQALELALDRAEYVIESARQRPPKRKYLSSGRKSVFQKLYDLYIEECEKEPEVKQKLRRNVNLLEKLVMQETLSCLVVNLYPGNEGYSLMLRGKNGSDSETIRLPYEEGELLEYLDAEELPPILVDLLEKSQVNIFHCGCVIAEIRDYRQSSNMKSPGYQSRHILLRPTMQTLICDVHSITSDNHKWTQEDKLLLESQLILATAEPLCLDPSIAVTCTANRLLYNKQKMNTRPMKRCFKRYSRSSLNRQQDLSHCPPPPQLRLLDFLQKRKERKAGQHYDLKISKAGNCVDMWKRSPCNLAIPSEVDVEKYAKVEKSIKSDDSQPTVWPAHDVKDDYVFECEAGTQYQKTKLTILQSLGDPLYYGKIQPCKADEESDSQMSPSHSSTDDHSNWFIIGSKTDAERVVNQYQELVQNEAKCPVKMSHSSSGSASLSQVSPGKETDQTETVSVQSSVLGKGVKHRPPPIKLPSSSGNSSSGNYFTPQQTSSFLKSPTPPPSSKPSSIPRKSSVDLNQVSMLSPAALSPASSSQRTTATQVMANSAGLNFINVVGSVCGAQALMSGSNPMLGCNTGAITPAGINLSGLLPSGGLLPNALPSAMQAASQAGVPFGLKNTSSLRPLNLLQLPGGSLIFNTLQQQQQQLSQFTPQQPQQPTTCSPQQPGEQGSEQGSTSQEQALSAQQAAVINLTGVGSFMQSQAAAVAILAASNGYGSSSSTNSSATSSSAYRQPVKK

SEQ ID NO: 1257 - protein, 811 aa, Homo sapiens
MQQALELALDRAEYVIESARQRPPKRKYLSSGRKSVFQKLYDLYIEECEKEPEVKKLRRNVNLLEKLVMQETLSCLVVNLYPGNEGYSLMLRGKNGSDSETIRLPYEEGELLEYLDAEELPPILVDLLEKSQVNIFHCGCVIAEIRDYRQSSNMKSPGYQSRHILLRPTMQTLICDVHSITSDNHKWTQEDKLLLESQLILATAEPLCLDPSIAVTCTANRLLYNKQKMNTRPMKRCFKRYSRSSLNRQQDLSHCPPPPQLRLLDFLQKRKERKAGQHYDLKISKAGNCVDMWKRSPCNLAIPSEVDVEKYAKVEKSIKSDDSQPTVWPAHDVKDDYVFECEAGTQYQKTKLTILQSLGDPLYYGKIQPCKADEESDSQMSPSHSSTDDHSNWFIIGSKTDAERVVNQYQELVQNEAKCPVKMSHSSSGSASLSQVSPGKETDQTETVSVQSSVLGKGVKHRPPPIKLPSSSGNSSSGNYFTPQQTSSFLKSPTPPPSSKPSSIPRKSSVDLNQVSMLSPAALSPASSSQRSGTPKPSTPTPTPSSTPHPPDAQSSTPSTPSATPTPQDSGFTPQPTLLTQFAQQQRSLSQAMPVTTIPLSTMVTSITPGTTATQVMANSAGLNFINVVGSVCGAQALMSGSNPMLGCNTGAITPAGINLSGLLPSGGLLPNALPSAMQAASQAGVPFGLKNTSSLRPLNLLQLPGGSLIFNTLQQQQQQLSQFTPQQPQQPTTCSPQQPGEQGSEQGSTSQEQALSAQQAAVINLTGVGSFMQSQAAAVAILAASNGYGSSSSTNSSATSSSAYRQPVKK

SEQ ID NO: 1258 - protein, 342 aa, Homo sapiens
MNNPIPSNLKSEAKKAAKILREFTEITSRNGPDKIIPAHVIAKAKGLAILSVIKAGFLVTARGGSGIVVARLPDGKWSAPSAIGIAGLGGGFEIGIEVSDLVIILNYDRAVEAFAKGGNLTLGGNLTVAVGPLGRNLEGNVALRSSAAVFTYCKSRGLFAGVSLEGSCLIERKETNRKFYCQDIRAYDILFGDTPRPAQAEDLYEILDSFTEKYENEGQRINARKAAREQRKSSAKELPPKPLSRPQQSSAPVQLNSGSQSNRNEYKLYPGLSSYHERVGNLNQPIEVTALYSFEGQQPGDLNFQAGDRITVISKTDSHFDWWEGKLRGQTGIFPANYVTMN

SEQ ID NO: 1259 - protein, 323 aa, Homo sapiens
MNNPIPSNLKSEAKKAAKILREFTEITSRNGPDKIIPAHVIAKAKGLAILSVIKAGFLVTARGGSGIVVARLPDGKWSAPSAIGIAGLGGGFEIGIEVSDLVIILNYDRAVEAFAKGGNLTLGGNLTVAVGPLGRNLEGNVALRSSAAVFTYCKSRGLFAGVSLEGSCLIERKETNRKFYCQDIRAYDILFGDTPRPAQAEDLYEILDSFTEKYENEGQRINARKAAREQRKSSAKELPPKPLSRPQQSSAPVQLNSGSQSNLNQPIEVTALYSFEGQQPGDLNFQAGDRITVISKTDSHFDWWEGKLRGQTGIFPANYVTMN

SEQ ID NO: 1260 - protein, 246 aa, Homo sapiens
MVSDLVIILNYDRAVEAFAKGGNLTLGGNLTVAVGPLGRNLEGNVALRSSAAVFTYCKSRGLFAGVSLEGSCLIERKETNRKFYCQDIRAYDILFGDTPRPAQAEDLYEILDSFTEKYENEGQRINARKAAREQRKSSAKELPPKPLSRPQQSSAPVQLNSGSQSNRNEYKLYPGLSSYHERVGNLNQPIEVTALYSFEGQQPGDLNFQAGDRITVISKTDSHFDWWEGKLRGQTGIFPANYVTMN

SEQ ID NO: 1261 - protein, 227 aa, Homo sapiens
MVSDLVIILNYDRAVEAFAKGGNLTLGGNLTVAVGPLGRNLEGNVALRSSAAVFTYCKSRGLFAGVSLEGSCLIERKETNRKFYCQDIRAYDILFGDTPRPAQAEDLYEILDSFTEKYENEGQRINARKAAREQRKSSAKELPPKPLSRPQQSSAPVQLNSGSQSNLNQPIEVTALYSFEGQQPGDLNFQAGDRITVISKTDSHFDWWEGKLRGQTGIFPANYVTMN

SEQ ID NO: 1262 - protein, 114 aa, Homo sapiens
MNNPIPSNLKSEAKKAAKILREFTEITSRNGPDKIIPAHVIAKAKGLAILSVIKAGFLVTARGGSGIVVARLPDGKWSAPSAIGIAGLGGGFEIGIETHLQLHIPSEHCPGCLP

SEQ ID NO: 1263 - protein, 123 aa, Homo sapiens
MRQRLLPSVTSLLLVALLFPGSSQARHVNHSATEALGELRERAPGQGTNGFQLLRHAVKRDLLPPRTPPYQVHISHQEARGPSFKICVGFLGPRWARGCSTGNEKYHLPYAARDLQTFFLPFW

SEQ ID NO: 1264 - protein, 108 aa, Homo sapiens
MRQRLLPSVTSLLLVALLFPGSSQARHVNHSATEALGELRERAPGQGTNGFQLLRHAVKRDLLPPRTPPYQGDVPLGIRNTICHMQQGICRLFFCHSGTGQQHRQRCG

SEQ ID NO: 1265 - protein, 82 aa, Homo sapiens
MRQRLLPSVTSLLLVALLFPGSSQARHVNHSATEALGELRERAPGQGTNGFQLLRHAVKRDLLPPRTPPYQGTGQQHRQRCG

SEQ ID NO: 1266 - protein, 74 aa, Homo sapiens
MRQRLLPSVTSLLLVALLFPGSSQARHVNHSATEALGELRERAPGQGTNGFQLLRHAVKRDLLPPRTPPYQEMK

SEQ ID NO: 1267 - protein, 1105 aa, Homo sapiens
MAAAAGGGGPGTAVGATGSGIAAAAAGLAVYRRKDGGPATKFWESPETVSQLDSVRVWLGKHYKKYVHADAPTNKTLAGLVVQLLQFQEDAFGKHVTNPAFTKLPAKCFMDFKAGGALCHILGAAYKYKNEQGWRRFDLQNPSRMDRNVEMFMNIEKTLVQNNCLTRPNIYLIPDIDLKLANKLKDIIKRHQGTFTDEKSKASHHIYPYSSSQDDEEWLRPVMRKEKQVLVHWGFYPDSYDTWVHSNDVDAEIEDPPIPEKPWKVHVKWILDTDIFNEWMNEEDYEVDENRKPVSFRQRISTKNEEPVRSPERRDRKASANARKRKHSPSPPPPTPTESRKKSGKKGQASLYGKRRSQKEEDEQEDLTKDMEDPTPVPNIEEVVLPKNVNLKKDSENTPVKGGTVADLDEQDEETVTAGGKEDEDPAKGDQSRSVDLGEDNVTEQTNHIIIPSYASWFDYNCIHVIERRALPEFFNGKNKSKTPEIYLAYRNFMIDTYRLNPQEYLTSTACRRNLTGDVCAVMRVHAFLEQWGLVNYQVDPESRPMAMGPPPTPHFNVLADTPSGLVPLHLRSPQVPAAQQMLNFPEKNKEKPVDLQNFGLRTDIYSKKTLAKSKGASAGREWTEQETLLLLEALEMYKDDWNKVSEHVGSRTQDECILHFLRLPIEDPYLENSDASLGPLAYQPVPFSQSGNPVMSTVAFLASVVDPRVASAAAKAALEEFSRVREEVPLELVEAHVKKVQEAARASGKVDPTYGLESSCIAGTGPDEPEKLEGAEEEKMEADPDGQQPEKAENKVENETDEGDKAQDGENEKNSEKEQDSEVSEDTKSEEKETEENKELTDTCKERESDTGKKKVEHEISEGNVATAAAAALASAATKAKHLAAVEERKIKSLVALLVETQMKKLEIKLRHFEELETIMDREKEALEQQRQQLLTERQNFHMEQLKYAELRARQQMEQQQHGQNPQQAHQHSGGPGLAPLGAAGHPGMMPHQQPPPYPLMHHQMPPPHPPQPGQIPGPGSMMPGQHMPGRMIPTVAANIHPSGSGPTPPGMPPMPGNILGPRVPLTAPNGMYPPPPQQQPPPPPPADGVPPPPAPGPPASAAP

SEQ ID NO: 1268 - protein, 116 aa, Homo sapiens
MLSCRLQCALAALSIVLALGCVTGAPSDPRLRQFLQKSLAAAAGKQELAKYFLAELLSEPNQTENDALEPEDLSQAAEQDEMRLELQRSANSNPAMAPRERKAGCKNFFWKTFTSC

SEQ ID NO: 1269 - protein, 431 aa, Homo sapiens
MASSLLEEEVHYGSSPLAMLTAACSKFGGSSPLRDSTTLGKAGTKKPYSVGSDLSASKTMGDAYPAPFTSTNGLLSPAGSPPAPTSGYANDYPPFSHSFPGPTGTQDPGLLVPKGHSSSDCLPSVYTSLDMTHPYGSWYKAGIHAGISPGPGNTPTPWWDMHPGGNWLGGGQGQGDGLQGTLPTGPAQPPLNPQLPTYPSDFAPLNPAPYPAPHLLQPGPQHVLPQDVYKPKAVGNSGQLEGSGGAKPPRGASTGGSGGYGGSGAGRSSCDCPNCQELERLGAAAAGLRKKPIHSCHIPGCGKVYGKASHLKAHLRWHTGERPFVCNWLFCGKRFTRSDELERHVRTHTREKKFTCLLCSKRFTRSDHLSKHQRTHGEPGPGPPPSGPKELGEGRSTGEEEASQTPRPSASPATPEKAPGGSPEQSNLLEI

SEQ ID NO: 1270 - protein, 413 aa, Homo sapiens
MLTAACSKFGGSSPLRDSTTLGKAGTKKPYSVGSDLSASKTMGDAYPAPFTSTNGLLSPAGSPPAPTSGYANDYPPFSHSFPGPTGTQDPGLLVPKGHSSSDCLPSVYTSLDMTHPYGSWYKAGIHAGISPGPGNTPTPWWDMHPGGNWLGGGQGQGDGLQGTLPTGPAQPPLNPQLPTYPSDFAPLNPAPYPAPHLLQPGPQHVLPQDVYKPKAVGNSGQLEGSGGAKPPRGASTGGSGGYGGSGAGRSSCDCPNCQELERLGAAAAGLRKKPIHSCHIPGCGKVYGKASHLKAHLRWHTGERPFVCNWLFCGKRFTRSDELERHVRTHTREKKFTCLLCSKRFTRSDHLSKHQRTHGEPGPGPPPSGPKELGEGRSTGEEEASQTPRPSASPATPEKAPGGSPEQSNLLEI

SEQ ID NO: 1271 - protein, 515 aa, Homo sapiens
MAARAGFQSVAPSGGAGASGGAGAAAALGPGGTPGPPVRMGPAPGQGLYRSPMPGAAYPRPGMLPGSRMTPQGPSMGPPGYGGNPSVRPGLAQSGMDQSRKRPAPQQIQQVQQQAVQNRNHNAKKKKMADKILPQRIRELVPESQAYMDLLAFERKLDQTIMRKRLDIQEALKRPIKQKRKLRIFISNTFNPAKSDAEDGEGTVASWELRVEGRLLEDSALSKYDATKQKRKFSSFFKSLVIELDKDLYGPDNHLVEWHRTATTQETDGFQVKRPGDVNVRCTVLLMLDYQPPQFKLDPRLARLLGIHTQTRPVIIQALWQYIKTHKLQDPHEREFVICDKYLQQIFESQRMKFSEIPQRLHALLMPPEPIIINHVISVDPNDQKKTACYDIDVEVDDTLKTQMNSFLLSTASQQEIATLDNKIHETIETINQLKTQREFMLSFARDPQGFINDWLQSQCRDLKTMTDVVGNPEEERRAEFYFQPWAQEAVCRYFYSKVQQRRQELEQALGIRNT

SEQ ID NO: 1272 - protein, 474 aa, Homo sapiens
MAARAGFQSVAPSGGAGASGGAGAAAALGPGGTPGPPVRMGPAPGQGLYRSPMPGAAYPRPGMLPGSRMTPQGPSMGPPGYGGNPSVRPGLAQSGMDQSRKRPAPQQIQQVQQQAVQNRNHNAKKKKMADKILPQRIRELVPESQAYMDLLAFERKLDQTIMRKRLDIQEALKRPIKQKRKLRIFISNTFNPAKSDAEDGEGTVASWELRVEGRLLEDSALSKYDATKQKRKFSSFFKSLVIELDKDLYGPDNHLVEWHRTATTQETDGFQVKRPGDVNVRCTVLLMLDYQPPQFKLDPRLARLLGIHTQTRPVIIQALWQYIKTHKLQDPHEREFVICDKYLQQIFESQRMKFSEIPQRLHALLMPPEPIIINHVISVDPNDQKKTACYDIDVEVDDTLKTQMNSFLLSTASQQEIATLDNKTMTDVVGNPEEERRAEFYFQPWAQEAVCRYFYSKVQQRRQELEQALGIRNT

SEQ ID NO: 1273 - protein, 1235 aa, Homo sapiens
MAHLELLLVENFKSWRGRQVIGPFRRFTCIIGPNGSGKSNVMDALSFVMGEKIANLRVKNIQELIHGAHIGKPISSSASVKIIYVEESGEEKTFARIIRGGCSEFRFNDNLVSRSVYIAELEKIGIIVKAQNCLVFQGTVESISVKKPKERTQFFEEISTSGELIGEYEEKKRKLQKAEEDAQFNFNKKKNIAAERRQAKLEKEEAERYQSLLEELKMNKIQLQLFQLYHNEKKIHLLNTKLEHVNRDLSVKRESLSHHENIVKARKKEHGMLTRQLQQTEKELKSVETLLNQKRPQYIKAKENTSHHLKKLDVAKKSIKDSEKQCSKQEDDIKALETELADLDAAWRSFEKQIEEEILHKKRDIELEASQLDRYKELKEQVRKKVATMTQQLEKLQWEQKTDEERLAFEKRRHGEVQGNLKQIKEQIEDHKKRIEKLEEYTKTCMDCLKEKKQQEETLVDEIEKTKSRMSEFNEELNLIRSELQNAGIDTHEGKRQQKRAEVLEHLKRLYPDSVFGRLFDLCHPIHKKYQLAVTKVFGRFITAIVVASEKVAKDCIRFLKEERAEPETFLALDYLDIKPINERLRELKGCKMVIDVIKTQFPQLKKVIQFVCGNGLVCETMEEARHIALSGPERQKTVALDGTLFLKSGVISGGSSDLKYKARCWDEKELKNLRDRRSQKIQELKGLMKTLRKETDLKQIQTLIQGTQTRLKYSQNELEMIKKKHLVAFYQEQSQLQSELLNIESQCIMLSEGIKERQRRIKEFQEKIDKVEDDIFQHFCEEIGVENIREFENKHVKRQQEIDQKRYFYKKMLTRLNVQLEYSRSHLKKKLNKINTLKETIQKGSEDIDHLKKAEENCLQTVNELMAKQQQLKDIRVTQNSSAEKVQTQIEEERKKFLAVDREVGKLQKEVVSIQTSLEQKRLEKHNLLLDCKVQDIEIILLSGSLDDIIEVEMGTEAESTQATIDIYEKEEAFEIDYSSLKEDLKALQSDQEIEAHLRLLLQQVASQEDILLKTAAPNLRALENLKTVRDKFQESTDAFEASRKEARLCRQEFEQVKKRRYDLFTQCFEHVSISIDQIYKKLCRNNSAQAFLSPENPEEPYLEGISYNCVAPGKRFMPMDNLSGGEKCVAALALLFAVHSFRPAPFFVLDEVDAALDNTNIGKVSSYIKEQTQDQFQMIVISLKEEFYSRADALIGIYPEYDDCMFSRVLTLDLSQYPDTEGQESSKRHGESR

SEQ ID NO: 1274 - protein, 1161 aa, Homo sapiens
MAHLELLLVENFKSWRGRQVIGPFRRFTCIIGPNGSGKSNVMDALSFVMGEKIANLRVKNIQELIHGAHIGKPISSSASVKIIYVEESGEEKTFARIIRGGCSEFRFNDNLVSRSVYIAELEKIGIIVKAQNCLVFQGTVESISVKKPKERTQFFEEISTSGELIGEYEEKKRKLQKAEEDAQFNFNKKKNIAAERRQAKLEKEEAERYQSLLEELKMNKIQLQLFQLYHNEKKIHLLNTKLEHVNRDLSVKRESLSHHENIVKARKKEHGMLTRQLQQTEKELKSVETLLNQKRPQYIKAKENTSHHLKKLDVAKKSIKDSEKQCSKQEDDIKALETELADLDAAWRSFEKQIEEEILHKKRDIELEASQLDRYKELKEQVRKKVATMTQQLEKLQWEQKTDEERLAFEKRRHGEVQGNLKQIKEQIEDHKKRIEKLEEYTKTCMDCLKEKKQQEETLVDEIEKTKSRMSEFNEELNLIRSELQNAGIDTHEGKRQQKRAEVLEHLKRLYPDSVFGRLFDLCHPIHKKYQLAVTKVFGRFITAIVVASEKVAKDCIRFLKEERAEPETFLALDYLDIKPINERLRELKGCKMVIDVIKTQFPQLKKVIQFVCGNGLVCETMEEARHIALSGPERQKTVALDGTLFLKSGVISGGSSDLKYKARCWDEKELKNLRDRRSQKIQELKGLMKTLRKETDLKQIQTLIQGTQTRLKYSQNELEMIKKKHLVAFYQEQSQLQSELLNIESQCIMLSEGIKERQRRIKEFQEKIDKVEDDIFQHFCEEIGVENIREFENKHVKRQQEIDQKRLEFEKQKTRLNVQLEYSRSHLKKKLNKINTLKETIQKGSEDIDHLKKAEENCLQTVNELMAKQQQLKDIRVTQNSSAEKVQTQIEEERKKFLAVDREVGKLQKEVVSIQTSLEQKRLEKHNLLLDCKVQDIEIILLSGSLDDIIEVEMGTEAESTQATIDIYEKEEAFEIDYSSLKEDLKALQSDQEIEAHLRLLLQQVASQEDILLKTAAPNLRALENLKTVRDKFQESTDAFEASRKEARLCRQEFEQVKKRRYDLFTQCFEHVSISIDQIYKKLCRNNSAQVSSYIKEQTQDQFQMIVISLKEEFYSRADALIGIYPEYDDCMFSRVLTLDLSQYPDTEGQESSKRHGESR

SEQ ID NO: 1275 - protein, 1235 aa, Homo sapiens
MAHLELLLVENFKSWRGRQVIGPFRRFTCIIGPNGSGKSNVMDALSFVMGEKIANLRVKNIQELIHGAHIGKPISSSASVKIIYVEESGEEKTFARIIRGGCSEFRFNDNLVSRSVYIAELEKIGIIVKAQNCLVFQGTVESISVKKPKERTQFFEEISTSGELIGEYEEKKRKLQKAEEDAQFNFNKKKNIAAERRQAKLEKEEAERYQSLLEELKMNKIQLQLFQLYHNEKKIHLLNTKLEHVNRDLSVKRESLSHHENIVKARKKEHGMLTRQLQQTEKELKSVETLLNQKRPQYIKAKENTSHHLKKLDVAKKSIKDSEKQCSKQEDDIKALETELADLDAAWRSFEKQIEEEILHKKRDIELEASQLDRYKELKEQVRKKVATMTQQLEKLQWEQKTDEERLAFEKRRHGEVQGNLKQIKEQIEDHKKRIEKLEEYTKTCMDCLKEKKQQEETLVDEIEKTKSRMSEFNEELNLIRSELQNAGIDTHEGKRQQKRAEVLEHLKRLYPDSVFGRLFDLCHPIHKKYQLAVTKVFGRFITAIVVASEKVAKDCIRFLKEERAEPETFLALDYLDIKPINERLRELKGCKMVIDVIKTQFPQLKKVIQFVCGNGLVCETMEEARHIALSGPERQKTVALDGTLFLKSGVISGGSSDLKYKARCWDEKELKNLRDRRSQKIQELKGLMKTLRKETDLKQIQTLIQGTQTRLKYSQNELEMIKKKHLVAFYQEQSQLQSELLNIESQCIMLSEGIKERQRRIKEFQEKIDKVEDDIFQHFCEEIGVENIREFENKHVKRQQEIDQKRLEFEKQKTRLNVQLEYSRSHLKKKLNKINTLKETIQKGSEDIDHLKKAEENCLQTVNELMAKQQQLKDIRVTQNSSAEKVQTQIEEERKKFLAVDREVGKLQKEVVSIQTSLEQKRLEKHNLLLDCKVQDIEIILLSGSLDDIIEVEMGTEAESTQATIDIYEKEEAFEIDYSSLKEDLKALQSDQEIEAHLRLLLQQVASQEDILLKTAAPNLRALENLKTVRDKFQESTDAFEASRKEARLCRQEFEQVKKRRYDLFTQCFEHVSISIDQIYKKLCRNNSAQAFLSPENPEEPYLEGISYNCVAPGKRFMPMDNLSGGEKCVAALALLFAVHSFRPAPFFVLDEVDAALDNTNIGKVSSYIKEQTQDQFQMIVISLKEEFYSRADALIGIYPEYDDCMFSRVLTLDLSQYPDTEGQESSKRHGESR

SEQ ID NO: 1276 - protein, 1196 aa, Homo sapiens
MGERAYHGAQVCSGTNPRKCQDLGDSILLLLGSFILLNVWINVVTLLWKHLKSSLRILFRHFFPKDKQPSGSHPICICSSVDPKNLCSKVSSRVHPRPGFLLRRVNHLDSWIPDTNDEKVSACCCVPPKCGHAGVPRESARGLYKAGMMGGGEAPQVTASKAQASLLSRPETSSQFPKMSKLDTGPCHLPQESKTKTPDCAPAEAPAQAQVHSPTHTPVCTPTHPWTRSTDHTAVHTPAHSWTHSKARTPEGTHSQAQDTSAQAQAHTSAPTPAQTPAHIQAHTPAPTPAKASAHTKAHTSAQAQTHSPPHTPEYTHSQAHSPEHTSAHSPAQAPMPVPAHPQAHAPEYTSAHAPAYIPDHSHLVRSSVPVPTSAPAPPGTLAPATTPVLAPTPAPVPASAPSPAPALVMALTTTPVPDPVPATTPAPIITPIPSTPPAFSHDLSTGHVVYDARREKQNFFHMSSPQNPEYSRKDLATLFRPQEGQDLVSSGISEQTKQCSGDSAKLPAGSILGYLELRNMEWKNSDDAKDKFPQTKTSPYCSFHPCSSEKNTDSQAPFYPKFLAYSRDTACAKTCFHSATTAQSSVCTLPPPFTLSLPLVPPRSFVPPQPTNHQRPSTLIQTPTVLPTSKSPQSILTSQFPIPSLFATISQPLIQPQCPECHESLGLTQDSGLQRTPGPSKDSRVPRNLDLAQNPDLYKNPGLTQDPGLHENPGLAPNQGLHEFPGLPQDSYLCQNPSPSQDFGLHKNSGITQDSHPQKNTGLTQEAGILRSPCLTQSPGLHKKTPFTQTSDLQRSSGFTQDSGIYRNLEPNQETVIYKNQDLSQATDHQKNLGSSKDSGGHKNTGNVQDPGVCSTAGLTEDSGSQKGPYVPQDSEVNKSSGVIQESFLHKSPGLVQTSGLPKCSGLTQNSGDYKNPGLIQDCGGHKVKGLTQDSNLPSLTQATKVERRFSLPQDVGVYRSSEHSQDSNLHKCPGINQDPGPHKDPALVQDSGLPKISGLTQESGPYKSSCLIPDPSLYKNPSPALGSDFVQLLSLLQTPKSTLSLMKSSVPEKAAQKEDAQRHVLWARVQLNENSCPSKAQVVSNDLQTFSEVPVLIELQSSSWRAGSQHGAYRPVDTVPSGYQNYRQMSMPTHINWKSHCPGPGTQAGHVVFDARQRRLAVGKDKCEALSPRRLHQEAPSNSGKPSRSGDIRM

SEQ ID NO: 1277 - protein, 72 aa, Homo sapiens
MSYQQQQCKQPCQPPPVCPTPKCPEPCPPPKCPEPCPPPKCPQPCPPQQCQQKCPPVTPSPPCQPKCPPKSK

SEQ ID NO: 1278 - protein, 258 aa, Homo sapiens
MKTPNAQEAEGQQTRAAAGRATGSANMTKKKVSQKKQRGRPSSQPRRNIVGCRISHGWKEGDEPITQWKGTVLDQVPINPSLYLVKYDGIDCVYGLELHRDERVLSLKILSDRVASSHISDANLANTIIGKAVEHMFEGEHGSKDEWRGMVLAQAPIMKAWFYITYEKDPVLYMYQLLDDYKEGDLRIMPESSESPPTEREPGGVVDGLIGKHVEYTKEDGSKRIGMVIHQVETKPSVYFIKFDDDFHIYVYDLVKKS

SEQ ID NO: 1279 - protein, 72 aa, Homo sapiens
MSYQQQQCKQPCQPPPVCPTPKCPEPCPPPKCPEPCPPPKCPQPCPPQQCQQKYPPVTPSPPCQSKYPPKSK

SEQ ID NO: 1280 - protein, 488 aa, Homo sapiens
MPEEMDKPLISLHLVDSDSSLAKVPDEAPKVGILGSGDFARSLATRLVGSGFKVVVGSRNPKRTARLFPSAAQVTFQEEAVSSPEVIFVAVFREHYSSLCSLSDQLAGKILVDVSNPTEQEHLQHRESNAEYLASLFPTCTVVKAFNVISAWTLQAGPRDGNRQVPICGDQPEAKRAVSEMALAMGFMPVDMGSLASAWEVEAMPLRLLPAWKVPTLLALGLFVCFYAYNFVRDVLQPYVQESQNKFFKLPVSVVNTTLPCVAYVLLSLVYLPGVLAAALQLRRGTKYQRFPDWLDHWLQHRKQIGLLSFFCAALHALYSFCLPLRRAHRYDLVNLAVKQVLANKSHLWVEEEVWRMEIYLSLGVLALGTLSLLAVTSLPSIANSLNWREFSFVQSSLGFVALVLSTLHTLTYGWTRAFEESRYKFYLPPTFTLTLLVPCVVILAKALFLLPCISRRLARIRRGWERESTIKFTLPTDHALAEKTSHV

SEQ ID NO: 1281 - protein, 498 aa, Homo sapiens
MSHQPAVATKMPEEMDKPLISLHLVDSDSSLAKVPDEAPKVGILGSGDFARSLATRLVGSGFKVVVGSRNPKRTARLFPSAAQVTFQEEAVSSPEVIFVAVFREHYSSLCSLSDQLAGKILVDVSNPTEQEHLQHRESNAEYLASLFPTCTVVKAFNVISAWTLQAGPRDGNRQVPICGDQPEAKRAVSEMALAMGFMPVDMGSLASAWEVEAMPLRLLPAWKVPTLLALGLFVCFYAYNFVRDVLQPYVQESQNKFFKLPVSVVNTTLPCVAYVLLSLVYLPGVLAAALQLRRGTKYQRFPDWLDHWLQHRKQIGLLSFFCAALHALYSFCLPLRRAHRYDLVNLAVKQVLANKSHLWVEEEVWRMEIYLSLGVLALGTLSLLAVTSLPSIANSLNWREFSFVQSSLGFVALVLSTLHTLTYGWTRAFEESRYKFYLPPTFTLTLLVPCVVILAKALFLLPCISRRLARIRRGWERESTIKFTLPTDHALAEKTSHV

SEQ ID NO: 1282 - protein, 487 aa, Homo sapiens
MPEEMDKPLISLHLVDSDSSLAKVPDEAPKVGILGSGDFARSLATRLVGSGFKVVVGSRNPKRTARLFPSAAQVTFQEEAVSSPEVIFVAVFREHYSSLCSLSDQLAGKILVDVSNPTEQEHLQHRESNAEYLASLFPTCTVVKAFNVISAWTLQAGPRDGNRQVPICGDQPEAKRAVSEMALAMGFMPVDMGSLASAWEVEAMPLRLLPAWKVPTLLALGLFVCFYAYNFVRDVLQPYVQESQNKFFKLPVSVVNTTLPCVAYVLLSLVYLPGVLAAALQLRRGTKYQRFPDWLDHWLQHRKQIGLLSFFCAALHALYSFCLPLRRAHRYDLVNLAVKQVLANKSHLWVEEVWRMEIYLSLGVLALGTLSLLAVTSLPSIANSLNWREFSFVQSSLGFVALVLSTLHTLTYGWTRAFEESRYKFYLPPTFTLTLLVPCVVILAKALFLLPCISRRLARIRRGWERESTIKFTLPTDHALAEKTSHV

SEQ ID NO: 1283 - protein, 456 aa, Homo sapiens
MPEEMDKPLISLHLVDSDSSLAKVPDEAPKVGILGSGDFARSLATRLVGSGFKVVVGSRNPKRTARLFPSAAQVTFQEEAVSSPEVIFVAVFREHYSSLCSLSDQLAGKILVDVSNPTEQEHLQHRESNAEYLASLFPTCTVVKAFNVISAWTLQAGPRDGNRQVPICGDQPEAKRAVSEMALAMGFMPVDMGSLASAWEVEAMPLRLLPAWKVPTLLALGLFVCFYAYNFVRDVLQPYVQESQNKFFKLPVSVVNTTLPCVAYVLLSLVYLPGVLAAALQLRRGTKYQRFPDWLDHWLQHRKQIGLLSFFCAALHALYSFCLPLRRAHRYDLVNLAVKQVLANKSHLWVEEVWRMEIYLSLGVLALGTLSLLAVTSLPSIANSLNWREFSFVQCVATSSAGNTGSGTRRPESQSQDPHLPAPHHQTSFLGPRSFCCSLVPVSTPYGHQEDLSWTR

SEQ ID NO: 1284 - protein, 592 aa, Homo sapiens
MAAAVAAALARLLAAFLLLAAQVACEYGMVHVVSQAGGPEGKDYCILYNPQWAHLPHDLSKASFLQLRNWTASLLCSAADLPARGFSNQIPLVARGNCTFYEKVRLAQGSGARGLLIVSRERLVPPGGNKTQYDEIGIPVALLSYKDMLDIFTRFGRTVRAALYAPKEPVLDYNMVIIFIMAVGTVAIGGYWAGSRDVKKRYMKHKRDDGPEKQEDEAVDVTPVMTCVFVVMCCSMLVLLYYFYDLLVYVVIGIFCLASATGLYSCLAPCVRRLPFGKCRIPNNSLPYFHKRPQARMLLLALFCVAVSVVWGVFRNEDQWAWVLQDALGIAFCLYMLKTIRLPTFKACTLLLLVLFLYDIFFVFITPFLTKSGSSIMVEVATGPSDSATREKLPMVLKVPRLNSSPLALCDRPFSLLGFGDILVPGLLVAYCHRFDIQVQSSRVYFVACTIAYGVGLLVTFVALALMQRGQPALLYLVPCTLVTSCAVALWRRELGVFWTGSGFAKVLPPSPWAPAPADGPQPPKDSATPLSPQPPSEEPATSPWPAEQSPKSRTSEEMGAGAPMREPGSPAESEGRDQAQPSPVTQPGASA

SEQ ID NO: 1285 - protein, 319 aa, Homo sapiens
MAAAVAAALARLLAAFLLLAAQVACEYGMVHVVSQAGGPEGKDYCILYNPQWAHLPHDLSKASFLQLRNWTASLLCSAADLPARGFSNQIPLVARGNCTFYEKVRLAQGSGARGLLIVSRERLVPPGGNKTQYDEIGIPVALLSYKDMLDIFTRFGRTVRAALYAPKEPVLDYNMVIIFIMAVGTVAIGGYWAGSRDVKKRYMKHKRDDGPEKQEDEAVDVTPVMTCVFVVMCCSMLVLLYYFYDLLVYVVIGIFCLASATGLYSCLAPCVRRLPFGKCRIPNNSLPYFHKRPQARMLLLALFCVAVSVVWGVFRNEDQ

SEQ ID NO: 1286 - protein, 511 aa, Homo sapiens
MAAAVAAALARLLAAFLLLAAQVACEYGMVHVVSQAGGPEGKDYCILYNPQWAHLPHDLSKASFLQLRNWTASLLCSAADLPARGFSNQIPLVARGNCTFYEKVRLAQGSGARGLLIVSRERLVPPGGNKTQYDEIGIPVALLSYKDMLDIFTRFGRTVRAALYAPKEPVLDYNMVIIFIMAVGTVAIGGYWAGSRDVKKRYMKHKRDDGPEKQEDEAVDVTPVMTCVFVVMCCSMLVLLYYFYDLLVYVVIGIFCLASATGLYSCLAPCVRRLPFGKCRIPNNSLPYFHKRPQARMLLLALFCVAVSVVWGVFRNEDQWAWVLQDALGIAFCLYMLKTIRLPTFKACTLLLLVLFLYDIFFVFITPFLTKSGSSIMVEVATGPSDSATREKLPMVLKVPRLNSSPLALCDRPFSLLGFGDILVPGLLVAYCHRFDIQVQSSRVYFVACTIAYGVGLLVTFVALALMQRGQPALLYLVPCTLVTSCAVALWRRELGVFWTGSGFAVNTSLL

SEQ ID NO: 1287 - protein, 458 aa, Homo sapiens
MTSPAKFKKDKEIIAEYDTQVKEIRAQLTEQMKCLDQQCELRVQLLQDLQDFFRKKAEIEMDYSRNLEKLAERFLAKTCSTKDQQFKKDQNVLSPVNCWNLLLNQVKRESRDHTTLSDIYLNNIIPRFVQVSEDSGRLFKKSKEVGQQLQDDLMKVLNELYSVMKTYHMYNADSISAQSKLKEAEKQEEKQIGKSVKQEDRQTPRSPDSTANVRIEEKHVRRSSVKKIEKMKEKRQAKYTENKLKAIKARNEYLLALEATNASVFKYYIHDLSDLIDCCDLGYHASLNRALRTFLSAELNLEQSKHEGLDAIENAVENLDATSDKQRLMEMYNNVFCPPMKFEFQPHMGDMASQLCAQQPVQSELLQRCQQLQSRLSTLKIENEEVKKTMEATLQTIQDIVTVEDFDVSDCFQYSNSMESVKSTVSETFMSKPSIAKRRANQQETEQFYFTVRECYGF

SEQ ID NO: 1288 - protein, 339 aa, Homo sapiens
MESRKDITNQEELWKMKPRRNLEEDDYLHKDTGETSMLKRPVLLHLHQTAHADEFDCPSELQHTQELFPQWHLPIKIAAIIASLTFLYTLLREVIHPLATSHQQYFYKIPILVINKVLPMVSITLLALVYLPGVIAAIVQLHNGTKYKKFPHWLDKWMLTRKQFGLLSFFFAVLHAIYSLSYPMRRSYRYKLLNWAYQQVQQNKEDAWIEHDVWRMEIYVSLGIVGLAILALLAVTSIPSVSDSLTWREFHYIQSKLGIVSLLLGTIHALIFAWNKWIDIKQFVWYTPPTFMIAVFLPIVVLIFKSILFLPCLRKKILKIRHGWEDVTKINKTEICSQL

SEQ ID NO: 1289 - protein, 2223 aa, Homo sapiens
MAPKKEKGGTVNTSSKIWEPSLIAAQFNQNDWQASIAFVVGNQIEDDLLIQALTVAVQVPQRKLFSMVSWQDILQQINEINTLVGSASSKKAKKPVGGNAPLYYEVLTAAKAIMDSGEKLTLPLIGKLLKFQLLQIKFKDQQRRENEKKVIEDKPKLEKDKGKAKSPKEKKAPSAKPAKGKGKDQPEANAPVKKTTQLKRRGEDDHTNRYIDDEPDDGAQHYIIVVGFNNPQLLAIMAELGIPITSVIKISSENYEPLQTHLAAVNQQQEVLLQSEDLEAEKLKKENAIKELKTFWKYLEPVLNNEKPETNLFDVARLEYMVKAADFPSDWSDGEMMLKLGTDIFENIACLMYDILDWKRQHQHYLESMQLINVPQVVNEKPVLEAMPTSEAPQPAVPAPGKKKAQYEEPQAPPPVTSVITTEVDMRYYNYLLNPIREEFISVPLILHCMLEQVVATEEDLVPPSLREPSPRADGLDHRIAAHIVSLLPSLCLSEREKKNLHDIFLSEEENESKAVPKGPLLLNYHDAHAHKKYALQDQKNFDPVQIEQEMQSKLPLWEFLQFPLPPPWNNTKRLATIHELMHFCTSDVLSWNEVERAFKVFTFESLKLSEVDEKGKLKPSGMMCGSDSEMFNIPWDNPARFAKQIRQQYVMKMNTQEAKQKADIKIKDRTLFVDQNLSMSVQDNESNREPSDPSQCDANNMKHSDLNNLKLSVPDNRQLLEQESIMKAQPQHESLEQTTNNEIKDDAVTKADSHEKKPKKMMVEADLEDIKKTQQRSLMDWSFTEHFKPKVLLQVLQEAHKQYRCVDSYYHTQDNSLLLVFHNPMNRQRLHCEYWNIALHSNVGFRNYLELVAKSIQDWITKEEAIYQESKMNEKIIRTRAELELKSSANAKLTSASKIFSIKESKSNKGISKTEISDQEKEKEKEKIPFILEGSLKAWKEEQHRLAEEERLREEKKAEKKGKEAGKKKGKDNAEKEDSRSLKKKSPYKEKSKEEQVKIQEVTEESPHQPEPKITYPFHGYNMGNIPTQISGSNYYLYPSDGGQIEVEKTMFEKGPTFIKVRVVKDNHNFMIHLNDPKEIVKKEEKGDYYLEEEEEGDEEQSLETEVSDAKNKAFSKFGSFSATLENGICLSISYYGSNGMAPEDKDPDLETILNIPSALTPTVVPVIVTVPQSKAKGKIKGKEKPKESLKEEEHPKEEEKKEEEVEPEPVLQETLDVPTFQSLNVSCPSGLLLTFIGQESTGQYVIDEEPTWDIMVRQSYPQRVKHYEFYKTVMPPAEQEASRVITSQGTVVKYMLDGSTQILFADGAVSRSPNSGLICPPSEMPATPHSGDLMDSISQQKSETIPSEITNTKKGKSHKSQSSMAHKGEIHDPPPEAVQTVTPVEVHIGTWFTTTPEGNRIGTKGLERIADLTPLLSFQATDPVNGTVMTTREDKVVIVERKDGTRIVDHADGTRITTFYQVYEDQIILPDDQETTEGPRTVTRQVKCMRVESSRYATVIANCEDSSCCATFGDGTTIIAKPQGTYQVLPPNTGSLYIDKDCSAVYCHESSSNIYYPFQKREQLRAGRYIMRHTSEVICEVLDPEGNTFQVMADGSISTILPEKKLEDDLNEKTEGYDSLSSMHLEKNHQQIYGEHVPRFFVMYADGSGMELLRDSDIEEYLSLAYKESNTVVLQEPVQEQPGTLTITVLRPFHEASPWQVKKEDTIVPPNLRSRSWETFPSVEKKTPGPPFGTQIWKGLCIESKQLVSAPGAILKSPSVLQMRQFIQHEVIKNEVKLRLQVSLKDYINYILKKEDELQEMMVKDSRTEEERGNAADLLKLVMSFPKMEETTKSHVTEVAAHLTDLFKQSLATPPKCPPDTFGKDFFEKTWRHTASSKRWKEKIDKTRKEIETTQNYLMDIKNRIIPPFFKSELNQLYQSQYNHLDSLSKKLPSFTKKNEDANETAVQDTSDLNLDFKPHKVSEQKSSSVPSLPKPEISADKKDFTAQNQTENLTKSPEEAESYEPVKIPTQSLLQDVAGQTRKEKVKLPHYLLSSKPKSQPLAKVQDSVGGKVNTSSVASAAINNAKSSLFGFHLLPSSVKFGVLKEGHTYATVVKLKNVGVDFCRFKVKQPPPSTGLKVTYKPGPVAAGMQTELNIELFATAVGEDGAKGSAHISHNIEIMTEHEVLFLPVEATVLTSSNYDKRPKDFPQGKENPMVQRTSTIYSSTLGVFMSRKVSPH

SEQ ID NO: 1290 - protein, 1099 aa, Homo sapiens
MSSQTKFKKDKEIIAEYEAQIKEIRTQLVEQFKCLEQQSESRLQLLQDLQEFFRRKAEIELEYSRSLEKLAERFSSKIRSSREHQFKKDQYLLSPVNCWYLVLHQTRRESRDHATLNDIFMNNVIVRLSQISEDVIRLFKKSKEIGLQMHEELLKVTNELYTVMKTYHMYHAESISAESKLKEAEKQEEKQFNKSGDLSMNLLRHEDRPQRRSSVKKIEKMKEKRQAKYSENKLKCTKARNDYLLNLAATNAAISKYYIHDVSDLIDCCDLGFHASLARTFRTYLSAEYNLETSRHEGLDVIENAVDNLDSRSDKHTVMDMCNQVFCPPLKFEFQPHMGDEVCQVSAQQPVQTELLMRYHQLQSRLATLKIENEEVRKTLDATMQTLQDMLTVEDFDVSDAFQHSRSTESVKSAASETYMSKINIAKRRANQQETEMFYFTKFKEYVNGSNLITKLQAKHDLLKQTLGEGERAECGTTRPPCLPPKPQKMRRPRPLSVYSHKLFNGSMEAFIKDSGQAIPLVVESCIRYINLYGLQQQGIFRVPGSQVEVNDIKNSFERGEDPLVDDQNERDINSVAGVLKLYFRGLENPLFPKERFQDLISTIKLENPAERVHQIQQILVTLPRVVIVVMRYLFAFLNHLSQYSDENMMDPYNLAICFGPTLMHIPDGQDPVSCQAHINEVIKTIIIHHEAIFPSPRELEGPVYEKCMAGGEEYCDSPHSEPGAIDEVDHDNGTEPHTSDEEVEQIEAIAKFDYMGRSPRELSFKKGASLLLYHRASEDWWEGRHNGVDGLIPHQYIVVQDMDDAFSDSLSQKADSEASSGPLLDDKASSKNDLQSPTEHISDYGFGGVMGRVRLRSDGAAIPRRRSGGDTHSPPRGLGPSIDTPPRAAACPSSPHKIPLTRGRIESPEKRRMATFGSAGSINYPDKKALSEGHSMRSTCGSTRHSSLGDHKSLEAEALAEDIEKTMSTALHELRELERQNTVKQAPDVVLDTLEPLKNPPGPVSSEPASPLHTIVIRDPDAAMRRSSSSSTEMMTTFKPALSARLAGAQLRPPPMRPVRPVVQHRSSSSSSSGVGSPAVTPTEKMFPNSSADKSGTM

SEQ ID NO: 1291 - protein, 1075 aa, Homo sapiens
MSSQTKFKKDKEIIAEYEAQIKEIRTQLVEQFKCLEQQSESRLQLLQDLQEFFRRKAEIELEYSRSLEKLAERFSSKIRSSREHQFKKDQYLLSPVNCWYLVLHQTRRESRDHATLNDIFMNNVIVRLSQISEDVIRLFKKSKEIGLQMHEELLKVTNELYTVMKTYHMYHAESISAESKLKEAEKQEEKQFNKSGDLSMNLLRHEDRPQRRSSVKKIEKMKEKRQAKYSENKLKCTKARNDYLLNLAATNAAISKYYIHDVSDLIDCCDLGFHASLARTFRTYLSAEYNLETSRHEGLDVIENAVDNLDSRSDKHTVMDMCNQVFCPPLKFEFQPHMGDEVCQVSAQQPVQTELLMRYHQLQSRLATLKIENEEVRKTLDATMQTLQDMLTVEDFDVSDAFQHSRSTESVKSAASETYMSKINIAKRRANQQETEMFYFTKFKEYVNGSNLITKLQAKHDLLKQTLGEGERAECGTTRGRRNARTRNQDSGQAIPLVVESCIRYINLYGLQQQGIFRVPGSQVEVNDIKNSFERGEDPLVDDQNERDINSVAGVLKLYFRGLENPLFPKERFQDLISTIKLENPAERVHQIQQILVTLPRVVIVVMRYLFAFLNHLSQYSDENMMDPYNLAICFGPTLMHIPDGQDPVSCQAHINEVIKTIIIHHEAIFPSPRELEGPVYEKCMAGGEEYCDSPHSEPGAIDEVDHDNGTEPHTSDEEVEQIEAIAKFDYMGRSPRELSFKKGASLLLYHRASEDWWEGRHNGVDGLIPHQYIVVQDMDDAFSDSLSQKADSEASSGPLLDDKASSKNDLQSPTEHISDYGFGGVMGRVRLRSDGAAIPRRRSGGDTHSPPRGLGPSIDTPPRAAACPSSPHKIPLTRGRIESPEKRRMATFGSAGSINYPDKKALSEGHSMRSTCGSTRHSSLGDHKSLEAEALAEDIEKTMSTALHELRELERQNTVKQAPDVVLDTLEPLKNPPGPVSSEPASPLHTIVIRDPDAAMRRSSSSSTEMMTTFKPALSARLAGAQLRPPPMRPVRPVVQHRSSSSSSSGVGSPAVTPTEKMFPNSSADKSGTM

SEQ ID NO: 1292 - protein, 487 aa, Homo sapiens
MSSQTKFKKDKEIIAEYEAQIKEIRTQLVEQFKCLEQQSESRLQLLQDLQEFFRRKAEIELEYSRSLEKLAERFSSKIRSSREHQFKKDQYLLSPVNCWYLVLHQTRRESRDHATLNDIFMNNVIVRLSQISEDVIRLFKKSKEIGLQMHEELLKVTNELYTVMKTYHMYHAESISAESKLKEAEKQEEKQFNKSGDLSMNLLRHEDRPQRRSSVKKIEKMKEKRQAKYSENKLKCTKARNDYLLNLAATNAAISKYYIHDVSDLIDCCDLGFHASLARTFRTYLSAEYNLETSRHEGLDVIENAVDNLDSRSDKHTVMDMCNQVFCPPLKFEFQPHMGDEVCQVSAQQPVQTELLMRYHQLQSRLATLKIENEEVRKTLDATMQTLQDMLTVEDFDVSDAFQHSRSTESVKSAASETYMSKINIAKRRANQQETEMFYFTKFKEYVNGSNLITKLQAKHDLLKQTLGEGERAECGTTRIQDKLYRL

SEQ ID NO: 1293 - protein, 299 aa, Homo sapiens
MEPPIPQSAPLTPNSVMVQPLLDSRMSHSRLQHPLTILPIDQVKTSHVENDYIDNPSLALTTGPKRTRGGAPELAPTPARCDQDVTHHWISFSGRPSSVSSSSSTSSDQRLLDHMAPPPVADQASPRAVRIQPKVVHCQPLDLKGPAVPPELDKHFLLCEACGKCKCKECASPRTLPSCWVCNQECLCSAQTLVNYGTCMCLVQGIFYHCTNEDDEGSCADHPCSCSRSNCCARWSFMGALSVVLPCLLCYLPATGCVKLAQRGYDRLRRPGCRCKHTNSVICKAASGDAKTSRPDKPF

SEQ ID NO: 1294 - protein, 106 aa, Homo sapiens
MEPPIPQSAPLTPNSVMVQPLLDSRMSHSRLQHPLTILPIDQVKTSHVENDYIDNPSLALTTGPKRTRGGAPELAPTPARCDQDVTHHWISFSGRPCSATCLPPAA

SEQ ID NO: 1295 - protein, 531 aa, Homo sapiens
MMDGRLLEHPHAQFGGSLGGVVGFPYPLGHHHVYELAGHQLQSAAAAASVPFSIDGLLGGSCAAAASVVNPTPLLPAACGVGGDGQPFKLSDSGDPDKESPGCKRRRTRTNFTGWQLEELEKAFNESHYPDVFMREALALRLDLVESRVQVWFQNRRAKWRKKENTKKGPGRPAHNSHPTTCSGEPMDPEEIARKELEKMEKKKRKHEKKLLKSQGRHLHSPGGLSLHSAPSSDSDSGGGGLSPEPPEPPPPAAKGPGAHASGAAGTAPAPPGEPPAPGTCDPAFYPSQRSGAGPQPRPGRPADKDAASCGPGAAVAAVERGAAGLPKASPFSVESLLSDSPPRRKAASNAAAAAAAGLDFAPGLPCAPRTLIGKGHFLLYPITQPLGFLVPQAALKGGAGLEPAPKDAPPAPAVPPAPPAQASFGAFSGPGGAPDSAFARRSPDAVASPGAPAPAPAPFRDLASAAATEGGGGDCADAGTAGPAPPPPAPSPRPGPRPPSPAEEPATCGVPEPGAAAGPSPPEGEELDMD

SEQ ID NO: 1296 - protein, 825 aa, Homo sapiens
MFSGFNVFRVGISFVIMCIFYMPTVNSLPELSPQKYFSTLQPGKASLAYFCQADSPRTSVFLEELNEAVRPLQDYGISVAKVNCVKEEISRYCGKEKDLMKAYLFKGNILLREFPTDTLFDVNAIVAHVLFALLFSEVKYITNLEDLQNIENALKGKANIIFSYVRAIGIPEHRAVMEAAFVYGTTYQFVLTTEIALLESIGSEDVEYAHLYFFHCKLVLDLTQQCRRTLMEQPLTTLNIHLFIKTMKAPLLTEVAEDPQQVSTVHLQLGLPLVFIVSQQATYEADRRTAEWVAWRLLGKAGVLLLLRDSLEVNIPQDANVVFKRAEEGVPVEFLVLHDVDLIISHVENNMHIEEIQEDEDNDMEGPDIDVQDDEVAETVFRDRKRKLPLELTVELTEETFNATVMASDSIVLFYAGWQAVSMAFLQSYIDVAVKLKGTSTMLLTRINCADWSDVCTKQNVTEFPIIKMYKKGENPVSYAGMLGTEDLLKFIQLNRISYPVNITSIQEAEEYLSGELYKDLILYSSVSVLGLFSPTMKTAKEDFSEAGNYLKGYVITGIYSEEDVLLLSTKYAASLPALLLARHTEGKIESIPLASTHAQDIVQIITDALLEMFPEITVENLPSYFRLQKPLLILFSDGTVNPQYKKAILTLVKQKYLDSFTPCWLNLKNTPVGRGILRAYFDPLPPLPLLVLVNLHSGGQVFAFPSDQAIIEENLVLWLKKLEAGLENHITILPAQEWKPPLPAYDFLSMIDAATSQRGTRKVPKCMKETDVQENDKEQHEDKSAVRKEPIETLRIKHWNRSNWFKEAEKSFRRDKELGCSKVN

SEQ ID NO: 1297 - protein, 976 aa, Homo sapiens
MEKQKPFALFVPPRSSSSQVSAVKPQTLGGDSTFFKSFNKCTEDDFEFPFAKTNLSKNGENIDSDPALQKVNFLPVLEQVGNSDCHYQEGLKDSDLENSEGLSRVYSKLYKEAEKIKKWKVSTEAELRQKESKLQENRKIIEAQRKAIQELQFGNEKVSLKLEEGIQENKDLIKENNATRHLCNLLKETCARSAEKTKKYEYEREETRQVYMDLNNNIEKMITAFEELRVQAENSRLEMHFKLKEDYEKIQHLEQEYKKEINDKEKQVSLLLIQITEKENKMKDLTFLLEESRDKVNQLEEKTKLQSENLKQSIEKQHHLTKELEDIKVSLQRSVSTQKALEEDLQIATKTICQLTEEKETQMEESNKARAAHSFVVTEFETTVCSLEELLRTEQQRLEKNEDQLKILTMELQKKSSELEEMTKLTNNKEVELEELKKVLGEKETLLYENKQFEKIAEELKGTEQELIGLLQAREKEVHDLEIQLTAITTSEQYYSKEVKDLKTELENEKLKNTELTSHCNKLSLENKELTQETSDMTLELKNQQEDINNNKKQEERMLKQIENLQETETQLRNELEYVREELKQKRDEVKCKLDKSEENCNNLRKQVENKNKYIEELQQENKALKKKGTAESKQLNVYEIKVNKLELELESAKQKFGEITDTYQKEIEDKKISEENLLEEVEKAKVIADEAVKLQKEIDKRCQHKIAEMVALMEKHKHQYDKIIEERDSELGLYKSKEQEQSSLRASLEIELSNLKAELLSVKKQLEIEREEKEKLKREAKENTATLKEKKDKKTQTFLLETPEIYWKLDSKAVPSQTVSRNFTSVDHGISKDKRDYLWTSAKNTLSTPLPKAYTVKTPTKPKLQQRENLNIPIEESKKKRKMAFEFDINSDSSETTDLLSMVSEEETLKTLYRNNNPPASHLCVKTPKKAPSSLTTPGSTLKFGAIRKMREDRWAVIAKMDRKKKLKEAEKLFV

SEQ ID NO: 1298 - protein, 589 aa, Homo sapiens
MPTVSVKRDLLFQALGRTYTDEEFDELCFEFGLELDEITSEKEIISKEQGNVKAAGASDVVLYKIDVPANRYDLLCLEGLVRGLQVFKERIKAPVYKRVMPDGKIQKLIITEETAKIRPFAVAAVLRNIKFTKDRYDSFIELQEKLHQNICRKRALVAIGTHDLDTLSGPFTYTAKRPSDIKFKPLNKTKEYTACELMNIYKTDNHLKHYLHIIENKPLYPVIYDSNGVVLSMPPIINGDHSRITVNTRNIFIECTGTDFTKAKIVLDIIVTMFSEYCENQFTVEAAEVVFPNGKSHTFPELAYRKEMVRADLINKKVGIRETPENLAKLLTRMYLKSEVIGDGNQIEIEIPPTRADIIHACDIVEDAAIAYGYNNIQMTLPKTYTIANQFPLNKLTELLRHDMAAAGFTEALTFALCSQEDIADKLGVDISATKAVHISNPKTAEFQVARTTLLPGLLKTIAANRKMPLPLKLFEISDIVIKDSNTDVGAKNYRHLCAVYYNKNPGFEIIHGLLDRIMQLLDVPPGEDKGGYVIKASEGPAFFPGRCAEIFARGQSVGKLGVLHPDVITKFELTMPCSSLEINVGPFL

SEQ ID NO: 1299 - protein, 490 aa, Homo sapiens
MPDGKIQKLIITEETAKIRPFAVAAVLRNIKFTKDRYDSFIELQEKLHQNICRKRALVAIGTHDLDTLSGPFTYTAKRPSDIKFKPLNKTKEYTACELMNIYKTDNHLKHYLHIIENKPLYPVIYDSNGVVLSMPPIINGDHSRITVNTRNIFIECTGTDFTKAKIVLDIIVTMFSEYCENQFTVEAAEVVFPNGKSHTFPELAYRKEMVRADLINKKVGIRETPENLAKLLTRMYLKSEVIGDGNQIEIEIPPTRADIIHACDIVEDAAIAYGYNNIQMTLPKTYTIANQFPLNKLTELLRHDMAAAGFTEALTFALCSQEDIADKLGVDISATKAVHISNPKTAEFQVARTTLLPGLLKTIAANRKMPLPLKLFEISDIVIKDSNTDVGAKNYRHLCAVYYNKNPGFEIIHGLLDRIMQLLDVPPGEDKGGYVIKASEGPAFFPGRCAEIFARGQSVGKLGVLHPDVITKFELTMPCSSLEINVGPFL

SEQ ID NO: 1300 - protein, 735 aa, Homo sapiens
MAEPLLRKTFSRLRGREKLPRKKSDAKERGHPAQRPEPSPPEPEPQAPEGSQAGAEGPSSPEASRSPARGAYLQSLEPSSRRWVLGGAKPAEDTSLGPGVPGTGEPAGEIWYNPIPEEDPRPPAPEPPGPQPGSAESEGLAPQGAAPASPPTKASRTKSPGPARRLSIKMKKLPELRRRLSLRGPRAGRERERAAPAGSVISRYHLDSSVGGPGPAAGPGGTRSPRAGYLSDGDSPERPAGPPSPTSFRPYEVGPAARAPPAALWGRLSLHLYGLGGLRPAPGATPRDLCCLLQVDGEARARTGPLRGGPDFLRLDHTFHLELEAARLLRALVLAWDPGVRRHRPCAQGTVLLPTVFRGCQAQQLAVRLEPQGLLYAKLTLSEQQEAPATAEPRVFGLPLPLLVERERPPGQVPLIIQKCVGQIERRGLRVVGLYRLCGSAAVKKELRDAFERDSAAVCLSEDLYPDINVITGILKDYLRELPTPLITQPLYKVVLEAMARDPPNRVPPTTEGTRGLLSCLPDVERATLTLLLDHLRLVSSFHAYNRMTPQNLAVCFGPVLLPARQAPTRPRARSSGPGLASAVDFKHHIEVLHYLLQSWPDPRLPRQSPDVAPYLRPKRQPPLHLPLADPEVVTRPRGRGGPESPPSNRYAGDWSVCGRDFLPCGRDFLSGPDYDHVTGSDSEDEDEEVGEPRVTGDFEDDFDAPFNPHLNLKDFDALILDLERELSKQINVCL

SEQ ID NO: 1301 - protein, 668 aa, Homo sapiens
MAEPLLRKTFSRLRGREKLPRKKSDAKERGPGVPGTGEPAGEIWYNPIPEEDPRPPAPEPPGPQPGSAESEGLAPQGAAPASPPTKASRTKSPGPARRLSIKMKKLPELRRRLSLRGPRAGRERERAAPAGSVISRYHLDSSVGGPGPAAGPGGTRSPRAGYLSDGDSPERPAGPPSPTSFRPYEVGPAARAPPAALWGRLSLHLYGLGGLRPAPGATPRDLCCLLQVDGEARARTGPLRGGPDFLRLDHTFHLELEAARLLRALVLAWDPGVRRHRPCAQGTVLLPTVFRGCQAQQLAVRLEPQGLLYAKLTLSEQQEAPATAEPRVFGLPLPLLVERERPPGQVPLIIQKCVGQIERRGLRVVGLYRLCGSAAVKKELRDAFERDSAAVCLSEDLYPDINVITGILKDYLRELPTPLITQPLYKVVLEAMARDPPNRVPPTTEGTRGLLSCLPDVERATLTLLLDHLRLVSSFHAYNRMTPQNLAVCFGPVLLPARQAPTRPRARSSGPGLASAVDFKHHIEVLHYLLQSWPDPRLPRQSPDVAPYLRPKRQPPLHLPLADPEVVTRPRGRGGPESPPSNRYAGDWSVCGRDFLPCGRDFLSGPDYDHVTGSDSEDEDEEVGEPRVTGDFEDDFDAPFNPHLNLKDFDALILDLERELSKQINVCL

SEQ ID NO: 1302 - protein, 501 aa, Homo sapiens
MPSASASRKSQEKPREIMDAAEDYAKERYGISSMIQSQEKPDRVLVRVRDLTIQKADEVVWVRARVHTSRAKGKQCFLVLRQQQFNVQALVAVGDHASKQMVKFAANINKESIVDVEGVVRKVNQKIGSCTQQDVELHVQKIYVISLAEPRLPLQLDDAVRPEAEGEEEGRATVNQDTRLDNRVIDLRTSTSQAVFRLQSGICHLFRETLINKGFVEIQTPKIISAASEGGANVFTVSYFKNNAYLAQSPQLYKQMCICADFEKVFSIGPVFRAEDSNTHRHLTEFVGLDIEMAFNYHYHEVMEEIADTMVQIFKGLQERFQTEIQTVNKQFPCEPFKFLEPTLRLEYCEALAMLREAGVEMGDEDDLSTPNEKLLGHLVKEKYDTDFYILDKYPLAVRPFYTMPDPRNPKQSNSYDMFMRGEEILSGAQRIHDPQLLTERALHHGIDLEKIKAYIDSFRFGAPPHAGGGIGLERVTMLFLGLHNVRQTSMFPRDPKRLTP

SEQ ID NO: 1303 - protein, 401 aa, Homo sapiens
MVKFAANINKESIVDVEGVVRKVNQKIGSCTQQDVELHVQKIYVISLAEPRLPLQLDDAVRPEAEGEEEGRATVNQDTRLDNRVIDLRTSTSQAVFRLQSGICHLFRETLINKGFVEIQTPKIISAASEGGANVFTVSYFKNNAYLAQSPQLYKQMCICADFEKVFSIGPVFRAEDSNTHRHLTEFVGLDIEMAFNYHYHEVMEEIADTMVQIFKGLQERFQTEIQTVNKQFPCEPFKFLEPTLRLEYCEALAMLREAGVEMGDEDDLSTPNEKLLGHLVKEKYDTDFYILDKYPLAVRPFYTMPDPRNPKQSNSYDMFMRGEEILSGAQRIHDPQLLTERALHHGIDLEKIKAYIDSFRFGAPPHAGGGIGLERVTMLFLGLHNVRQTSMFPRDPKRLTP

SEQ ID NO: 1304 - protein, 549 aa, Homo sapiens
MALAAAAAAAAAGVSQAAVLGFLQEHGGKVRNSELLSRFKPLLDAGDPRGRAARRDRFKQFVNNVAVVKELDGVKFVVLRKKPRPPEPEPAPFGPPGAAAQPSKPTSTVLPRSASAPGAPPLVRVPRPVEPPGDLGLPTEPQDTPGGPASEPAQPPGERSADPPLPALELAQATERPSADAAPPPRAPSEAASPCSDPPDAEPGPGAAKGPPQQKPCMLPVRCVPAPATLRLRAEEPGLRRQLSEEPSPRSSPLLLRRLSVEESGLGLGLGPGRSPHLRRLSRAGPRLLSPDAEELPAAPPPSAVPLEPSEHEWLVRTAGGRWTHQLHGLLLRDRGLAAKRDFMSGFTALHWAAKSGDGEMALQLVEVARRSGAPVDVNARSHGGYTPLHLAALHGHEDAAVLLVVRLGAQVHVRDHSGRRAYQYLRPGSSYALRRLLGDPGLRGTTEPDATGGGSGSLAARRPVQVAATILSSTTSAFLGVLADDLMLQDLARGLKKSSSFSKFLSASPMAPRKKTKIRGGLPAFSEISRRPTPGPLAGLVPSFPPTT

SEQ ID NO: 1305 - protein, 442 aa, Homo sapiens
MAGAATGSRTPGRSELVEGCGWRCPEHGDRVAELFCRRCRRCVCALCPVLGAHRGHPVGLALEAAVHVQKLSQECLKQLAIKKQQHIDNITQIEDATEKLKANAESSKTWLKGKFTELRLLLDEEEALAKKFIDKNTQLTLQVYREQADSCREQLDIMNDLSNRVWSISQEPDPVQRLQAYTATEQEMQQQMSLGELCHPVPLSFEPVKSFFKGLVEAVESTLQTPLDIRLKESINCQLSDPSSTKPGTLLKTSPSPERSLLLKYARTPTLDPDTMHARLRLSADRLTVRCGLLGSLGPVPVLRFDALWQVLARDCFATGRHYWEVDVQEAGAGWWVGAAYASLRRRGASAAARLGCNRQSWCLKRYDLEYWAFHDGQRSRLRPRDDLDRLGVFLDYEAGVLAFYDVTGGMSHLHTFRATFQEPLYPALRLWEGAISIPRLP

SEQ ID NO: 1306 - protein, 253 aa, Homo sapiens
MAGAATGSRTPGRSELVEGCGWRCPEHGDRVAELFCRRCRRCVCALCPVLGAHRGHPVGLALEAAVHVQKLSQECLKQLAIKKQQHIDNITQIEDATEKLKANAESSKTWLKGKFTELRLLLDEEEALAKKFIDKNTQLTLQVYREQADSCREQLDIMNDLSNRVWSISQEPDPVQRLQAYTATEQEMQQQMSLGELCHPVPLSFEPVKSFFKGLVEAVESTLQTPLDIRLSPTNHAYSALKVSSPRLVSNRP

SEQ ID NO: 1307 - protein, 406 aa, Homo sapiens
MAGAATGSRTPGRSELVEGCGWRCPEHGDRVAELFCRRCRRCVCALCPVLGAHRGHPVGLALEAAVHVQKLSQECLKQLAIKKQQHIDNITQIEDATEKLKANAESSKTWLKGKFTELRLLLDEEEALAKKFIDKNTQLTLQVYREQADSCREQLDIMNDLSNRVWSISQEPDPVQRLQAYTATEQEMQQQMSLGELCHPVPLSFEPVKSFFKGLVEAVESTLQTPLDIRLKESINCQLSDPSSTKPGTLLKTSPSPERSLLLKYARTPTLDPDTMHARLRLSADRLTVRCGLLGSLGPVPVLRFDALWQVLARDCFATGRHYWEVDVQEAGAGWWVGAAYASLRRRGASAAARLGCNRQSWCLKRYDLEYWAFHDGQRSACGPATTSTGSASSWTTRPASSPSTT

SEQ ID NO: 1308 - protein, 222 aa, Homo sapiens
MNDLSNRVWSISQEPDPVQRLQAYTATEQEMQQQMSLGELCHPVPLSFEPVKSFFKGLVEAVESTLQTPLDIRLKESINCQLSDPSSTKPGTLLKTSPSPERSLLLKSCWAAWGPCPCCGSTRSGKCWLVTASPPAATTGRLTCRRRAPAGGWARPTPPFGAAGPRPPPAWAATASPGASSATTLSTGPSTTASAAACGPATTSTGSASSWTTRPASSPSTT

SEQ ID NO: 1309 - protein, 208 aa, Homo sapiens
MASSLLAGERLVRALGPGGELEPERLPRKLRAELEAALGKKHKGGDSSSGPQRLVSFRLIRDLHQHLRERDSKLYLHELLEGSEIYLPEVVKPPRNPELVARLEKIKIQLANEEYKRITRNVTCQDTRHGGTLSDLGKQVRSLKALVITIFNFIVTVVAAFVCTYLGSQYIFTEMASRVLAALIVASVVGLAELYVMVRAMEGELGEL

SEQ ID NO: 1310 - protein, 444 aa, Homo sapiens
MREIVHLQAGQCGNQIGAKFWEVISDEHGIDPTGTYHGDSDLQLERINVYYNEATGGNYVPRAVLVDLEPGTMDSVRSGPFGQIFRPDNFVFGQSGAGNNWAKGHYTEGAELVDAVLDVVRKEAESCDCLQGFQLTHSLGGGTGSGMGTLLISKIREEFPDRIMNTFSVVPSPKVSDTVVEPYNATLSVHQLVENTDETYCIDNEALYDICFRTLKLTTPTYGDLNHLVSATMSGVTTCLRFPGQLNADLRKLAVNMVPFPRLHFFMPGFAPLTSRGSQQYRALTVPELTQQMFDAKNMMAACDPRHGRYLTVAAVFRGRMSMKEVDEQMLSVQSKNSSYFVEWIPNNVKTAVCDIPPRGLKMAATFIGNSTAIQELFKRISEQFTAMFRRKAFLHWYTGEGMDEMEFTEAESNMNDLVSEYQQYQDATAEEGEFEEEAEEEVA

SEQ ID NO: 1311 - protein, 1032 aa, Homo sapiens
MGFCRSALHPLSLLVQAIMLAMTLALGTLPAFLPCELQPHGLVNCNWLFLKSVPHFSMAAPRGNVTSLSLSSNRIHHLHDSDFAHLPSLRHLNLKWNCPPVGLSPMHFPCHMTIEPSTFLAVPTLEELNLSYNNIMTVPALPKSLISLSLSHTNILMLDSASLAGLHALRFLFMDGNCYYKNPCRQALEVAPGALLGLGNLTHLSLKYNNLTVVPRNLPSSLEYLLLSYNRIVKLAPEDLANLTALRVLDVGGNCRRCDHAPNPCMECPRHFPQLHPDTFSHLSRLEGLVLKDSSLSWLNASWFRGLGNLRVLDLSENFLYKCITKTKAFQGLTQLRKLNLSFNYQKRVSFAHLSLAPSFGSLVALKELDMHGIFFRSLDETTLRPLARLPMLQTLRLQMNFINQAQLGIFRAFPGLRYVDLSDNRISGASELTATMGEADGGEKVWLQPGDLAPAPVDTPSSEDFRPNCSTLNFTLDLSRNNLVTVQPEMFAQLSHLQCLRLSHNCISQAVNGSQFLPLTGLQVLDLSHNKLDLYHEHSFTELPRLEALDLSYNSQPFGMQGVGHNFSFVAHLRTLRHLSLAHNNIHSQVSQQLCSTSLRALDFSGNALGHMWAEGDLYLHFFQGLSGLIWLDLSQNRLHTLLPQTLRNLPKSLQVLRLRDNYLAFFKWWSLHFLPKLEVLDLAGNQLKALTNGSLPAGTRLRRLDVSCNSISFVAPGFFSKAKELRELNLSANALKTVDHSWFGPLASALQILDVSANPLHCACGAAFMDFLLEVQAAVPGLPSRVKCGSPGQLQGLSIFAQDLRLCLDEALSWDCFALSLLAVALGLGVPMLHHLCGWDLWYCFHLCLAWLPWRGRQSGRDEDALPYDAFVVFDKTQSAVADWVYNELRGQLEECRGRWALRLCLEERDWLPGKTLFENLWASVYGSRKTLFVLAHTDRVSGLLRASFLLAQQRLLEDRKDVVVLVILSPDGRRSRYVRLRQRLCRQSVLLWPHQPSGQRSFWAQLGMALTRDNHHFYNRNFCQGPTAE

SEQ ID NO: 1312 - protein, 975 aa, Homo sapiens
MAAPRGNVTSLSLSSNRIHHLHDSDFAHLPSLRHLNLKWNCPPVGLSPMHFPCHMTIEPSTFLAVPTLEELNLSYNNIMTVPALPKSLISLSLSHTNILMLDSASLAGLHALRFLFMDGNCYYKNPCRQALEVAPGALLGLGNLTHLSLKYNNLTVVPRNLPSSLEYLLLSYNRIVKLAPEDLANLTALRVLDVGGNCRRCDHAPNPCMECPRHFPQLHPDTFSHLSRLEGLVLKDSSLSWLNASWFRGLGNLRVLDLSENFLYKCITKTKAFQGLTQLRKLNLSFNYQKRVSFAHLSLAPSFGSLVALKELDMHGIFFRSLDETTLRPLARLPMLQTLRLQMNFINQAQLGIFRAFPGLRYVDLSDNRISGASELTATMGEADGGEKVWLQPGDLAPAPVDTPSSEDFRPNCSTLNFTLDLSRNNLVTVQPEMFAQLSHLQCLRLSHNCISQAVNGSQFLPLTGLQVLDLSHNKLDLYHEHSFTELPRLEALDLSYNSQPFGMQGVGHNFSFVAHLRTLRHLSLAHNNIHSQVSQQLCSTSLRALDFSGNALGHMWAEGDLYLHFFQGLSGLIWLDLSQNRLHTLLPQTLRNLPKSLQVLRLRDNYLAFFKWWSLHFLPKLEVLDLAGNQLKALTNGSLPAGTRLRRLDVSCNSISFVAPGFFSKAKELRELNLSANALKTVDHSWFGPLASALQILDVSANPLHCACGAAFMDFLLEVQAAVPGLPSRVKCGSPGQLQGLSIFAQDLRLCLDEALSWDCFALSLLAVALGLGVPMLHHLCGWDLWYCFHLCLAWLPWRGRQSGRDEDALPYDAFVVFDKTQSAVADWVYNELRGQLEECRGRWALRLCLEERDWLPGKTLFENLWASVYGSRKTLFVLAHTDRVSGLLRASFLLAQQRLLEDRKDVVVLVILSPDGRRSRYVRLRQRLCRQSVLLWPHQPSGQRSFWAQLGMALTRDNHHFYNRNFCQGPTAE

SEQ ID NO: 1313 - protein, 1055 aa, Homo sapiens
MPMKWSGWRWSWGPATHTALPPPQGFCRSALHPLSLLVQAIMLAMTLALGTLPAFLPCELQPHGLVNCNWLFLKSVPHFSMAAPRGNVTSLSLSSNRIHHLHDSDFAHLPSLRHLNLKWNCPPVGLSPMHFPCHMTIEPSTFLAVPTLEELNLSYNNIMTVPALPKSLISLSLSHTNILMLDSASLAGLHALRFLFMDGNCYYKNPCRQALEVAPGALLGLGNLTHLSLKYNNLTVVPRNLPSSLEYLLLSYNRIVKLAPEDLANLTALRVLDVGGNCRRCDHAPNPCMECPRHFPQLHPDTFSHLSRLEGLVLKDSSLSWLNASWFRGLGNLRVLDLSENFLYKCITKTKAFQGLTQLRKLNLSFNYQKRVSFAHLSLAPSFGSLVALKELDMHGIFFRSLDETTLRPLARLPMLQTLRLQMNFINQAQLGIFRAFPGLRYVDLSDNRISGASELTATMGEADGGEKVWLQPGDLAPAPVDTPSSEDFRPNCSTLNFTLDLSRNNLVTVQPEMFAQLSHLQCLRLSHNCISQAVNGSQFLPLTGLQVLDLSHNKLDLYHEHSFTELPRLEALDLSYNSQPFGMQGVGHNFSFVAHLRTLRHLSLAHNNIHSQVSQQLCSTSLRALDFSGNALGHMWAEGDLYLHFFQGLSGLIWLDLSQNRLHTLLPQTLRNLPKSLQVLRLRDNYLAFFKWWSLHFLPKLEVLDLAGNQLKALTNGSLPAGTRLRRLDVSCNSISFVAPGFFSKAKELRELNLSANALKTVDHSWFGPLASALQILDVSANPLHCACGAAFMDFLLEVQAAVPGLPSRVKCGSPGQLQGLSIFAQDLRLCLDEALSWDCFALSLLAVALGLGVPMLHHLCGWDLWYCFHLCLAWLPWRGRQSGRDEDALPYDAFVVFDKTQSAVADWVYNELRGQLEECRGRWALRLCLEERDWLPGKTLFENLWASVYGSRKTLFVLAHTDRVSGLLRASFLLAQQRLLEDRKDVVVLVILSPDGRRSRYVRLRQRLCRQSVLLWPHQPSGQRSFWAQLGMALTRDNHHFYNRNFCQGPTAE

SEQ ID NO: 1314 - protein, 1056 aa, Homo sapiens
MLYSSCKSRLLDSVEQDFHLEIAKKGFCRSALHPLSLLVQAIMLAMTLALGTLPAFLPCELQPHGLVNCNWLFLKSVPHFSMAAPRGNVTSLSLSSNRIHHLHDSDFAHLPSLRHLNLKWNCPPVGLSPMHFPCHMTIEPSTFLAVPTLEELNLSYNNIMTVPALPKSLISLSLSHTNILMLDSASLAGLHALRFLFMDGNCYYKNPCRQALEVAPGALLGLGNLTHLSLKYNNLTVVPRNLPSSLEYLLLSYNRIVKLAPEDLANLTALRVLDVGGNCRRCDHAPNPCMECPRHFPQLHPDTFSHLSRLEGLVLKDSSLSWLNASWFRGLGNLRVLDLSENFLYKCITKTKAFQGLTQLRKLNLSFNYQKRVSFAHLSLAPSFGSLVALKELDMHGIFFRSLDETTLRPLARLPMLQTLRLQMNFINQAQLGIFRAFPGLRYVDLSDNRISGASELTATMGEADGGEKVWLQPGDLAPAPVDTPSSEDFRPNCSTLNFTLDLSRNNLVTVQPEMFAQLSHLQCLRLSHNCISQAVNGSQFLPLTGLQVLDLSHNKLDLYHEHSFTELPRLEALDLSYNSQPFGMQGVGHNFSFVAHLRTLRHLSLAHNNIHSQVSQQLCSTSLRALDFSGNALGHMWAEGDLYLHFFQGLSGLIWLDLSQNRLHTLLPQTLRNLPKSLQVLRLRDNYLAFFKWWSLHFLPKLEVLDLAGNQLKALTNGSLPAGTRLRRLDVSCNSISFVAPGFFSKAKELRELNLSANALKTVDHSWFGPLASALQILDVSANPLHCACGAAFMDFLLEVQAAVPGLPSRVKCGSPGQLQGLSIFAQDLRLCLDEALSWDCFALSLLAVALGLGVPMLHHLCGWDLWYCFHLCLAWLPWRGRQSGRDEDALPYDAFVVFDKTQSAVADWVYNELRGQLEECRGRWALRLCLEERDWLPGKTLFENLWASVYGSRKTLFVLAHTDRVSGLLRASFLLAQQRLLEDRKDVVVLVILSPDGRRSRYVRLRQRLCRQSVLLWPHQPSGQRSFWAQLGMALTRDNHHFYNRNFCQGPTAE

SEQ ID NO: 1315 - protein, 1017 aa, Homo sapiens
MAIMLAMTLALGTLPAFLPCELQPHGLVNCNWLFLKSVPHFSMAAPRGNVTSLSLSSNRIHHLHDSDFAHLPSLRHLNLKWNCPPVGLSPMHFPCHMTIEPSTFLAVPTLEELNLSYNNIMTVPALPKSLISLSLSHTNILMLDSASLAGLHALRFLFMDGNCYYKNPCRQALEVAPGALLGLGNLTHLSLKYNNLTVVPRNLPSSLEYLLLSYNRIVKLAPEDLANLTALRVLDVGGNCRRCDHAPNPCMECPRHFPQLHPDTFSHLSRLEGLVLKDSSLSWLNASWFRGLGNLRVLDLSENFLYKCITKTKAFQGLTQLRKLNLSFNYQKRVSFAHLSLAPSFGSLVALKELDMHGIFFRSLDETTLRPLARLPMLQTLRLQMNFINQAQLGIFRAFPGLRYVDLSDNRISGASELTATMGEADGGEKVWLQPGDLAPAPVDTPSSEDFRPNCSTLNFTLDLSRNNLVTVQPEMFAQLSHLQCLRLSHNCISQAVNGSQFLPLTGLQVLDLSHNKLDLYHEHSFTELPRLEALDLSYNSQPFGMQGVGHNFSFVAHLRTLRHLSLAHNNIHSQVSQQLCSTSLRALDFSGNALGHMWAEGDLYLHFFQGLSGLIWLDLSQNRLHTLLPQTLRNLPKSLQVLRLRDNYLAFFKWWSLHFLPKLEVLDLAGNQLKALTNGSLPAGTRLRRLDVSCNSISFVAPGFFSKAKELRELNLSANALKTVDHSWFGPLASALQILDVSANPLHCACGAAFMDFLLEVQAAVPGLPSRVKCGSPGQLQGLSIFAQDLRLCLDEALSWDCFALSLLAVALGLGVPMLHHLCGWDLWYCFHLCLAWLPWRGRQSGRDEDALPYDAFVVFDKTQSAVADWVYNELRGQLEECRGRWALRLCLEERDWLPGKTLFENLWASVYGSRKTLFVLAHTDRVSGLLRASFLLAQQRLLEDRKDVVVLVILSPDGRRSRYVRLRQRLCRQSVLLWPHQPSGQRSFWAQLGMALTRDNHHFYNRNFCQGPTAE

SEQ ID NO: 1316 - protein, 275 aa, Homo sapiens
MSTIGSFEGFQAVSLKQEGDDQPSETDHLSMEEEDPMPRQISRQSSVTESTLYPNPYHQPYISRKYFATRPGAIETAMEDLKGHVAETSGETIQGFWLLTKIDHWNNEKERILLVTDKTLLICKYDFIMLSCVQLQRIPLSAVYRICLGKFTFPGMSLDKRQGEGLRIYWGSPEEQSLLSRWNPWSTEVPYATFTEHPMKYTSEKFLEICKLSGFMSKLVPAIQNAHKNSTGSGRGKKLMVLTEPILIETYTGLMSFIGNRNKLGYSLARGSIGF

SEQ ID NO: 1317 - protein, 317 aa, Homo sapiens
MAKNPPENCEDCHILNAEAFKSKKICKSLKICGLVFGILALTLIVLFWGSKHFWPEVPKKAYDMEHTFYSNGEKKKIYMEIDPVTRTEIFRSGNGTDETLEVHDFKNGYTGIYFVGLQKCFIKTQIKVIPEFSEPEEEIDENEEITTTFFEQSVIWVPAEKPIENRDFLKNSKILEICDNVTMYWINPTLISVSELQDFEEEGEDLHFPANEKKGIEQNEQWVVPQVKVEKTRHARQASEEELPINDYTENGIEFDPMLDERGYCCIYCRRGNRYCRRVCEPLLGYYPYPYCYQGGRVICRVIMPCNWWVARMLGRV

SEQ ID NO: 1318 - protein, 207 aa, Homo sapiens
MAKNPPENCEDCHILNAEAFKSKKICKSLKICGLVFGILALTLIVLFWGSKHFWPEVPKKAYDMEHTFYSNGEKKKIYMEIDPVTRTEIFRSGNGTDETLEVHDFKNGYTGIYFVGLQKCFIKTQIKVIPEFSEPEEEIDENEEITTTFFEQSVIWVPAEKPIENRDFLKNSKILEICDNVTMYWINPTLISGMTFLSSSSSYFLRQ

SEQ ID NO: 1319 - protein, 254 aa, Homo sapiens
MEHTFYSNGEKKKIYMEIDPVTRTEIFRSGNGTDETLEVHDFKNGYTGIYFVGLQKCFIKTQIKVIPEFSEPEEEIDENEEITTTFFEQSVIWVPAEKPIENRDFLKNSKILEICDNVTMYWINPTLISVSELQDFEEEGEDLHFPANEKKGIEQNEQWVVPQVKVEKTRHARQASEEELPINDYTENGIEFDPMLDERGYCCIYCRRGNRYCRRVCEPLLGYYPYPYCYQGGRVICRVIMPCNWWVARMLGRV

SEQ ID NO: 1320 - protein, 704 aa, Homo sapiens
MARELRALLLWGRRLRPLLRAPALAAVPGGKPILCPRRTTAQLGPRRNPAWSLQAGRLFSTQTAEDKEEPLHSIISSTESVQGSTSKHEFQAETKKLLDIVARSLYSEKEVFIRELISNASDALEKLRHKLVSDGQALPEMEIHLQTNAEKGTITIQDTGIGMTQEELVSNLGTIARSGSKAFLDALQNQAEASSKIIGQFGVGFYSAFMVADRVEVYSRSAAPGSLGYQWLSDGSGVFEIAEASGVRTGTKIIIHLKSDCKEFSSEARVRDVVTKYSNFVSFPLYLNGRRMNTLQAIWMMDPKDVREWQHEEFYRYVAQAHDKPRYTLHYKTDAPLNIRSIFYVPDMKPSMFDVSRELGSSVALYSRKVLIQTKATDILPKWLRFIRGVVDSEDIPLNLSRELLQESALIRKLRDVLQQRLIKFFIDQSKKDAEKYAKFFEDYGLFMREGIVTATEQEVKEDIAKLLRYESSALPSGQLTSLSEYASRMRAGTRNIYYLCAPNRHLAEHSPYYEAMKKKDTEVLFCFEQFDELTLLHLREFDKKKLISVETDIVVDHYKEEKFEDRSPAAECLSEKETEELMAWMRNVLGSRVTNVKVTLRLDTHPAMVTVLEMGAARHFLRMQQLAKTQEERAQLLQPTLEINPRHALIKKLNQLRASEPGLAQLLVDQIYENAMIAAGLVDDPRAMVGRLNELLVKALERH

SEQ ID NO: 1321 - protein, 651 aa, Homo sapiens
MARELRALLLWGRRLRPLLRAPALAAVPGGSTSKHEFQAETKKLLDIVARSLYSEKEVFIRELISNASDALEKLRHKLVSDGQALPEMEIHLQTNAEKGTITIQDTGIGMTQEELVSNLGTIARSGSKAFLDALQNQAEASSKIIGQFGVGFYSAFMVADRVEVYSRSAAPGSLGYQWLSDGSGVFEIAEASGVRTGTKIIIHLKSDCKEFSSEARVRDVVTKYSNFVSFPLYLNGRRMNTLQAIWMMDPKDVREWQHEEFYRYVAQAHDKPRYTLHYKTDAPLNIRSIFYVPDMKPSMFDVSRELGSSVALYSRKVLIQTKATDILPKWLRFIRGVVDSEDIPLNLSRELLQESALIRKLRDVLQQRLIKFFIDQSKKDAEKYAKFFEDYGLFMREGIVTATEQEVKEDIAKLLRYESSALPSGQLTSLSEYASRMRAGTRNIYYLCAPNRHLAEHSPYYEAMKKKDTEVLFCFEQFDELTLLHLREFDKKKLISVETDIVVDHYKEEKFEDRSPAAECLSEKETEELMAWMRNVLGSRVTNVKVTLRLDTHPAMVTVLEMGAARHFLRMQQLAKTQEERAQLLQPTLEINPRHALIKKLNQLRASEPGLAQLLVDQIYENAMIAAGLVDDPRAMVGRLNELLVKALERH

SEQ ID NO: 1322 - protein, 2363 aa, Homo sapiens
MAAVLQQVLERTELNKLPKSVQNKLEKFLADQQSEIDGLKGRHEKFKVESEQQYFEIEKRLSHSQERLVNETRECQSLRLELEKLNNQLKALTEKNKELEIAQDRNIAIQSQFTRTKEELEAEKRDLIRTNERLSQELEYLTEDVKRLNEKLKESNTTKGELQLKLDELQASDVSVKYREKRLEQEKELLHSQNTWLNTELKTKTDELLALGREKGNEILELKCNLENKKEEVSRLEEQMNGLKTSNEHLQKHVEDLLTKLKEAKEQQASMEEKFHNELNAHIKLSNLYKSAADDSEAKSNELTRAVEELHKLLKEAGEANKAIQDHLLEVEQSKDQMEKEMLEKIGRLEKELENANDLLSATKRKGAILSEEELAAMSPTAAAVAKIVKPGMKLTELYNAYVETQDQLLLEKLENKRINKYLDEIVKEVEAKAPILKRQREEYERAQKAVASLSVKLEQAMKEIQRLQEDTDKANKQSSVLERDNRRMEIQVKDLSQQIRVLLMELEEARGNHVIRDEEVSSADISSSSEVISQHLVSYRNIEELQQQNQRLLVALRELGETREREEQETTSSKITELQLKLESALTELEQLRKSRQHQMQLVDSIVRQRDMYRILLSQTTGVAIPLHASSLDDVSLASTPKRPSTSQTVSTPAPVPVIESTEAIEAKAALKQLQEIFENYKKEKAENEKIQNEQLEKLQEQVTDLRSQNTKISTQLDFASKRYEMLQDNVEGYRREITSLHERNQKLTATTQKQEQIINTMTQDLRGANEKLAVAEVRAENLKKEKEMLKLSEVRLSQQRESLLAEQRGQNLLLTNLQTIQGILERSETETKQRLSSQIEKLEHEISHLKKKLENEVEQRHTLTRNLDVQLLDTKRQLDTETNLHLNTKELLKNAQKEIATLKQHLSNMEVQVASQSSQRTGKGQPSNKEDVDDLVSQLRQTEEQVNDLKERLKTSTSNVEQYQAMVTSLEESLNKEKQVTEEVRKNIEVRLKESAEFQTQLEKKLMEVEKEKQELQDDKRRAIESMEQQLSELKKTLSSVQNEVQEALQRASTALSNEQQARRDCQEQAKIAVEAQNKYERELMLHAADVEALQAAKEQVSKMASVRQHLEETTQKAESQLLECKASWEERERMLKDEVSKCVCRCEDLEKQNRLLHDQIEKLSDKVVASVKEGVQGPLNVSLSEEGKSQEQILEILRFIRREKEIAETRFEVAQVESLRYRQRVELLERELQELQDSLNAEREKVQVTAKTMAQHEELMKKTETMNVVMETNKMLREEKERLEQDLQQMQAKVRKLELDILPLQEANAELSEKSGMLQAEKKLLEEDVKRWKARNQHLVSQQKDPDTEEYRKLLSEKEVHTKRIQQLTEEIGRLKAEIARSNASLTNNQNLIQSLKEDLNKVRTEKETIQKDLDAKIIDIQEKVKTITQVKKIGRRYKTQYEELKAQQDKVMETSAQSSGDHQEQHVSVQEMQELKETLNQAETKSKSLESQVENLQKTLSEKETEARNLQEQTVQLQSELSRLRQDLQDRTTQEEQLRQQITEKEEKTRKAIVAAKSKIAHLAGVKDQLTKENEELKQRNGALDQQKDELDVRITALKSQYEGRISRLERELREHQERHLEQRDEPQEPSNKVPEQQRQITLKTTPASGERGIASTSDPPTANIKPTPVVSTPSKVTAAAMAGNKSTPRASIRPMVTPATVTNPTTTPTATVMPTTQVESQEAMQSEGPVEHVPVFGSTSGSVRSTSPNVQPSISQPILTVQQQTQATAFVQPTQQSHPQIEPANQELSSNIVEVVQSSPVERPSTSTAVFGTVSATPSSSLPKRTREEEEDSTIEASDQVSDDTVEMPLPKKLKSVTPVGTEEEVMAEESTDGEVETQVYNQDSQDSIGEGVTQGDYTPMEDSEETSQSLQIDLGPLQSDQQTTTSSQDGQGKGDDVIVIDSDDEEEDDDENDGEHEDYEEDEEDDDDDEDDTGMGDEGEDSNEGTGSADGNDGYEADDAEGGDGTDPGTETEESMGGGEGNHRAADSQNSGEGNTGAAESSFSQEVSREQQPSSASERQAPRAPQSPRRPPHPLPPRLTIHAPPQELGPPVQRIQMTRRQSVGRGLQLTPGIGGMQQHFFDDEDRTVPSTPTLVVPHRTDGFAEAIHSPQVAGVPRFRFGPPEDMPQTSSSHSDLGQLASQGGLGMYETPLFLAHEEESGGRSVPTTPLQVAAPVTVFTESTTSDASEHASQSVPMVTTSTGTLSTTNETATGDDGDEVFVEAESEGISSEAGLEIDSQQEEEPVQASDESDLPSTSQDPPSSSSVDTSSSQPKPFRRVRLQTTLRQGVRGRQFNRQRGVSHAMGGRGGINRGNIN

SEQ ID NO: 1323 - protein, 726 aa, Homo sapiens
MAAVLQQVLERTELNKLPKSVQNKLEKFLADQQSEIDGLKGRHEKFKVESEQQYFEIEKRLSHSQERLVNETRECQSLRLELEKLNNQLKALTEKNKELEIAQDRNIAIQSQFTRTKEELEAEKRDLIRTNERLSQELEYLTEDVKRLNEKLKESNTTKGELQLKLDELQASDVSVKYREKRLEQEKELLHSQNTWLNTELKTKTDELLALGREKGNEILELKCNLENKKEEVSRLEEQMNGLKTSNEHLQKHVEDLLTKLKEAKEQQASMEEKFHNELNAHIKLSNLYKSAADDSEAKSNELTRAVEELHKLLKEAGEANKAIQDHLLEVEQSKDQMEKEMLEKIGRLEKELENANDLLSATKRKGAILSEEELAAMSPTAAAVAKIVKPGMKLTELYNAYVETQDQLLLEKLENKRINKYLDEIVKEVEAKAPILKRQREEYERAQKAVASLSVKLEQAMKEIQRLQEDTDKANKQSSVLERDNRRMEIQVKDLSQQIRVLLMELEEARGNHVIRDEEVSSADISSSSEVISQHLVSYRNIEELQQQNQRLLVALRELGETREREEQETTSSKITELQLKLESALTELEQLRKSRQHQMQLVDSIVRQRDMYRILLSQTTGVAIPLHASSLDDVSLASTPKRPSTSQTVSTPAPVPVIESTEAIEAKAALKQLQEIFENYKKEKAENEKIQNEQLEKLQEQVTDLRSQNTKISTQLDFASKRYL

SEQ ID NO: 1324 - protein, 468 aa, Homo sapiens
MAVAAALTGLQAEAKCSICLDYLSDPVTIECGHNFCRSCIQQSWLDLQELFPCPVCRHQCQEGHFRSNTQLGRMIEIAKLLQSTKSNKRKQEETTLCEKHNQPLSVFCKEDLMVLCPLCTQPPDHQGHHVRPIEKAAIHYRKRFCSYIQPLKKQLADLQKLISTQSKKPLELREMVENQRQELSSEFEHLNQFLDREQQAVLSRLAEEEKDNQQKLSANITAFSNYSATLKSQLSKVVELSELSELELLSQIKIFYESENESSPSIFSIHLKRDGCSFPPQYSALQRIIKKFKVEIILDPETAHPNLIVSEDKKRVRFTKRKQKVPGFPKRFTVKPVVLGFPYFHSGRHFWEIEVGDKSEWAIGICKDSLPTKARRPSSAQQECWRIELQDDGYHAPGAFPTPLLLEVKARAIGIFLDYEMGEISFYNMAEKSHICTFTDTFTGPLRPYFYVGPDSQPLRICTGTVCE

SEQ ID NO: 1325 - protein, 1431 aa, Homo sapiens
MDRRNDYGYRVPLFQGPLPPPGSLGLPFPPDIQTETTEEDSVLLMHTLLAATKDSLAMDPPVVNRPKKSKTKKAPIKTITKAAPAAPPVPAANEIATNKPKITWQALNLPVITQISQALPTTEVTNTQASSVTAQPKKANKMKRVTAKAAQGSQSPTGHEGGTIQLKSPLQVLKLPVISQNIHAPIANESASSQALITSIKPKKASKAKKAANKAIASATEVSLAATATHTATTQGQITNETASIHTTAASIRTKKASKARKTIAKVINTDTEHIEALNVTDAATRQIEASVVAIRPKKSKGKKAASRGPNSVSEISEAPLATQIVTNQALAATLRVKRGSRARKAATKARATESQTPNADQGAQAKIASAQTNVSALETQVAAAVQALADDYLAQLSLEPTTRTRGKRNRKSKHLNGDERSGSNYRRIPWGRRPAPPRDVAILQERANKLVKYLLVKDQTKIPIKRSDMLRDVIQEYDEYFPEIIERASYTLEKMFRVNLKEIDKQSSLYILISTQESSAGILGTTKDTPKLGLLMVILSVIFMNGNKASEAVIWEVLRKLGLRPGVRHSLFGEVRKLITDEFVKQKYLEYKRVPNSRPPEYEFFWGLRSYHETSKMKVLKFACRVQKKDPKDWAVQYREAVEMEVQAAAVAVAEAEARAEARAQMGIGEEAVAGPWNWDDMDIDCLTREELGDDAQAWSRFSFEIEARAQENADASTNVNFSRGASTRAGFSDGASISFNGAPSSSGGFSGGPGITFGVAPSTSASFSNTASISFGGTLSTSSSFSSAASISFGCAHSTSTSFSSEASISFGGMPCTSASFSGGVSSSFSGPLSTSATFSGGASSGFGGTLSTTAGFSGVLSTSTSFGSAPTTSTVFSSALSTSTGFGGILSTSVCFGGSPSSSGSFGGTLSTSICFGGSPCTSTGFGGTLSTSVSFGGSSSTSANFGGTLSTSICFDGSPSTGAGFGGALNTSASFGSVLNTSTGFGGAMSTSADFGGTLSTSVCFGGSPGTSVSFGSALNTNAGYGGAVSTNTDFGGTLSTSVCFGGSPSTSAGFGGALNTNASFGCAVSTSASFSGAVSTSACFSGAPITNPGFGGAFSTSAGFGGALSTAADFGGTPSNSIGFGAAPSTSVSFGGAHGTSLCFGGAPSTSLCFGSASNTNLCFGGPPSTSACFSGATSPSFCDGPSTSTGFSFGNGLSTNAGFGGGLNTSAGFGGGLGTSAGFSGGLSTSSGFDGGLGTSAGFGGGPGTSTGFGGGLGTSAGFSGGLGTSAGFGGGLVTSDGFGGGLGTNASFGSTLGTSAGFSGGLSTSDGFGSRPNASFDRGLSTIIGFGSGSNTSTGFTGEPSTSTGFSSGPSSIVGFSGGPSTGVGFCSGPSTSGFSGGPSTGAGFGGGPNTGAGFGGGPSTSAGFGSGAASLGACGFSYG

SEQ ID NO: 1326 - protein, 706 aa, Homo sapiens
MDRRNDYGYRVPLFQGPLPPPGSLGLPFPPDIQTETTEEDSVLLMHTLLAATKDSLAMDPPVVNRPKKSKTKKAPIKTITKAAPAAPPVPAANEIATNKPKITWQALNLPVITQISQALPTTEVTNTQASSVTAQPKKANKMKRVTAKAAQGSQSPTGHEGGTIQLKSPLQVLKLPVISQNIHAPIANESASSQALITSIKPKKASKAKKAANKAIASATEVSLAATATHTATTQGQITNETASIHTTAASIRTKKASKARKTIAKVINTDTEHIEALNVTDAATRQIEASVVAIRPKKSKGKKAASRGPNSVSEISEAPLATQIVTNQALAATLRVKRGSRARKAATKARATESQTPNADQGAQAKIASAQTNVSALETQVAAAVQALADDYLAQLSLEPTTRTRGKRNRKSKHLNGDERSGSNYRRIPWGRRPAPPRDVAILQERANKLVKYLLVKDQTKIPIKRSDMLRDVIQEYDEYFPEIIERASYTLEKMFRVNLKEIDKQSSLYILISTQESSAGILGTTKDTPKLGLLMVILSVIFMNGNKASEAVIWEVLRKLGLRPGVRHSLFGEVRKLITDEFVKQKYLEYKRVPNSRPPEYEFFWGLRSYHETSKMKVLKFACRVQKKDPKDWAVQYREAVEMEVQAAAVAVAEAEARAEIYSPCLQIPLINCSSPSHGAKVHPWNLCPHSSQGSYGQSAEGVM

SEQ ID NO: 1327 - protein, 962 aa, Homo sapiens
MLRDVIQEYDEYFPEIIERASYTLEKMFRVNLKEIDKQSSLYILISTQESSAGILGTTKDTPKLGLLMVILSVIFMNGNKASEAVIWEVLRKLGLRPGVRHSLFGEVRKLITDEFVKQKYLEYKRVPNSRPPEYEFFWGLRSYHETSKMKVLKFACRVQKKDPKDWAVQYREAVEMEVQAAAVAVAEAEARAEARAQMGIGEEAVAGPWNWDDMDIDCLTREELGDDAQAWSRFSFEIEARAQENADASTNVNFSRGASTRAGFSDGASISFNGAPSSSGGFSGGPGITFGVAPSTSASFSNTASISFGGTLSTSSSFSSAASISFGCAHSTSTSFSSEASISFGGMPCTSASFSGGVSSSFSGPLSTSATFSGGASSGFGGTLSTTAGFSGVLSTSTSFGSAPTTSTVFSSALSTSTGFGGILSTSVCFGGSPSSSGSFGGTLSTSICFGGSPCTSTGFGGTLSTSVSFGGSSSTSANFGGTLSTSICFDGSPSTGAGFGGALNTSASFGSVLNTSTGFGGAMSTSADFGGTLSTSVCFGGSPGTSVSFGSALNTNAGYGGAVSTNTDFGGTLSTSVCFGGSPSTSAGFGGALNTNASFGCAVSTSASFSGAVSTSACFSGAPITNPGFGGAFSTSAGFGGALSTAADFGGTPSNSIGFGAAPSTSVSFGGAHGTSLCFGGAPSTSLCFGSASNTNLCFGGPPSTSACFSGATSPSFCDGPSTSTGFSFGNGLSTNAGFGGGLNTSAGFGGGLGTSAGFSGGLSTSSGFDGGLGTSAGFGGGPGTSTGFGGGLGTSAGFSGGLGTSAGFGGGLVTSDGFGGGLGTNASFGSTLGTSAGFSGGLSTSDGFGSRPNASFDRGLSTIIGFGSGSNTSTGFTGEPSTSTGFSSGPSSIVGFSGGPSTGVGFCSGPSTSGFSGGPSTGAGFGGGPNTGAGFGGGPSTSAGFGSGAASLGACGFSYG

SEQ ID NO: 1328 - protein, 1034 aa, Homo sapiens
MDRRNDYGYRVPLFQSKHLNGDERSGSNYRRIPWGRRPAPPRDVAILQERANKLVKYLLVKDQTKIPIKRSDMLRDVIQEYDEYFPEIIERASYTLEKMFRVNLKEIDKQSSLYILISTQESSAGILGTTKDTPKLGLLMVILSVIFMNGNKASEAVIWEVLRKLGLRPGVRHSLFGEVRKLITDEFVKQKYLEYKRVPNSRPPEYEFFWGLRSYHETSKMKVLKFACRVQKKDPKDWAVQYREAVEMEVQAAAVAVAEAEARAEARAQMGIGEEAVAGPWNWDDMDIDCLTREELGDDAQAWSRFSFEIEARAQENADASTNVNFSRGASTRAGFSDGASISFNGAPSSSGGFSGGPGITFGVAPSTSASFSNTASISFGGTLSTSSSFSSAASISFGCAHSTSTSFSSEASISFGGMPCTSASFSGGVSSSFSGPLSTSATFSGGASSGFGGTLSTTAGFSGVLSTSTSFGSAPTTSTVFSSALSTSTGFGGILSTSVCFGGSPSSSGSFGGTLSTSICFGGSPCTSTGFGGTLSTSVSFGGSSSTSANFGGTLSTSICFDGSPSTGAGFGGALNTSASFGSVLNTSTGFGGAMSTSADFGGTLSTSVCFGGSPGTSVSFGSALNTNAGYGGAVSTNTDFGGTLSTSVCFGGSPSTSAGFGGALNTNASFGCAVSTSASFSGAVSTSACFSGAPITNPGFGGAFSTSAGFGGALSTAADFGGTPSNSIGFGAAPSTSVSFGGAHGTSLCFGGAPSTSLCFGSASNTNLCFGGPPSTSACFSGATSPSFCDGPSTSTGFSFGNGLSTNAGFGGGLNTSAGFGGGLGTSAGFSGGLSTSSGFDGGLGTSAGFGGGPGTSTGFGGGLGTSAGFSGGLGTSAGFGGGLVTSDGFGGGLGTNASFGSTLGTSAGFSGGLSTSDGFGSRPNASFDRGLSTIIGFGSGSNTSTGFTGEPSTSTGFSSGPSSIVGFSGGPSTGVGFCSGPSTSGFSGGPSTGAGFGGGPNTGAGFGGGPSTSAGFGSGAASLGACGFSYG

SEQ ID NO: 1329 - protein, 309 aa, Homo sapiens
MDRRNDYGYRVPLFQSKHLNGDERSGSNYRRIPWGRRPAPPRDVAILQERANKLVKYLLVKDQTKIPIKRSDMLRDVIQEYDEYFPEIIERASYTLEKMFRVNLKEIDKQSSLYILISTQESSAGILGTTKDTPKLGLLMVILSVIFMNGNKASEAVIWEVLRKLGLRPGVRHSLFGEVRKLITDEFVKQKYLEYKRVPNSRPPEYEFFWGLRSYHETSKMKVLKFACRVQKKDPKDWAVQYREAVEMEVQAAAVAVAEAEARAEIYSPCLQIPLINCSSPSHGAKVHPWNLCPHSSQGSYGQSAEGVM

SEQ ID NO: 1330 - protein, 2541 aa, Homo sapiens
MVALSLKISIGNVVKTMQFEPSTMVYDACRIIRERIPEAPAGPPSDFGLFLSDDDPKKGIWLEAGKALDYYMLRNGDTMEYRKKQRPLKIRMLDGTVKTIMVDDSKTVTDMLMTICARIGITNHDEYSLVRELMEEKKEEITGTLRKDKTLLRDEKKMEKLKQKLHTDDELNWLDHGRTLREQGVEEHETLLLRRKFFYSDQNVDSRDPVQLNLLYVQARDDILNGSHPVSFDKACEFAGFQCQIQFGPHNEQKHKAGFLDLKDFLPKEYVKQKGERKIFQAHKNCGQMSEIEAKVRYVKLARSLKTYGVSFFLVKEKMKGKNKLVPRLLGITKECVMRVDEKTKEVIQEWNLTNIKRWAASPKSFTLDFGDYQDGYYSVQTTEGEQIAQLIAGYIDIILKKKKSKDHFGLEGDEESTMLEDSVSPKKSTVLQQQYNRVGKVEHGSVALPAIMRSGASGPENFQVGSMPPAQQQITSGQMHRGHMPPLTSAQQALTGTINSSMQAVQAAQATLDDFDTLPPLGQDAASKAWRKNKMDESKHEIHSQVDAITAGTASVVNLTAGDPAETDYTAVGCAVTTISSNLTEMSRGVKLLAALLEDEGGSGRPLLQAAKGLAGAVSELLRSAQPASAEPRQNLLQAAGNVGQASGELLQQIGESDTDPHFQDALMQLAKAVASAAAALVLKAKSVAQRTEDSGLQTQVIAAATQCALSTSQLVACTKVVAPTISSPVCQEQLVEAGRLVAKAVEGCVSASQAATEDGQLLRGVGAAATAVTQALNELLQHVKAHATGAGPAGRYDQATDTILTVTENIFSSMGDAGEMVRQARILAQATSDLVNAIKADAEGESDLENSRKLLSAAKILADATAKMVEAAKGAAAHPDSEEQQQRLREAAEGLRMATNAAAQNAIKKKLVQRLEHAAKQAAASATQTIAAAQHAASTPKASAGPQPLLVQSCKAVAEQIPLLVQGVRGSQAQPDSPSAQLALIAASQSFLQPGGKMVAAAKASVPTIQDQASAMQLSQCAKNLGTALAELRTAAQKAQEACGPLEMDSALSVVQNLEKDLQEVKAAARDGKLKPLPGETMEKCTQDLGNSTKAVSSAIAQLLGEVAQGNENYAGIAARDVAGGLRSLAQAARGVAALTSDPAVQAIVLDTASDVLDKASSLIEEAKKAAGHPGDPESQQRLAQVAKAVTQALNRCVSCLPGQRDVDNALRAVGDASKRLLSDSLPPSTGTFQEAQSRLNEAAAGLNQAATELVQASRGTPQDLARASGRFGQDFSTFLEAGVEMAGQAPSQEDRAQVVSNLKGISMSSSKLLLAAKALSTDPAAPNLKSQLAAAARAVTDSINQLITMCTQQAPGQKECDNALRELETVRELLENPVQPINDMSYFGCLDSVMENSKVLGEAMTGISQNAKNGNLPEFGDAISTASKALCGFTEAAAQAAYLVGVSDPNSQAGQQGLVEPTQFARANQAIQMACQSLGEPGCTQAQVLSAATIVAKHTSALCNSCRLASARTTNPTAKRQFVQSAKEVANSTANLVKTIKALDGAFTEENRAQCRAATAPLLEAVDNLSAFASNPEFSSIPAQISPEGRAAMEPIVISAKTMLESAGGLIQTARALAVNPRDPPSWSVLAGHSRTVSDSIKKLITSMRDKAPGQLECETAIAALNSCLRDLDQASLAAVSQQLAPREGISQEALHTQMLTAVQEISHLIEPLANAARAEASQLGHKVSQMAQYFEPLTLAAVGAASKTLSHPQQMALLDQTKTLAESALQLLYTAKEAGGNPKQAAHTQEALEEAVQMMTEAVEDLTTTLNEAASAAGVVGGMVDSITQAINQLDEGPMGEPEGSFVDYQTTMVRTAKAIAVTVQEMVTKSNTSPEELGPLANQLTSDYGRLASEAKPAAVAAENEEIGSHIKHRVQELGHGCAALVTKAGALQCSPSDAYTKKELIECARRVSEKVSHVLAALQAGNRGTQACITAASAVSGIIADLDTTIMFATAGTLNREGTETFADHREGILKTAKVLVEDTKVLVQNAAGSQEKLAQAAQSSVATITRLADVVKLGAASLGAEDPETQVVLINAVKDVAKALGDLISATKAAAGKVGDDPAVWQLKNSAKVMVTNVTSLLKTVKAVEDEATKGTRALEATTEHIRQELAVFCSPEPPAKTSTPEDFIRMTKGITMATAKAVAAGNSCRQEDVIATANLSRRAIADMLRACKEAAYHPEVAPDVRLRALHYGRECANGYLELLDHVLLTLQKPSPELKQQLTGHSKRVAGSVTELIQAAEAMKGTEWVDPEDPTVIAENELLGAAAAIEAAAKKLEQLKPRAKPKEADESLNFEEQILEAAKSIAAATSALVKAASAAQRELVAQGKVGAIPANALDDGQWSQGLISAARMVAAATNNLCEAANAAVQGHASQEKLISSAKQVAASTAQLLVACKVKADQDSEAMKRLQAAGNAVKRASDNLVKAAQKAAAFEEQENETVVVKEKMVGGIAQIIAAQEEMLRKERELEEARKKLAQIRQQQYKFLPSELRDEH

SEQ ID NO: 1331 - protein, 766 aa, Homo sapiens
MSVQSSSGSLEGPPSWSQLSTSPTPGSAAAARSLLNHTPPSGRPREGAMDELHSLDPRRQELLEARFTGVASGSTGSTGSCSVGAKASTNNESSNHSFGSLGSLSDKESETPEKKQSESSRGRKRKAENQNESSQGKSIGGRGHKISDYFEYQGGNGSSPVRGIPPAIRSPQNSHSHSTPSSSVRPNSPSPTALAFGDHPIVQPKQLSFKIIQTDLTMLKLAALESNKIQDLEKKEGRIDDLLRANCDLRRQIDEQQKLLEKYKERLNKCISMSKKLLIEKSTQEKLSSREKSMQDRLRLGHFTTVRHGASFTEQWTDGFAFQNLVKQQEWVNQQREDIERQRKLLAKRKPPTANNSQAPSTNSEPKQRKNKAVNGAENDPFVRPNLPQLLTLAEYHEQEEIFKLRLGHLKKEEAEIQAELERLERVRNLHIRELKRINNEDNSQFKDHPTLNERYLLLHLLGRGGFSEVYKAFDLYEQRYAAVKIHQLNKSWRDEKKENYHKHACREYRIHKELDHPRIVKLYDYFSLDTDTFCTVLEYCEGNDLDFYLKQHKLMSEKEARSIVMQIVNALRYLNEIKPPIIHYDLKPGNILLVDGTACGEIKITDFGLSKIMDDDSYGVDGMDLTSQGAGTYWYLPPECFVVGKEPPKISNKVDVWSVGVIFFQCLYGRKPFGHNQSQQDILQENTILKATEVQFPVKPVVSSEAKAFIRRCLAYRKEDRFDVHQLANDPYLLPHMRRSNSSGNLHMAGLTASPTPPSSSIITY

SEQ ID NO: 1332 - protein, 787 aa, Homo sapiens
MSVQSSSGSLEGPPSWSQLSTSPTPGSAAAARSLLNHTPPSGRPREGAMDELHSLDPRRQELLEARFTGVASGSTGSTGSCSVGAKASTNNESSNHSFGSLGSLSDKESETPEKKQSESSRGRKRKAENQNESSQGFPNLPVFQSLAYWEMGRTAGGKSIGGRGHKISDYFEYQGGNGSSPVRGIPPAIRSPQNSHSHSTPSSSVRPNSPSPTALAFGDHPIVQPKQLSFKIIQTDLTMLKLAALESNKIQDLEKKEGRIDDLLRANCDLRRQIDEQQKLLEKYKERLNKCISMSKKLLIEKSTQEKLSSREKSMQDRLRLGHFTTVRHGASFTEQWTDGFAFQNLVKQQEWVNQQREDIERQRKLLAKRKPPTANNSQAPSTNSEPKQRKNKAVNGAENDPFVRPNLPQLLTLAEYHEQEEIFKLRLGHLKKEEAEIQAELERLERVRNLHIRELKRINNEDNSQFKDHPTLNERYLLLHLLGRGGFSEVYKAFDLYEQRYAAVKIHQLNKSWRDEKKENYHKHACREYRIHKELDHPRIVKLYDYFSLDTDTFCTVLEYCEGNDLDFYLKQHKLMSEKEARSIVMQIVNALRYLNEIKPPIIHYDLKPGNILLVDGTACGEIKITDFGLSKIMDDDSYGVDGMDLTSQGAGTYWYLPPECFVVGKEPPKISNKVDVWSVGVIFFQCLYGRKPFGHNQSQQDILQENTILKATEVQFPVKPVVSSEAKAFIRRCLAYRKEDRFDVHQLANDPYLLPHMRRSNSSGNLHMAGLTASPTPPSSSIITY

SEQ ID NO: 1333 - protein, 549 aa, Homo sapiens
MLKLAALESNKIQDLEKKEGRIDDLLRANCDLRRQIDEQQKLLEKYKERLNKCISMSKKLLIEKSTQEKLSSREKSMQDRLRLGHFTTVRHGASFTEQWTDGFAFQNLVKQQEWVNQQREDIERQRKLLAKRKPPTANNSQAPSTNSEPKQRKNKAVNGAENDPFVRPNLPQLLTLAEYHEQEEIFKLRLGHLKKEEAEIQAELERLERVRNLHIRELKRINNEDNSQFKDHPTLNERYLLLHLLGRGGFSEVYKAFDLYEQRYAAVKIHQLNKSWRDEKKENYHKHACREYRIHKELDHPRIVKLYDYFSLDTDTFCTVLEYCEGNDLDFYLKQHKLMSEKEARSIVMQIVNALRYLNEIKPPIIHYDLKPGNILLVDGTACGEIKITDFGLSKIMDDDSYGVDGMDLTSQGAGTYWYLPPECFVVGKEPPKISNKVDVWSVGVIFFQCLYGRKPFGHNQSQQDILQENTILKATEVQFPVKPVVSSEAKAFIRRCLAYRKEDRFDVHQLANDPYLLPHMRRSNSSGNLHMAGLTASPTPPSSSIITY

SEQ ID NO: 1334 - protein, 670 aa, Homo sapiens
MAVLFLYDLKTTGKTPEKKQSESSRGRKRKAENQNESSQGKSIGGRGHKISDYFEYQGGNGSSPVRGIPPAIRSPQNSHSHSTPSSSVRPNSPSPTALAFGDHPIVQPKQLSFKIIQTDLTMLKLAALESNKIQDLEKKEGRIDDLLRANCDLRRQIDEQQKLLEKYKERLNKCISMSKKLLIEKSTQEKLSSREKSMQDRLRLGHFTTVRHGASFTEQWTDGFAFQNLVKQQEWVNQQREDIERQRKLLAKRKPPTANNSQAPSTNSEPKQRKNKAVNGAENDPFVRPNLPQLLTLAEYHEQEEIFKLRLGHLKKEEAEIQAELERLERVRNLHIRELKRINNEDNSQFKDHPTLNERYLLLHLLGRGGFSEVYKAFDLYEQRYAAVKIHQLNKSWRDEKKENYHKHACREYRIHKELDHPRIVKLYDYFSLDTDTFCTVLEYCEGNDLDFYLKQHKLMSEKEARSIVMQIVNALRYLNEIKPPIIHYDLKPGNILLVDGTACGEIKITDFGLSKIMDDDSYGVDGMDLTSQGAGTYWYLPPECFVVGKEPPKISNKVDVWSVGVIFFQCLYGRKPFGHNQSQQDILQENTILKATEVQFPVKPVVSSEAKAFIRRCLAYRKEDRFDVHQLANDPYLLPHMRRSNSSGNLHMAGLTASPTPPSSSIITY

SEQ ID NO: 1335 - protein, 718 aa, Homo sapiens
MDELHSLDPRRQELLEARFTGVASGSTGSTGSCSVGAKASTNNESSNHSFGSLGSLSDKESETPEKKQSESSRGRKRKAENQNESSQGKSIGGRGHKISDYFEYQGGNGSSPVRGIPPAIRSPQNSHSHSTPSSSVRPNSPSPTALAFGDHPIVQPKQLSFKIIQTDLTMLKLAALESNKIQDLEKKEGRIDDLLRANCDLRRQIDEQQKLLEKYKERLNKCISMSKKLLIEKSTQEKLSSREKSMQDRLRLGHFTTVRHGASFTEQWTDGFAFQNLVKQQEWVNQQREDIERQRKLLAKRKPPTANNSQAPSTNSEPKQRKNKAVNGAENDPFVRPNLPQLLTLAEYHEQEEIFKLRLGHLKKEEAEIQAELERLERVRNLHIRELKRINNEDNSQFKDHPTLNERYLLLHLLGRGGFSEVYKAFDLYEQRYAAVKIHQLNKSWRDEKKENYHKHACREYRIHKELDHPRIVKLYDYFSLDTDTFCTVLEYCEGNDLDFYLKQHKLMSEKEARSIVMQIVNALRYLNEIKPPIIHYDLKPGNILLVDGTACGEIKITDFGLSKIMDDDSYGVDGMDLTSQGAGTYWYLPPECFVVGKEPPKISNKVDVWSVGVIFFQCLYGRKPFGHNQSQQDILQENTILKATEVQFPVKPVVSSEAKAFIRRCLAYRKEDRFDVHQLANDPYLLPHMRRSNSSGNLHMAGLTASPTPPSSSIITY

SEQ ID NO: 1336 - protein, 887 aa, Homo sapiens
MPSLPQEGVIQGPSPLDLNTELPYQSTMKRKVRKKKKKGTITANVAGTKFEIVRLVIDEMGFMKTPDEDETSNLIWCDSAVQQEKISELQNYQRINHFPGMGEICRKDFLARNMTKMIKSRPLDYTFVPRTWIFPAEYTQFQNYVKELKKKRKQKTFIVKPANGAMGHGISLIRNGDKLPSQDHLIVQEYIEKPFLMEGYKFDLRIYILVTSCDPLKIFLYHDGLVRMGTEKYIPPNESNLTQLYMHLTNYSVNKHNEHFERDETENKGSKRSIKWFTEFLQANQHDVAKFWSDISELVVKTLIVAEPHVLHAYRMCRPGQPPGSESVCFEVLGFDILLDRKLKPWLLEINRAPSFGTDQKIDYDVKRGVLLNALKLLNIRTSDKRRNLAKQKAEAQRRLYGQNSIKRLLPGSSDWEQQRHQLERRKEELKERLAQVRKQISREEHENRHMGNYRRIYPPEDKALLEKYENLLAVAFQTFLSGRAASFQRELNNPLKRMKEEDILDLLEQCEIDDEKLMGKTTKTRGPKPLCSMPESTEIMKRPKYCSSDSSYDSSSSSSESDENEKEEYQNKKREKQVTYNLKPSNHYKLIQQPSSIRRSVSCPRSISAQSPSSGDTRPFSAQQMISVSRPTSASRSHSLNRASSYMRHLPHSNDACSTNSQVSESLRQLKTKEQEDDLTSQTLFVLKDMKIRFPGKSDAESELLIEDIIDNWKYHKTKVASYWLIKLDSVKQRKVLDIVKTSIRTVLPRIWKVPDVEEVNLYRIFNRVFNRLLWSRGQGLWNCFCDSGSSWESIFNKSPEVVTPLQLQCCQRLVELCKQCLLVVYKYATDKRGSLSGIGPDWGNSRYLLPGSTQFFLRTPTYNLKYNSPGMTRSNVLFTSRYGHL

SEQ ID NO: 1337 - protein, 669 aa, Homo sapiens
MPSLPQEGVIQGPSPLDLNTELPYQSTMKRKVRKKKKKGTITANVAGTKFEIVRLVIDEMGFMKTPDEDETSNLIWCDSAVQQEKISELQNYQRINHFPGMGEICRKDFLARNMTKMIKSRPLDYTFVPRTWIFPAEYTQFQNYVKELKKKRKQKTFIVKPANGAMGHGISLIRNGDKLPSQDHLIVQEYIEKPFLMEGYKFDLRIYILVTSCDPLKIFLYHDGLVRMGTEKYIPPNESNLTQLYMHLTNYSVNKHNEHFERDETENKGSKRSIKWFTEFLQANQHDVAKFWSDISELVVKTLIVAEPHVLHAYRMCRPGQPPGSESVCFEVLGFDILLDRKLKPWLLEINRAPSFGTDQKIDYDVKRGVLLNALKLLNIRTSDKRRNLAKQKAEAQRRLYGQNSIKRLLPGSSDWEQQRHQLERRKEELKERLAQVRKQISREEHENRHMGNYRRIYPPEDKALLEKYENLLAVAFQTFLSGRAASFQRELNNPLKRMKEEDILDLLEQCEIDDEKLMGKTTKTRGPKPLCSMPESTEIMKRPKYCSSDSSYDSSSSSSESDENEKEEYQNKKREKQVTYNLKPSNHYKLIQQPSSIRRSVSCPRSISAQSPSSGDTRPFSAQQMISVSRPTSASRSHSLNRASSYMRHLPHSNDACSTNSQVIILAQ

SEQ ID NO: 1338 - protein, 792 aa, Homo sapiens
MPSLPQEGVIQGPSPLDLNTELPYQSTMKRKVRKKKKKGTITANVAGTKFEIVRLVIDEMGFMKTPDEDETSNLIWCDSAVQQEKISELQNYQRINHFPGMGEICRKDFLARNMTKMIKSRPLDYTFVPRTWIFPAEYTQFQNYVKELKKKRKQKTFIVKPANGAMGHGISLIRNGDKLPSQDHLIVQEYIEKPFLMEGYKFDLRIYILVTSCDPLKIFLYHDGLVRMGTEKYIPPNESNLTQLYMHLTNYSVNKHNEHFERDETENKGSKRSIKWFTEFLQANQHDVAKFWSDISELVVKTLIVAEPHVLHAYRMCRPGQPPGSESVCFEVLGFDILLDRKLKPWLLEINRAPSFGTDQKIDYDVKRGVLLNALKLLNIRTSDKRRNLAKQKAEAQRRLYGQNSIKRLLPGSSDWEQQRHQLERRKEELKERLAQVRKQISREEHENRHMGNYRRIYPPEDKALLEKYENLLAVAFQTFLSGRAASFQRELNNPLKRMKEEDILDLLEQCEIDDEKLMGKTTKTRGPKPLCSMPESTEIMKRPKYCSSDSSYDSSSSSSESDENEKEEYQNKKREKQVTYNLKPSNHYKLIQQPSSIRRSVSCPRSISAQSPSSGDTRPFSAQQMISVSRPTSASRSHSLNRASSYMRHLPHSNDACSTNSQVSESLRQLKTKEQEDDLTSQTLFVLKDMKIRFPGKSDAESELLIEDIIDNWKYHKTKVASYWLIKLDSVKQRKVLDIVKTSIRTVLPRIWKVPDVEEVNLYRIFNRVFNRLLWSRGQGLWNCFCDSGYV

SEQ ID NO: 1339 - protein, 790 aa, Homo sapiens
MKAHPKEMVPLMGKRVAAPSGNPAILPEKRPAEITPTKKSAHFFLEIEGFEPNPTVAKTSPPVFSKPMDSNIRQCISGNCDDMDSPQSPQDDVTETPSNPNSPSAQLAKEEQRRKKRRLKKRIFAAVSEGCVEELVELLVELQELCRRRHDEDVPDFLMHKLTASDTGKTCLMKALLNINPNTKEIVRILLAFAEENDILGRFINAEYTEEAYEGQTALNIAIERRQGDIAALLIAAGADVNAHAKGAFFNPKYQHEGFYFGETPLALAACTNQPEIVQLLMEHEQTDITSRDSRGNNILHALVTVAEDFKTQNDFVKRMYDMILLRSGNWELETTRNNDGLTPLQLAAKMGKAEILKYILSREIKEKRLRSLSRKFTDWAYGPVSSSLYDLTNVDTTTDNSVLEITVYNTNIDNRHEMLTLEPLHTLLHMKWKKFAKHMFFLSFCFYFFYNITLTLVSYYRPREEEAIPHPLALTHKMGWLQLLGRMFVLIWAMCISVKEGIAIFLLRPSDLQSILSDAWFHFVFFIQAVLVILSVFLYLFAYKEYLACLVLAMALGWANMLYYTRGFQSMGMYSVMIQKVILHDVLKFLFVYIVFLLGFGVALASLIEKCPKDNKDCSSYGSFSDAVLELFKLTIGLGDLNIQQNSKYPILFLFLLITYVILTFVLLLNMLIALMGETVENVSKESERIWRLQRARTILEFEKMLPEWLRSRFRMGELCKVAEDDFRLCLRINEVKWTEWKTHVSFLNEDPGPVRRTDFNKIQDSSRNNSKTTLNAFEEVEEFPETSV

SEQ ID NO: 1340 - protein, 791 aa, Homo sapiens
MKAHPKEMVPLMGKRVAAPSGNPAILPEKRPAEITPTKKSAHFFLEIEGFEPNPTVAKTSPPVFSKPMDSNIRQCISGNCDDMDSPQSPQDDVTETPSNPNSPSAQLAKEEQRRKKRRLKKRIFAAVSEGCVEELVELLVELQELCRRRHDEDVPDFLMHKLTASDTGKTCLMKALLNINPNTKEIVRILLAFAEENDILGRFINAEYTEEAYEGQTALNIAIERRQGDIAALLIAAGADVNAHAKGAFFNPKYQHEGFYFGETPLALAACTNQPEIVQLLMEHEQTDITSRDSRGNNILHALVTVAEDFKTQNDFVKRMYDMILLRSGNWELETTRNNDGLTPLQLAAKMGKAEILKYILSREIKEKRLRSLSRKFTDWAYGPVSSSLYDLTNVDTTTDNSVLEITVYNTNIDNRHEMLTLEPLHTLLHMKWKKFAKHMFFLSFCFYFFYNITLTLVSYYRPREEEAIPHPLALTHKMGWLQLLGRMFVLIWAMCISVKEGIAIFLLRPSDLQSILSDAWFHFVFFIQAVLVILSVFLYLFAYKEYLACLVLAMALGWANMLYYTRGFQSMGMYSVMIQKVILHDVLKFLFVYIVFLLGFGVALASLIEKCPKDNKDCSSYGSFSDAVLELFKLTIGLGDLNIQQNSKYPILFLFLLITYVILTFVLLLNMLIALMGETVENVSKESERIWRLQRARTILEFEKMLPEWLRSRFRMGELCKVAEDDFRLCLRINEVKWTEWKTHVSFLNEDPGPVRRTADFNKIQDSSRNNSKTTLNAFEEVEEFPETSV

SEQ ID NO: 1341 - protein, 765 aa, Homo sapiens
MKAHPKEMVPLMGKRVAAPSGNPAILPEKRPAEITPTKKSAHFFLEIEGFEPNPTVAKTSPPVFSKPMDSNIRQCISGNCDDMDSPQSPQDDVTETPSNPNSPSAQLAKEEQRRKKRRLKKRIFAAVSEGCVEELVELLVELQELCRRRHDEDVPDFLMHKLTASDTGKTCLMKALLNINPNTKEIVRILLAFAEENDILGRFINAEYTEEAYEGQTALNIAIERRQGDIAALLIAAGADVNAHAKGAFFNPKYQHEGFYFGETPLALAACTNQPEIVQLLMEHEQTDITSRDSRGNNILHALVTVAEDFKTQNDFVKRMYDMILLRSGNWELETTRNNDGLTPLQLAAKMGKAEILKYILSREIKEKRLRSLSRKFTDWAYGPVSSSLYDLTNVDTTTDNSVLEITVYNTNIDNRHEMLTLEPLHTLLHMKWKKFAKHMFFLSFCFYFFYNITLTLVSYYRPREEEAIPHPLALTHKMGWLQLLGRMFVLIWAMCISVKEGIAIFLLRPSDLQSILSDAWFHFVFFIQAVLVILSVFLYLFAYKEYLACLVLAMALGWANMLYYTRGFQSMGMYSVMIQKVILHDVLKFLFVYIVFLLGFGVALASLIEKCPKDNKDCSSYGSFSDAVLELFKLTIGLGDLNIQQNSKYPILFLFLLITYVILTFVLLLNMLIALMGETVENVSKESERIWRLQRARTILEFEKMLPEWLRSRFRMGELCKVAEDDFRLCLRINEVKWTEWKTHVSFLNEDPGPVRRTGTVAVR

SEQ ID NO: 1342 - protein, 519 aa, Homo sapiens
MAPIPKTVGRIKLDCSLRPSCPLEVAAAPKLCKEFGPEDYGEEDIVDFLRRLVESDPQGLHRIHVDGSSGRLQLWHHDYLLGHLDDEGKSTGQSDRGKGAEGLGTYCGLRKSFLYPPQESEPCPQSPSASATFPSVSDSLLQVAMPQKLLVTEEEANRLAEELVAEEERMKQKAEKKRLKKKRQKERKRQERLEQYCGEPKASTTSDGDESPPSSPGNPVQGQCGEEEDSLDLSSTFVSLALRKVGDWPLSARREKGLNQEPQGRGLALQKMGQEEESPPREERPQQSPKVQASPGLLAAALQQSQELAKLGTSFAQNGFYHEAVVLFTQALKLNPQDHRLFGNRSFCHERLGQPAWALADAQVALTLRPGWPRGLFRLGKALMGLQRFREAAAVFQETLRGGSQPDAARELRSCLLHLTLQGQRGGICAPPLSPGALQPLPHAELAPSGLPSLRCPRSTALRSPGLSPLLHYPSCHRSHPNQPLSQTQSRRPHPLKPQDPSKGWDILGLGLQHLSQAR

SEQ ID NO: 1343 - protein, 285 aa, Homo sapiens
MAPIPKTVGRIKLDCSLRPSCPLEVAAAPKLCKEFGPEDYGEEDIVDFLRRLVESDPQGLHRIHVDGSSGRLQLWHHDYLLGHLDDEGKSTGQSDRGKGAEGLGTYCGLRKSFLYPPQESEPCPQSPSASATFPSVSDSLLQVAMPQKLLVTEEEANRLAEELVAEEERMKQKAEKKRLKKKRQKERKRQERLEQYCGEPKASTTSDGDESPPSSPGNPVQGQCGEEEDSLDLSSTFVSLALRKVGDWPLSARREKGLNQEPQGRGLALQKMGQEEESPPATSPC

SEQ ID NO: 1344 - protein, 277 aa, Homo sapiens
MIILIYLFLLLWEDTQGWGFKDGIFHNSIWLERAAGVYHREARSGKYKLTYAEAKAVCEFEGGHLATYKQLEAARKIGFHVCAAGWMAKGRVGYPIVKPGPNCGFGKTGIIDYGIRLNRSERWDAYCYNPHAKECGGVFTDPKQIFKSPGFPNEYEDNQICYWHIRLKYGQRIHLSFLDFDLEDDPGCLADYVEIYDSYDDVHGFVGRYCGDELPDDIISTGNVMTLKFLSDASVTAGGFQIKYVAMDPVSKSSQGKNTSTTSTGNKNFLAGRFSHL

SEQ ID NO: 1345 - protein, 518 aa, Homo sapiens
MCPQESSFQPSQFLLLVGVPVASVLLLAQCLRWHCPRRLLGACWTLNGQEEPVSQPTPQLENEVSRQHLPATLPEMVAFYQELHTPTQGQTMVRQLMHKLLVFSAREVDHRGGCLMLQDTGISLLIPPGAVAVGRQERVSLILVWDLSDAPSLSQAQGLVSPVVACGPHGASFLKPCTLTFKHCAEQPSHARTYSSNTTLLDAKVWRPLGRPGAHASRDECRIHLSHFSLYTCVLEAPVGREARKWLQLAVFCSPLVPGQSHLQLRIYFLNNTPCALQWALTNEQPHGGRLRGPCQLFDFNGARGDQCLKLTYISEGWENVDDSSCQLVPHLHIWHGKCPFRSFCFRRKAADENEDCSALTNEIIVTMHTFQDGLETKYMEILRFQASEEESWAAPPPVSQPPPCNRLPPELFEQLRMLLEPNSITGNDWRRLASHLGLCGMKIRFLSCQRSPAAAILELFEEQNGSLQELHYLMTVMERLDCASAIQNYLSGTHGGSPGPERGGARDNQGLELDEKL

SEQ ID NO: 1346 - protein, 243 aa, Homo sapiens
MAKVEQVLSLEPQHELKFRGPFTDVVTTNLKLGNPTDRNVCFKVKTTAPRRYCVRPNSGIIDAGASINVSVMLQPFDYDPNEKSKHKFMVQSMFAPTDTSDMEAVWKEAKPEDLMDSKLRCVFELPAENDKPHDVEINKIISTTASKTETPIVSKSLSSSLDDTEVKKVMEECKRLQGEVQRLREENKQFKEEDGLRMRKTVQSNSPISALAPTGKEEGLSTRLLALVVLFFIVGVIIGKIAL

SEQ ID NO: 1347 - protein, 99 aa, Homo sapiens
MAKVEQVLSLEPQHELKFRGPFTDVVTTNLKLGNPTDRNVCFKVKTTAPRRYCVRPNSGIIDAGASINVSGRRWTADEEDSAEQQPHFSISPNWEGRRP

SEQ ID NO: 1348 - protein, 489 aa, Homo sapiens
MAAHGGSAASSALKGLIQQFTTITGASESVGKHMLEACNNNLEMAVTMFLDGGGIAEEPSTSSASVSTVRPHTEEEVRAPIPQKQEILVEPEPLFGAPKRRRPARSIFDGFRDFQTETIRQEQELRNGGAIDKKLTTLADLFRPPIDLMHKGSFETAKECGQMQNKWLMINIQNVQDFACQCLNRDVWSNEAVKNIIREHFIFWQVYHDSEEGQRYIQFYKLGDFPYVSILDPRTGQKLVEWHQLDVSSFLDQVTGFLGEHGQLDGLSSSPPKKCARSESLIDASEDSQLEAAIRASLQETHFDSTQTKQDSRSDEESESELFSGSEEFISVCGSDEEEEVENLAKSRKSPHKDLGHRKEENRRPLTEPPVRTDPGTATNHQGLPAVDSEILEMPPEKADGVVEGIDVNGPKAQLMLRYPDGKREQITLPEQAKLLALVKHVQSKGYPNERFELLTNFPRRKLSHLDYDITLQEAGLCPQETVFVQERN

SEQ ID NO: 1349 - protein, 125 aa, Homo sapiens
MSPKPRASGPPAKAKETGKRKSSSQPSPSGPKKKTTKVAEKGEAVRGGRRGKKGAATKMAAVTAPEAESGPAAPGPSDQPSQELPQHELPPEEPVSEGTQHDPLSQESELEEPLSKGRPSTPLSP

SEQ ID NO: 1350 - protein, 406 aa, Homo sapiens
MAENGKNCDQRRVAMNKEHHNGNFTDPSSVNEKKRREREERQNIVLWRQPLITLQYFSLEILVILKEWTSKLWHRQSIVVSFLLLLAVLIATYYVEGVHQQYVQRIEKQFLLYAYWIGLGILSSVGLGTGLHTFLLYLGPHIASVTLAAYECNSVNFPEPPYPDQIICPDEEGTEGTISLWSIISKVRIEACMWGIGTAIGELPPYFMARAARLSGAEPDDEEYQEFEEMLEHAESAQDFASRAKLAVQKLVQKVGFFGILACASIPNPLFDLAGITCGHFLVPFWTFFGATLIGKAIIKMHIQKIFVIITFSKHIVEQMVAFIGAVPGIGPSLQKPFQEYLEAQRQKLHHKSEMGTPQGENWLSWMFEKLVVVMVCYFILSIINSMAQSYAKRIQQRLNSEEKTK

SEQ ID NO: 1351 - protein, 214 aa, Homo sapiens
MWGIGTAIGELPPYFMARAARLSGAEPDDEEYQEFEEMLEHAESAQDFASRAKLAVQKLVQKVGFFGILACASIPNPLFDLAGITCGHFLVPFWTFFGATLIGKAIIKMHIQKIFVIITFSKHIVEQMVAFIGAVPGIGPSLQKPFQEYLEAQRQKLHHKSEMGTPQGENWLSWMFEKLVVVMVCYFILSIINSMAQSYAKRIQQRLNSEEKTK

SEQ ID NO: 1352 - protein, 476 aa, Homo sapiens
MVKLIHTLADHGDDVNCCAFSFSLLATCSLDKTIRLYSLRDFTELPHSPLKFHTYAVHCCCFSPSGHILASCSTDGTTVLWNTENGQMLAVMEQPSGSPVRVCQFSPDSTCLASGAADGTVVLWNAQSYKLYRCGSVKDGSLAACAFSPNGSFFVTGSSCGDLTVWDDKMRCPHSEKAHDLGITCCDFSSQPVSDGEQGLQFFRLASCGQDCQVKIWIVSFTHILGFELKYKSTLSGHCAPVLACAFSHDGQMLVSGSVDKSVIVYDTNTENILHTLTQHTRYVTTCAFAPNTLLLATGSMDKTVNIWQFDLETLCQARRTEHQLKQFTEDWSEEDVSTWLCAQDLKDLVGIFKMNNIDGKELLNLTKESLADDLKIESLGLRSKVLRKIEELRTKVKSLSSGIPDEFICPITRELMKDPVIASDGYSYEKEAMENWISKKKRTSPMTNLVLPSAVLTPNRTLKMAINRWLETHQK

SEQ ID NO: 1353 - protein, 384 aa, Homo sapiens
MVKLIHTLADHGDDVNCCAFSFSLLATCSLDKTIRLYSLRDFTELPHSPLKFHTYAVHCCCFSPSGHILASCSTDGTTVLWNTENGQMLAVMEQPSGSPVRVCQFSPDSTCLASGAADGTVVLWNAQSYKLYRCGSVKDGSLAACAFSPNGSFFVTGSSCGDLTVWDDKMRCPHSEKAHDLGITCCDFSSQPVSDGEQGLQFFRLASCGQDCQVKIWIVSFTHILARRTEHQLKQFTEDWSEEDVSTWLCAQDLKDLVGIFKMNNIDGKELLNLTKESLADDLKIESLGLRSKVLRKIEELRTKVKSLSSGIPDEFICPITRELMKDPVIASDGYSYEKEAMENWISKKKRTSPMTNLVLPSAVLTPNRTLKMAINRWLETHQK

SEQ ID NO: 1354 - protein, 646 aa, Homo sapiens
MSFLSRQQPPPPRRAGAACTLRQKLIFSPCSDCEEEEEEEEEEGSGHSTGEDSAFQEPDSPLPPARSPTEPGPERRRSPGPAPGSPGELEEDLLLPGACPGADEAGGGAEGDSWEEEGFGSSSPVKSPAAPYFLGSSFSPVRCGGPGDASPRGCGARRAGEGRRSPRPDHPGTPPHKTFRKLRLFDTPHTPKSLLSKARGIDSSSVKLRGSSLFMDTEKSGKREFDVRQTPQVNINPFTPDSLLLHSSGQCRRRKRTYWNDSCGEDMEASDYELEDETRPAKRITITESNMKSRYTTEFHELEKIGSGEFGSVFKCVKRLDGCIYAIKRSKKPLAGSVDEQNALREVYAHAVLGQHSHVVRYFSAWAEDDHMLIQNEYCNGGSLADAISENYRIMSYFKEAELKDLLLQVGRGLRYIHSMSLVHMDIKPSNIFISRTSIPNAASEEGDEDDWASNKVMFKIGDLGHVTRISSPQVEEGDSRFLANEVLQENYTHLPKADIFALALTVVCAAGAEPLPRNGDQWHEIRQGRLPRIPQVLSQEFTELLKVMIHPDPERRPSAMALVKHSVLLSASRKSAEQLRIELNAEKFKNSLLQKELKKAQMAKAAAEERALFTDRMATRSTTQSNRTSRLIGKKMNRSVSLTIY

SEQ ID NO: 1355 - protein, 432 aa, Homo sapiens
MDTEKSGKREFDVRQTPQVNINPFTPDSLLLHSSGQCRRRKRTYWNDSCGEDMEASDYELEDETRPAKRITITESNMKSRYTTEFHELEKIGSGEFGSVFKCVKRLDGCIYAIKRSKKPLAGSVDEQNALREVYAHAVLGQHSHVVRYFSAWAEDDHMLIQNEYCNGGSLADAISENYRIMSYFKEAELKDLLLQVGRGLRYIHSMSLVHMDIKPSNIFISRTSIPNAASEEGDEDDWASNKVMFKIGDLGHVTRISSPQVEEGDSRFLANEVLQENYTHLPKADIFALALTVVCAAGAEPLPRNGDQWHEIRQGRLPRIPQVLSQEFTELLKVMIHPDPERRPSAMALVKHSVLLSASRKSAEQLRIELNAEKFKNSLLQKELKKAQMAKAAAEERALFTDRMATRSTTQSNRTSRLIGKKMNRSVSLTIY

SEQ ID NO: 1356 - protein, 790 aa, Homo sapiens
MEKMSRVTTALGGSVLTGRTMHCHLDAPANAISVCRDAAQVVVAGRSIFKIYAIEEEQFVEKLNLRVGRKPSLNLSCADVVWHQMDENLLATAATNGVVVTWNLGRPSRNKQDQLFTEHKRTVNKVCFHPTEAHVLLSGSQDGFMKCFDLRRKDSVSTFSGQSESVRDVQFSIRDYFTFASTFENGNVQLWDIRRPDRCERMFTAHNGPVFCCDWHPEDRGWLATGGRDKMVKVWDMTTHRAKEMHCVQTIASVARVKWRPECRHHLATCSMMVDHNIYVWDVRRPFVPAAMFEEHRDVTTGIAWRHPHDPSFLLSGSKDSSLCQHLFRDASQPVERANPEGLCYGLFGDLAFAAKESLVAAESGRKPYTGDRRHPIFFKRKLDPAEPFAGLASSALSVFETEPGGGGMRWFVDTAERYALAGRPLAELCDHNAKVARELGRNQVAQTWTMLRIIYCSPGLVPTANLNHSVGKGGSCGLPLMNSFNLKDMAPGLGSETRLDRSKGDARSDTVLLDSSATLITNEDNEETEGSDVPADYLLGDVEGEEDELYLLDPEHAHPEDPECVLPQEAFPLRHEIVDTPPGPEHLQDKADSPHVSGSEADVASLAPVDSSFSLLSVSHALYDSRLPPDFFGVLVRDMLHFYAEQGDVQMAVSVLIVLGERVRKDIDEQTQEHWYTSYIDLLQRFRLWNVSNEVVKLSTSRAVSCLNQASTTLHVNCSHCKRPMSSRGWVCDRCHRCASMCAVCHHVVKGLFVWCQGCSHGGHLQHIMKWLEGSSHCPAGCGHLCEYS

SEQ ID NO: 1357 - protein, 93 aa, Homo sapiens
MKPVLPLQFLVVFCLALQLVPGSPKQRVLKYILEPPPCISAPENCTHLCTMQEDCEKGFQCCSSFCGIVCSSETFQKRNRIKHKGSEVIMPAN

SEQ ID NO: 1358 - protein, 761 aa, Homo sapiens
MLASSKRMNSSSRSQILLRWKSDKAQSGPYNVEKEILTSRFLRDTETCRQNFRNFPYPDLAGPRKALSQLRELCLKWLRPEIHSKEQILELLVLEQFLTILPGEVRTWVKSQYPESSEEAVTLVEDLTQILEEEAPQNSTLSQDTPEEDPRGKHAFQTGWLNDLVTKESMTFKDVAVDITQEDWELMRPVQKELYKTVTLQNYWNMVSLGLTVYRPTVIPILEEPWMVIKEILEGPSPEWETKAQACTPVEDMSKLTKEETHTIKLEDSYDYDDRLERRGKGGFWKIHTDERGFSLKSVLSQEYDPTEECLSKYDIYRNNFEKHSNLIVQFDTQLDNKTSVYNEGRATFNHVSYGIVHRKILPGEKPYKCNVCGKKFRKYPSLLKHQSTHAKEKSYECEECGKEFRHISSLIAHQRMHTGEKPYECHQCGKAFSQRAHLTIHQRIHTGEKPYKCDDCGKDFSQRAHLTIHQRTHTGEKPYKCLECGKTFSHSSSLINHQRVHTGEKPYICNECGKTFSQSTHLLQHQKIHTGKKPYKCNECWKVFSQSTYLIRHQRIHSGEKCYKCNECGKAFAHSSTLIQHQTTHTGEKSYICNICGKAFSQSANLTQHHRTHTGEKPYKCSVCGKAFSQSVHLTQHQRIHNGEKPFKCNICGKAYRQGANLTQHQRIHTGEKPYKCNECGKAFIYSSSLNQHQRTHTGERPYKCNECDKDFSQRTCLIQHQRIHTGEKPYACRICGKTFTQSTNLIQHQRVHTGAKHRN

SEQ ID NO: 1359 - protein, 320 aa, Homo sapiens
MLLCFRFGNQSMKRENFTLITDFVFQGFSSFHEQQITLFGVFLALYILTLAGNIIIVTIIRMDLHLHTPMYFFLSMLSTSETVYTLVILPRMLSSLVGMSQPISLAGCATQMFFFVTFGITNCFLLTAMGYDRYVAICNPLRYMVIMNKRLRIQLVLGACSIGLIVAITQVTSVFRLPFCARKVPHFFCDIRPVMKLSCIDTTVNEILTLIISVLVLVVPMGLVFISYVLIISTILKIASVEGRKKAFATCASHLTVVIVHYSCASIAYLKPKSENTREHDQLISVTYTVITPLLNPVVYTLRNKEVKDALCRAVGGKFS

SEQ ID NO: 1360 - protein, 577 aa, Homo sapiens
MSKPELKEDKMLEVHFVGDDDVLNHILDREGGAKLKKERAQLLVNPKKIIKKPEYDLEEDDQEVLKDQNYVEIMGRDVQESLKNGSATGGGNKVYSFQNRKHSEKMAKLASELAKTPQKSVSFSLKNDPEITINVPQSSKGHSASDKVQPKNNDKSEFLSTAPRSLRKRLIVPRSHSDSESEYSASNSEDDEGVAQEHEEDTNAVIFSQKIQAQNRVVSAPVGKETPSKRMKRDKTSDLVEEYFEAHSSSKVLTSDRTLQKLKRAKLDQQTLRNLLSKVSPSFSAELKQLNQQYEKLFHKWMLQLHLGFNIVLYGLGSKRDLLERFRTTMLQDSIHVVINGFFPGISVKSVLNSITEEVLDHMGTFRSILDQLDWIVNKFKEDSSLELFLLIHNLDSQMLRGEKSQQIIGQLSSLHNIYLIASIDHLNAPLMWDHAKQSLFNWLWYETTTYSPYTEETSYENSLLVKQSGSLPLSSLTHVLRSLTPNARGIFRLLIKYQLDNQDNPSYIGLSFQDFYQQCREAFLVNSDLTLRAQLTEFRDHKLIRTKKGTDGVEYLLIPVDNGTLTDFLEKEEEEA

SEQ ID NO: 1361 - protein, 732 aa, Homo sapiens
MLARRQRDPLQALRRRNQELKQQVDSLLSESQLKEALEPNKRQHIYQRCIQLKQAIDENKNALQKLSKADESAPVANYNQRKEEEHTLLDKLTQQLQGLAVTISRENITEVGAPTEEEEESESEDSEDSGGEEEDAEEEEEEKEENESHKWSTGEEYIAVGDFTAQQVGDLTFKKGEILLVIEKKPDGWWIAKDAKGNEGLVPRTYLEPYSEEEEGQESSEEGSEEDVEAVDETADGAEVKQRTDPHWSAVQKAISEAGIFCLVNHVSFCYLIVLMRNRMETVEDTNGSETGFRAWNVQSRGRIFLVSKPVLQINTVDVLTTMGAIPAGFRPSTLSQLLEEGNQFRANYFLQPELMPSQLAFRDLMWDATEGTIRSRPSRISLILTLWSCKMIPLPGMSIQVLSRHVRLCLFDGNKVLSNIHTVRATWQPKKPKTWTFSPQVTRILPCLLDGDCFIRSNSASPDLGILFELGISYIRNSTGERGELSCGWVFLKLFDASGVPIPAKTYELFLNGGTPYEKGIEVDPSISRRAHGSVFYQIMTMRRQPQLLVKLRSLNRRSRNVLSLLPETLIGNMCSIHLLIFYRQILGDVLLKDRMSLQSTDLISHPMLATFPMLLEQPDVMDALRSSWAGKESTLKRSEKRDKEFLKSTFLLVYHDCVLPLLHSTRLPPFRWAEEETETARWKVITDFLKQNQENQGALQALLSPDGVHEPFDLSEQTYDFLGEMRKNAV

SEQ ID NO: 1362 - protein, 677 aa, Homo sapiens
MLARRQRDPLQALRRRNQELKQQVDSLLSESQLKEALEPNKRQHIYQRCIQLKQAIDENKNALQKLSKADESAPVANYNQRKEEEHTLLDKLTQQLQGLAVTISRENITEVGAPTEEEEESESEDSEDSGGEEEDAEEEEEEKEENESHKWSTGEEYIAVGDFTAQQVGDLTFKKGEILLVIEKKPDGWWIAKDAKGNEGLVPRTYLEPYSEEEEGQESSEEGSEEDVEAVDETADGAEVKQRTDPHWSAVQKAISEQINTVDVLTTMGAIPAGFRPSTLSQLLEEGNQFRANYFLQPELMPSQLAFRDLMWDATEGTIRSRPSRISLILTLWSCKMIPLPGMSIQVLSRHVRLCLFDGNKVLSNIHTVRATWQPKKPKTWTFSPQVTRILPCLLDGDCFIRSNSASPDLGILFELGISYIRNSTGERGELSCGWVFLKLFDASGVPIPAKTYELFLNGGTPYEKGIEVDPSISRRAHGSVFYQIMTMRRQPQLLVKLRSLNRRSRNVLSLLPETLIGNMCSIHLLIFYRQILGDVLLKDRMSLQSTDLISHPMLATFPMLLEQPDVMDALRSSWAGKESTLKRSEKRDKEFLKSTFLLVYHDCVLPLLHSTRLPPFRWAEEETETARWKVITDFLKQNQENQGALQALLSPDGVHEPFDLSEQTYDFLGEMRKNAV

SEQ ID NO: 1363 - protein, 614 aa, Homo sapiens
MLARRQRDPLQALRRRNQELKQQVDSLLSESQLKEALEPNKRQHIYQRVGAPTEEEEESESEDSEDSGGEEEDAEEEEEEKEENESHKWSTGEEYIAVGDFTAQQVGDLTFKKGEILLVIEKKPDGWWIAKDAKGNEGLVPRTYLEPYSEEEEGQESSEEGSEEDVEAVDETADGAEVKQRTDPHWSAVQKAISEINTVDVLTTMGAIPAGFRPSTLSQLLEEGNQFRANYFLQPELMPSQLAFRDLMWDATEGTIRSRPSRISLILTLWSCKMIPLPGMSIQVLSRHVRLCLFDGNKVLSNIHTVRATWQPKKPKTWTFSPQVTRILPCLLDGDCFIRSNSASPDLGILFELGISYIRNSTGERGELSCGWVFLKLFDASGVPIPAKTYELFLNGGTPYEKGIEVDPSISRRAHGSVFYQIMTMRRQPQLLVKLRSLNRRSRNVLSLLPETLIGNMCSIHLLIFYRQILGDVLLKDRMSLQSTDLISHPMLATFPMLLEQPDVMDALRSSWAGKESTLKRSEKRDKEFLKSTFLLVYHDCVLPLLHSTRLPPFRWAEEETETARWKVITDFLKQNQENQGALQALLSPDGVHEPFDLSEQTYDFLGEMRKNAV

SEQ ID NO: 1364 - protein, 733 aa, Homo sapiens
MLARRQRDPLQALRRRNQELKQQVDSLLSESQLKEALEPNKRQHIYQRCIQLKQAIDENKNALQKLSKADESAPVANYNQRKEEEHTLLDKLTQQLQGLAVTISRENITEVGAPTEEEEESESEDSEDSGGEEEDAEEEEEEKEENESHKWSTGEEYIAVGDFTAQQVGDLTFKKGEILLVIEKKPDGWWIAKDAKGNEGLVPRTYLEPYSEEEEGQESSEEGSEEDVEAVDETADGAEVKQRTDPHWSAVQKAISEAGIFCLVNHVSFCYLIVLMRNRMETVEDTNGSETGFRAWNVQSRGRIFLVSKPVLQQINTVDVLTTMGAIPAGFRPSTLSQLLEEGNQFRANYFLQPELMPSQLAFRDLMWDATEGTIRSRPSRISLILTLWSCKMIPLPGMSIQVLSRHVRLCLFDGNKVLSNIHTVRATWQPKKPKTWTFSPQVTRILPCLLDGDCFIRSNSASPDLGILFELGISYIRNSTGERGELSCGWVFLKLFDASGVPIPAKTYELFLNGGTPYEKGIEVDPSISRRAHGSVFYQIMTMRRQPQLLVKLRSLNRRSRNVLSLLPETLIGNMCSIHLLIFYRQILGDVLLKDRMSLQSTDLISHPMLATFPMLLEQPDVMDALRSSWAGKESTLKRSEKRDKEFLKSTFLLVYHDCVLPLLHSTRLPPFRWAEEETETARWKVITDFLKQNQENQGALQALLSPDGVHEPFDLSEQTYDFLGEMRKNAV

SEQ ID NO: 1365 - protein, 303 aa, Homo sapiens
MSFSSLPTEIQSLLFLTFLTIYLVTLMGNCLIILVTLADPMLHSPMYFFLRNLSFLEIGFNLVIVPKMLGTLLAQDTTISFLGCATQMYFFFFFGVAECFLLATMAYDRYVAICSPLHYPVIMNQRTRAKLAAASWFPGFPVATVQTTWLFSFPFCGTNKVNHFFCDSPPVLRLVCADTALFEIYAIVGTILVVMIPCLLILCSYTHIAAAILKIPSAKGKNKAFSTCSSHLLVVSLFYISLSLTYFRPKSNNSPEGKKLLSLSYTVMTPMLNPIIYSLRNNEVKNALSRTVSKALALRNCIP

SEQ ID NO: 1366 - protein, 889 aa, Homo sapiens
MEGGLADGEPDRTSLLGDSKDVLGPSTVVANSDESQLLTPGKMSQRQGKEAYPTPTKDLHQPSLSPASPHSQGFERGKEDISQNKDESSLSMSKSKSESKLYNGSEKDSSTSSKLTKKESLKVQKKNYREEKKRATKELLSTITDPSVIVMADWLKIRGTLKSWTKLWCVLKPGVLLIYKTQKNGQWVGTVLLNACEIIERPSKKDGFCFKLFHPLEQSIWAVKGPKGEAVGSITQPLPSSYLIIRATSESDGRCWMDALELALKCSSLLKRTMIREGKEHDLSVSSDSTHVTFYGLLRANNLHSGDNFQLNDSEIERQHFKDQDMYSDKSDKENDQEHDESDNEVMGKSEESDTDTSERQDDSYIEPEPVEPLKETTYTEQSHEELGEAGEASQTETVSEENKSLIWTLLKQVRPGMDLSKVVLPTFILEPRSFLDKLSDYYYHADFLSEAALEENPYFRLKKVVKWYLSGFYKKPKGLKKPYNPILGETFRCLWIHPRTNSKTFYIAEQVSHHPPISAFYVSNRKDGFCLSGSILAKSKFYGNSLSAILEGEARLTFLNRGEDYVMTMPYAHCKGILYGTMTLELGGTVNITCQKTGYSAILEFKLKPFLGSSDCVNQISGKLKLGKEVLATLEGHWDSEVFITDKKTDNSEVFWNPTPDIKQWRLIRHTVKFEEQGDFESEKLWQRVTRAINAKDQTEATQEKYVLEEAQRQAARDRKTKNEEWSCKLFELDPLTGEWHYKFADTRPWDPLNDMIQFEKDGVIQTKVKHRTPMVSVPKMKHKPTRQQKKVAKGYSSPEPDIQDSSGSEAQSVKPSTRRKKGIELGDIQSSIESIKQTQEEIKRNIMALRNHLVSSTPATDYFLQQKDYFIIFLLILLQVIINFMFK

SEQ ID NO: 1367 - protein, 874 aa, Homo sapiens
MEGGLADGEPDRTSANSDESQLLTPGKMSQRQGKEAYPTPTKDLHQPSLSPASPHSQGFERGKEDISQNKDESSLSMSKSKSESKLYNGSEKDSSTSSKLTKKESLKVQKKNYREEKKRATKELLSTITDPSVIVMADWLKIRGTLKSWTKLWCVLKPGVLLIYKTQKNGQWVGTVLLNACEIIERPSKKDGFCFKLFHPLEQSIWAVKGPKGEAVGSITQPLPSSYLIIRATSESDGRCWMDALELALKCSSLLKRTMIREGKEHDLSVSSDSTHVTFYGLLRANNLHSGDNFQLNDSEIERQHFKDQDMYSDKSDKENDQEHDESDNEVMGKSEESDTDTSERQDDSYIEPEPVEPLKETTYTEQSHEELGEAGEASQTETVSEENKSLIWTLLKQVRPGMDLSKVVLPTFILEPRSFLDKLSDYYYHADFLSEAALEENPYFRLKKVVKWYLSGFYKKPKGLKKPYNPILGETFRCLWIHPRTNSKTFYIAEQVSHHPPISAFYVSNRKDGFCLSGSILAKSKFYGNSLSAILEGEARLTFLNRGEDYVMTMPYAHCKGILYGTMTLELGGTVNITCQKTGYSAILEFKLKPFLGSSDCVNQISGKLKLGKEVLATLEGHWDSEVFITDKKTDNSEVFWNPTPDIKQWRLIRHTVKFEEQGDFESEKLWQRVTRAINAKDQTEATQEKYVLEEAQRQAARDRKTKNEEWSCKLFELDPLTGEWHYKFADTRPWDPLNDMIQFEKDGVIQTKVKHRTPMVSVPKMKHKPTRQQKKVAKGYSSPEPDIQDSSGSEAQSVKPSTRRKKGIELGDIQSSIESIKQTQEEIKRNIMALRNHLVSSTPATDYFLQQKDYFIIFLLILLQVIINFMFK

SEQ ID NO: 1368 - protein, 847 aa, Homo sapiens
MSQRQGKEAYPTPTKDLHQPSLSPASPHSQGFERGKEDISQNKDESSLSMSKSKSESKLYNGSEKDSSTSSKLTKKESLKVQKKNYREEKKRATKELLSTITDPSVIVMADWLKIRGTLKSWTKLWCVLKPGVLLIYKTQKNGQWVGTVLLNACEIIERPSKKDGFCFKLFHPLEQSIWAVKGPKGEAVGSITQPLPSSYLIIRATSESDGRCWMDALELALKCSSLLKRTMIREGKEHDLSVSSDSTHVTFYGLLRANNLHSGDNFQLNDSEIERQHFKDQDMYSDKSDKENDQEHDESDNEVMGKSEESDTDTSERQDDSYIEPEPVEPLKETTYTEQSHEELGEAGEASQTETVSEENKSLIWTLLKQVRPGMDLSKVVLPTFILEPRSFLDKLSDYYYHADFLSEAALEENPYFRLKKVVKWYLSGFYKKPKGLKKPYNPILGETFRCLWIHPRTNSKTFYIAEQVSHHPPISAFYVSNRKDGFCLSGSILAKSKFYGNSLSAILEGEARLTFLNRGEDYVMTMPYAHCKGILYGTMTLELGGTVNITCQKTGYSAILEFKLKPFLGSSDCVNQISGKLKLGKEVLATLEGHWDSEVFITDKKTDNSEVFWNPTPDIKQWRLIRHTVKFEEQGDFESEKLWQRVTRAINAKDQTEATQEKYVLEEAQRQAARDRKTKNEEWSCKLFELDPLTGEWHYKFADTRPWDPLNDMIQFEKDGVIQTKVKHRTPMVSVPKMKHKPTRQQKKVAKGYSSPEPDIQDSSGSEAQSVKPSTRRKKGIELGDIQSSIESIKQTQEEIKRNIMALRNHLVSSTPATDYFLQQKDYFIIFLLILLQVIINFMFK

SEQ ID NO: 1369 - protein, 312 aa, Homo sapiens
MGSKALPAPIPLHPSLQLTNYSFLQAVNTFPATVDHLQGLYGLSAVQTMHMNHWTLGYPNVHEITRSTITEMAAAQGLVDARFPFPALPFTTHLFHPKQGAIAHVLPALHKDRPRFDFANLAVAATQEDPPKMGDLSKLSPGLGSPISGLSKLTPDRKPSRGRLPSKTKKEFICKFCGRHFTKSYNLLIHERTHTDERPYTCDICHKAFRRQDHLRDHRYIHSKEKPFKCQECGKGFCQSRTLAVHKTLHMQESPHKCPTCGRTFNQRSNLKTHLLTHTDIKPYSCEQCGKVFRRNCDLRRHSLTHTPRQDF

SEQ ID NO: 1370 - protein, 276 aa, Homo sapiens
MGSKALPAPIPLHPSLQLTNYSFLQAVNTFPATVDHLQGLYGLSAVQTMHMNHWTLGYPNVHEITRSTITEMAAAQGLVDARFPFPALPFTTHLFHPKQGAIAHVLPALHKDRPRFDFANLAVAATQEDPPKMGDLSKLSPGLGSPISGLSKLTPDRKPSRGRLPSKTKKEFICKFCGRHFTKSYNLLIHERTHTDERPYTCDICHKAFRRQDHLRDHRYIHSKEKPFKCQECGKGFCQSRTLAVHKTLHMQTSSPTAASSAAKCSGETVICGGTA

SEQ ID NO: 1371 - protein, 433 aa, Homo sapiens
MGLRAEEGKRKPPRSVRGEVSPSQGPLAQEDEARRLRSCTPACHPGKRGKGGHRARRQRSAWDLTTHPLTHRSQELRGAAATEGFLYVLLSHWVFVGAPRPPASDSWKKGLVPSAPPASRKMGSKALPAPIPLHPSLQLTNYSFLQAVNTFPATVDHLQGLYGLSAVQTMHMNHWTLGYPNVHEITRSTITEMAAAQGLVDARFPFPALPFTTHLFHPKQGAIAHVLPALHKDRPRFDFANLAVAATQEDPPKMGDLSKLSPGLGSPISGLSKLTPDRKPSRGRLPSKTKKEFICKFCGRHFTKSYNLLIHERTHTDERPYTCDICHKAFRRQDHLRDHRYIHSKEKPFKCQECGKGFCQSRTLAVHKTLHMQESPHKCPTCGRTFNQRSNLKTHLLTHTDIKPYSCEQCGKVFRRNCDLRRHSLTHTPRQDF

SEQ ID NO: 1372 - protein, 960 aa, Homo sapiens
MWRLRRAAVACEVCQSLVKHSSGIKGSLPLQKLHLVSRSIYHSHHPTLKLQRPQLRTSFQQFSSLTNLPLRKLKFSPIKYGYQPRRNFWPARLATRLLKLRYLILGSAVGGGYTAKKTFDQWKDMIPDLSEYKWIVPDIVWEIDEYIDFEKIRKALPSSEDLVKLAPDFDKIVESLSLLKDFFTSGSPEETAFRATDRGSESDKHFRKVSDKEKIDQLQEELLHTQLKYQRILERLEKENKELRKLVLQKDDKGIHHRKLKKSLIDMYSEVLDVLSDYDASYNTQDHLPRVVVVGDQSAGKTSVLEMIAQARIFPRGSGEMMTRSPVKVTLSEGPHHVALFKDSSREFDLTKEEDLAALRHEIELRMRKNVKEGCTVSPETISLNVKGPGLQRMVLVDLPGVINTVTSGMAPDTKETIFSISKAYMQNPNAIILCIQDGSVDAERSIVTDLVSQMDPHGRRTIFVLTKVDLAEKNVASPSRIQQIIEGKLFPMKALGYFAVVTGKGNSSESIEAIREYEEEFFQNSKLLKTSMLKAHQVTTRNLSLAVSDCFWKMVRESVEQQADSFKATRFNLETEWKNNYPRLRELDRNELFEKAKNEILDEVISLSQVTPKHWEEILQQSLWERVSTHVIENIYLPAAQTMNSGTFNTTVDIKLKQWTDKQLPNKAVEVAWETLQEEFSRFMTEPKGKEHDDIFDKLKEAVKEESIKRHKWNDFAEDSLRVIQHNALEDRSISDKQQWDAAIYFMEEALQARLKDTENAIENMVGPDWKKRWLYWKNRTQEQCVHNETKNELEKMLKCNEEHPAYLASDEITTVRKNLESRGVEVDPSLIKDTWHQVYRRHFLKTALNHCNLCRRGFYYYQRHFVDSELECNDVVLFWRIQRMLAITANTLRQQLTNTEVRRLEKNVKEVLEDFAEDGEKKIKLLTGKRVQLAEDLKKVREIQEKLDAFIEALHQEK

SEQ ID NO: 1373 - protein, 997 aa, Homo sapiens
MWRLRRAAVACEVCQSLVKHSSGIKGSLPLQKLHLVSRSIYHSHHPTLKLQRPQLRTSFQQFSSLTNLPLRKLKFSPIKYGYQPRRNFWPARLATRLLKLRYLILGSAVGGGYTAKKTFDQWKDMIPDLSEYKWIVPDIVWEIDEYIDFEKIRKALPSSEDLVKLAPDFDKIVESLSLLKDFFTSGSPEETAFRATDRGSESDKHFRKGLLGELILLQQQIQEHEEEARRAAGQYSTSYAQQKRKVSDKEKIDQLQEELLHTQLKYQRILERLEKENKELRKLVLQKDDKGIHHRKLKKSLIDMYSEVLDVLSDYDASYNTQDHLPRVVVVGDQSAGKTSVLEMIAQARIFPRGSGEMMTRSPVKVTLSEGPHHVALFKDSSREFDLTKEEDLAALRHEIELRMRKNVKEGCTVSPETISLNVKGPGLQRMVLVDLPGVINTVTSGMAPDTKETIFSISKAYMQNPNAIILCIQDGSVDAERSIVTDLVSQMDPHGRRTIFVLTKVDLAEKNVASPSRIQQIIEGKLFPMKALGYFAVVTGKGNSSESIEAIREYEEEFFQNSKLLKTSMLKAHQVTTRNLSLAVSDCFWKMVRESVEQQADSFKATRFNLETEWKNNYPRLRELDRNELFEKAKNEILDEVISLSQVTPKHWEEILQQSLWERVSTHVIENIYLPAAQTMNSGTFNTTVDIKLKQWTDKQLPNKAVEVAWETLQEEFSRFMTEPKGKEHDDIFDKLKEAVKEESIKRHKWNDFAEDSLRVIQHNALEDRSISDKQQWDAAIYFMEEALQARLKDTENAIENMVGPDWKKRWLYWKNRTQEQCVHNETKNELEKMLKCNEEHPAYLASDEITTVRKNLESRGVEVDPSLIKDTWHQVYRRHFLKTALNHCNLCRRGFYYYQRHFVDSELECNDVVLFWRIQRMLAITANTLRQQLTNTEVRRLEKNVKEVLEDFAEDGEKKIKLLTGKRVQLAEDLKKVREIQEKLDAFIEALHQEK

SEQ ID NO: 1374 - protein, 961 aa, Homo sapiens
MWRLRRAAVACEVCQSLVKHSSGIKGSLPLQKLHLVSRSIYHSHHPTLKLQRPQLRTSFQQFSSLTNLPLRKLKFSPIKYGYQPRRNFWPARLATRLLKLRYLILGSAVGGGYTAKKTFDQWKDMIPDLSEYKWIVPDIVWEIDEYIDFGSPEETAFRATDRGSESDKHFRKGLLGELILLQQQIQEHEEEARRAAGQYSTSYAQQKRKVSDKEKIDQLQEELLHTQLKYQRILERLEKENKELRKLVLQKDDKGIHHRKLKKSLIDMYSEVLDVLSDYDASYNTQDHLPRVVVVGDQSAGKTSVLEMIAQARIFPRGSGEMMTRSPVKVTLSEGPHHVALFKDSSREFDLTKEEDLAALRHEIELRMRKNVKEGCTVSPETISLNVKGPGLQRMVLVDLPGVINTVTSGMAPDTKETIFSISKAYMQNPNAIILCIQDGSVDAERSIVTDLVSQMDPHGRRTIFVLTKVDLAEKNVASPSRIQQIIEGKLFPMKALGYFAVVTGKGNSSESIEAIREYEEEFFQNSKLLKTSMLKAHQVTTRNLSLAVSDCFWKMVRESVEQQADSFKATRFNLETEWKNNYPRLRELDRNELFEKAKNEILDEVISLSQVTPKHWEEILQQSLWERVSTHVIENIYLPAAQTMNSGTFNTTVDIKLKQWTDKQLPNKAVEVAWETLQEEFSRFMTEPKGKEHDDIFDKLKEAVKEESIKRHKWNDFAEDSLRVIQHNALEDRSISDKQQWDAAIYFMEEALQARLKDTENAIENMVGPDWKKRWLYWKNRTQEQCVHNETKNELEKMLKCNEEHPAYLASDEITTVRKNLESRGVEVDPSLIKDTWHQVYRRHFLKTALNHCNLCRRGFYYYQRHFVDSELECNDVVLFWRIQRMLAITANTLRQQLTNTEVRRLEKNVKEVLEDFAEDGEKKIKLLTGKRVQLAEDLKKVREIQEKLDAFIEALHQEK

SEQ ID NO: 1375 - protein, 1015 aa, Homo sapiens
MWRLRRAAVACEVCQSLVKHSSGIKGSLPLQKLHLVSRSIYHSHHPTLKLQRPQLRTSFQQFSSLTNLPLRKLKFSPIKYGYQPRRNFWPARLATRLLKLRYLILGSAVGGGYTAKKTFDQWKDMIPDLSEYKWIVPDIVWEIDEYIDFEKIRKALPSSEDLVKLAPDFDKIVESLSLLKDFFTSGHKLVSEVIGASDLLLLLGSPEETAFRATDRGSESDKHFRKGLLGELILLQQQIQEHEEEARRAAGQYSTSYAQQKRKVSDKEKIDQLQEELLHTQLKYQRILERLEKENKELRKLVLQKDDKGIHHRKLKKSLIDMYSEVLDVLSDYDASYNTQDHLPRVVVVGDQSAGKTSVLEMIAQARIFPRGSGEMMTRSPVKVTLSEGPHHVALFKDSSREFDLTKEEDLAALRHEIELRMRKNVKEGCTVSPETISLNVKGPGLQRMVLVDLPGVINTVTSGMAPDTKETIFSISKAYMQNPNAIILCIQDGSVDAERSIVTDLVSQMDPHGRRTIFVLTKVDLAEKNVASPSRIQQIIEGKLFPMKALGYFAVVTGKGNSSESIEAIREYEEEFFQNSKLLKTSMLKAHQVTTRNLSLAVSDCFWKMVRESVEQQADSFKATRFNLETEWKNNYPRLRELDRNELFEKAKNEILDEVISLSQVTPKHWEEILQQSLWERVSTHVIENIYLPAAQTMNSGTFNTTVDIKLKQWTDKQLPNKAVEVAWETLQEEFSRFMTEPKGKEHDDIFDKLKEAVKEESIKRHKWNDFAEDSLRVIQHNALEDRSISDKQQWDAAIYFMEEALQARLKDTENAIENMVGPDWKKRWLYWKNRTQEQCVHNETKNELEKMLKCNEEHPAYLASDEITTVRKNLESRGVEVDPSLIKDTWHQVYRRHFLKTALNHCNLCRRGFYYYQRHFVDSELECNDVVLFWRIQRMLAITANTLRQQLTNTEVRRLEKNVKEVLEDFAEDGEKKIKLLTGKRVQLAEDLKKVREIQEKLDAFIEALHQEK

SEQ ID NO: 1376 - protein, 978 aa, Homo sapiens
MWRLRRAAVACEVCQSLVKHSSGIKGSLPLQKLHLVSRSIYHSHHPTLKLQRPQLRTSFQQFSSLTNLPLRKLKFSPIKYGYQPRRNFWPARLATRLLKLRYLILGSAVGGGYTAKKTFDQWKDMIPDLSEYKWIVPDIVWEIDEYIDFEKIRKALPSSEDLVKLAPDFDKIVESLSLLKDFFTSGHKLVSEVIGASDLLLLLGSPEETAFRATDRGSESDKHFRKVSDKEKIDQLQEELLHTQLKYQRILERLEKENKELRKLVLQKDDKGIHHRKLKKSLIDMYSEVLDVLSDYDASYNTQDHLPRVVVVGDQSAGKTSVLEMIAQARIFPRGSGEMMTRSPVKVTLSEGPHHVALFKDSSREFDLTKEEDLAALRHEIELRMRKNVKEGCTVSPETISLNVKGPGLQRMVLVDLPGVINTVTSGMAPDTKETIFSISKAYMQNPNAIILCIQDGSVDAERSIVTDLVSQMDPHGRRTIFVLTKVDLAEKNVASPSRIQQIIEGKLFPMKALGYFAVVTGKGNSSESIEAIREYEEEFFQNSKLLKTSMLKAHQVTTRNLSLAVSDCFWKMVRESVEQQADSFKATRFNLETEWKNNYPRLRELDRNELFEKAKNEILDEVISLSQVTPKHWEEILQQSLWERVSTHVIENIYLPAAQTMNSGTFNTTVDIKLKQWTDKQLPNKAVEVAWETLQEEFSRFMTEPKGKEHDDIFDKLKEAVKEESIKRHKWNDFAEDSLRVIQHNALEDRSISDKQQWDAAIYFMEEALQARLKDTENAIENMVGPDWKKRWLYWKNRTQEQCVHNETKNELEKMLKCNEEHPAYLASDEITTVRKNLESRGVEVDPSLIKDTWHQVYRRHFLKTALNHCNLCRRGFYYYQRHFVDSELECNDVVLFWRIQRMLAITANTLRQQLTNTEVRRLEKNVKEVLEDFAEDGEKKIKLLTGKRVQLAEDLKKVREIQEKLDAFIEALHQEK

SEQ ID NO: 1377 - protein, 924 aa, Homo sapiens
MWRLRRAAVACEVCQSLVKHSSGIKGSLPLQKLHLVSRSIYHSHHPTLKLQRPQLRTSFQQFSSLTNLPLRKLKFSPIKYGYQPRRNFWPARLATRLLKLRYLILGSAVGGGYTAKKTFDQWKDMIPDLSEYKWIVPDIVWEIDEYIDFGSPEETAFRATDRGSESDKHFRKVSDKEKIDQLQEELLHTQLKYQRILERLEKENKELRKLVLQKDDKGIHHRKLKKSLIDMYSEVLDVLSDYDASYNTQDHLPRVVVVGDQSAGKTSVLEMIAQARIFPRGSGEMMTRSPVKVTLSEGPHHVALFKDSSREFDLTKEEDLAALRHEIELRMRKNVKEGCTVSPETISLNVKGPGLQRMVLVDLPGVINTVTSGMAPDTKETIFSISKAYMQNPNAIILCIQDGSVDAERSIVTDLVSQMDPHGRRTIFVLTKVDLAEKNVASPSRIQQIIEGKLFPMKALGYFAVVTGKGNSSESIEAIREYEEEFFQNSKLLKTSMLKAHQVTTRNLSLAVSDCFWKMVRESVEQQADSFKATRFNLETEWKNNYPRLRELDRNELFEKAKNEILDEVISLSQVTPKHWEEILQQSLWERVSTHVIENIYLPAAQTMNSGTFNTTVDIKLKQWTDKQLPNKAVEVAWETLQEEFSRFMTEPKGKEHDDIFDKLKEAVKEESIKRHKWNDFAEDSLRVIQHNALEDRSISDKQQWDAAIYFMEEALQARLKDTENAIENMVGPDWKKRWLYWKNRTQEQCVHNETKNELEKMLKCNEEHPAYLASDEITTVRKNLESRGVEVDPSLIKDTWHQVYRRHFLKTALNHCNLCRRGFYYYQRHFVDSELECNDVVLFWRIQRMLAITANTLRQQLTNTEVRRLEKNVKEVLEDFAEDGEKKIKLLTGKRVQLAEDLKKVREIQEKLDAFIEALHQEK

SEQ ID NO: 1378 - protein, 312 aa, Homo sapiens
MGLFNVTHPAFFLLTGIPGLESSHSWLSGPLCVMYAVALGGNTVILQAVRVEPSLHEPMYYFLSMLSFSDVAISMATLPTVLRTFCLNARNITFDACLIQMFLIHFFSMMESGILLAMSFDRYVAICDPLRYATVLTTEVIAAMGLGAAARSFITLFPLPFLIKRLPICRSNVLSHSYCLHPDMMRLACADISINSIYGLFVLVSTFGMDLFFIFLSYVLILRSVMATASREERLKALNTCVSHILAVLAFYVPMIGVSTVHRFGKHVPCYIHVLMSNVYLFVPPVLNPLIYSAKTKEIRRAIFRMFHHIKI

SEQ ID NO: 1379 - protein, 371 aa, Homo sapiens
MGEGDAFWAPSVLPHSTLSTLSHHPQPQFGRRMESKVSEGGLNVTLTIRLLMHGKEVGSIIGKKGETVKKMREESGARINISEGNCPERIVTITGPTDAIFKAFAMIAYKFEEDIINSMSNSPATSKPPVTLRLVVPASQCGSLIGKGGSKIKEIRESTGAQVQVAGDMLPNSTERAVTISGTPDAIIQCVKQICVVMLESPPKGATIPYRPKPASTPVIFAGGQAYTIQGQYAIPHPDQLTKLHQLAMQQTPFPPLGQTNPAFPGEKLPLHSSEEAQNLMGQSSGLDASPPASTHELTIPNDLIGCIIGRQGTKINEIRQMSGAQIKIANATEGSSERQITITGTPANISLAQYLINARLTSEVTGMGTL

SEQ ID NO: 1380 - protein, 345 aa, Homo sapiens
MGEGDAFWAPSVLPHSTLSTLSHHPQPQFGRRMESKVSEGGLNVTLTIRLLMHGKEVGSIIGKKGETVKKMREESGARINISEGNCPERIVTITGPTDAIFKAFAMIAYKFEEDIINSMSNSPATSKPPVTLRLVVPASQCGSLIGKGGSKIKEIRESTGAQVQVAGDMLPNSTERAVTISGTPDAIIQCVKQICVVMLEAYTIQGQYAIPHPDLTKLHQLAMQQTPFPPLGQTNPAFPGEKLPLHSSEEAQNLMGQSSGLDASPPASTHELTIPNDLIGCIIGRQGTKINEIRQMSGAQIKIANATEGSSERQITITGTPANISLAQYLINARLTSEVTGMGTL

SEQ ID NO: 1381 - protein, 346 aa, Homo sapiens
MGEGDAFWAPSVLPHSTLSTLSHHPQPQFGRRMESKVSEGGLNVTLTIRLLMHGKEVGSIIGKKGETVKKMREESGARINISEGNCPERIVTITGPTDAIFKAFAMIAYKFEEDIINSMSNSPATSKPPVTLRLVVPASQCGSLIGKGGSKIKEIRESTGAQVQVAGDMLPNSTERAVTISGTPDAIIQCVKQICVVMLEAYTIQGQYAIPHPDQLTKLHQLAMQQTPFPPLGQTNPAFPGEKLPLHSSEEAQNLMGQSSGLDASPPASTHELTIPNDLIGCIIGRQGTKINEIRQMSGAQIKIANATEGSSERQITITGTPANISLAQYLINARLTSEVTGMGTL

SEQ ID NO: 1382 - protein, 370 aa, Homo sapiens
MGEGDAFWAPSVLPHSTLSTLSHHPQPQFGRRMESKVSEGGLNVTLTIRLLMHGKEVGSIIGKKGETVKKMREESGARINISEGNCPERIVTITGPTDAIFKAFAMIAYKFEEDIINSMSNSPATSKPPVTLRLVVPASQCGSLIGKGGSKIKEIRESTGAQVQVAGDMLPNSTERAVTISGTPDAIIQCVKQICVVMLESPPKGATIPYRPKPASTPVIFAGGQAYTIQGQYAIPHPDLTKLHQLAMQQTPFPPLGQTNPAFPGEKLPLHSSEEAQNLMGQSSGLDASPPASTHELTIPNDLIGCIIGRQGTKINEIRQMSGAQIKIANATEGSSERQITITGTPANISLAQYLINARLTSEVTGMGTL

SEQ ID NO: 1383 - protein, 351 aa, Homo sapiens
MGEGDAFWAPSVLPHSTLSTLSHHPQPQFGRRMESKVSEGGLNVTLTIRLLMHGKEVGSIIGKKGETVKKMREESGARINISEGNCPERIVTITGPTDAIFKAFAMIAYKFEEDIINSMSNSPATSKPPVTLRLVVPASQCGSLIGKGGSKIKEIRESTGAQVQVAGDMLPNSTERAVTISGTPDAIIQCVKQICVVMLESPPKGATIPYRPKPASTPVIFAGGQAYTIQGQYAIPHPDQLTKLHQLAMQQTPFPPLGQTNPAFPGLDASPPASTHELTIPNDLIGCIIGRQGTKINEIRQMSGAQIKIANATEGSSERQITITGTPANISLAQYLINARLTSEVTGMGTL

SEQ ID NO: 1384 - protein, 311 aa, Homo sapiens
MGTGNDTTVVEFTLLGLSEDTTVCAILFLVFLGIYVVTLMGNISIIVLIRRSHHLHTPMYIFLCHLAFVDIGYSSSVTPVMLMSFLRKETSLPVAGCVAQLCSVVTFGTAECFLLAAMAYDRYVAICSPLLYSTCMSPGVCIILVGMSYLGGCVNAWTFIGCLLRLSFCGPNKVNHFFCDYSPLLKLACSHDFTFEIIPAISSGSIIVATVCVIAISYIYILITILKMHSTKGRHKAFSTCTSHLTAVTLFYGTITFIYVMPKSSYSTDQNKVVSVFYTVVIPMLNPLIYSLRNKEIKGALKRELRIKIFS

SEQ ID NO: 1385 - protein, 323 aa, Homo sapiens
MSTLPTQIAPNSSTSMAPTFLLVGMPGLSGAPSWWTLPLIAVYLLSALGNGTILWIIALQPALHRPMHFFLFLLSVSDIGLVTALMPTLLGIALAGAHTVPASACLLQMVFIHVFSVMESSVLLAMSIDRALAICRPLHYPALLTNGVISKISLAISFRCLGLHLPLPFLLAYMPYCLPQVLTHSYCLHPDVARLACPEAWGAAYSLFVVLSAMGLDPLLIFFSYGLIGKVLQGVESREDRWKAGQTCAAHLSAVLLFYIPMILLALINHPELPITQHTHTLLSYVHFLLPPLINPILYSVKMKEIRKRILNRLQPRKVGGAQ

SEQ ID NO: 1386 - protein, 678 aa, Homo sapiens
MAAPGPLPAAALSPGAPTPRELMHGVAGVTSRAGRDREAGSVLPAGNRGARKASRRSSSRSMSRDNKFSKKDCLSIRNVVASIQTKEGLNLKLISGDVLYIWADVIVNSVPMNLQLGGGPLSRAFLQKAGPMLQKELDDRRRETEEKVGNIFMTSGCNLDCKAVLHAVAPYWNNGAETSWQIMANIIKKCLTTVEVLSFSSITFPMIGTGSLQFPKAVFAKLILSEVFEYSSSTRPITSPLQEVHFLVYTNDDEGCQAFLDEFTNWSRINPNKARIPMAGDTQGVVGTVSKPCFTAYEMKIGAITFQVATGDIATEQVDVIVNSTARTFNRKSGVSRAILEGAGQAVESECAVLAAQPHRDFIITPGGCLKCKIIIHVPGGKDVRKTVTSVLEECEQRKYTSVSLPAIGTGNAGKNPITVADNIIDAIVDFSSQHSTPSLKTVKVVIFQPELLNIFYDSMKKRDLSASLNFQSTFSMTTCNLPEHWTDMNHQLFCMVQLEPGQSEYNTIKDKFTRTCSSYAIEKIERIQNAFLWQSYQVKKRQMDIKNDHKNNERLLFHGTDADSVPYVNQHGFNRSCAGKNAVSYGKGTYFAVDASYSAKDTYSKPDSNGRKHMYVVRVLTGVFTKGRAGLVTPPPKNPHNPTDLFDSVTNNTRSPKLFVVFFDNQAYPEYLITFTA

SEQ ID NO: 1387 - protein, 444 aa, Homo sapiens
MLQRIGLIFLHNIVVVSNCFYFQAFLDEFTNWSRINPNKARIPMAGDTQGVVGTVSKPCFTAYEMKIGAITFQVATGDIATEQVDVIVNSTARTFNRKSGVSRAILEGAGQAVESECAVLAAQPHRDFIITPGGCLKCKIIIHVPGGKDVRKTVTSVLEECEQRKYTSVSLPAIGTGNAGKNPITVADNIIDAIVDFSSQHSTPSLKTVKVVIFQPELLNIFYDSMKKRDLSASLNFQSTFSMTTCNLPEHWTDMNHQLFCMVQLEPGQSEYNTIKDKFTRTCSSYAIEKIERIQNAFLWQSYQVKKRQMDIKNDHKNNERLLFHGTDADSVPYVNQHGFNRSCAGKNAVSYGKGTYFAVDASYSAKDTYSKPDSNGRKHMYVVRVLTGVFTKGRAGLVTPPPKNPHNPTDLFDSVTNNTRSPKLFVVFFDNQAYPEYLITFTA

SEQ ID NO: 1388 - protein, 305 aa, Homo sapiens
MVTEFIFLGLSDSQELQTFLFMLFFVFYGGIVFGNLLIVITVVSDSHLHSPMYFLLANLSLIDLSLSSVTAPKMITDFFSQRKVISFKGCLVQIFLLHFFGGSEMVILIAMGFDRYIAICKPLHYTTIMCGNACVGIMAVTWGIGFLHSVSQLAFAVHLLFCGPNEVDSFYCDLPRVIKLACTDTYRLDIMVIANSGVLTVCSFVLLIISYTIILMTIQHRPLDKSSKALSTLTAHITVVLLFFGPCVFIYAWPFPIKSLDKFLAVFYSVITPLLNPIIYTLRNKDMKTAIRQLRKWDAHSSVKF

SEQ ID NO: 1389 - protein, 595 aa, Homo sapiens
MPACCSCSDVFQYETNKVTRIQSMNYGTIKWFFHVIIFSYVCFALVSDKLYQRKEPVISSVHTKVKGIAEVKEEIVENGVKKLVHSVFDTADYTFPLQGNSFFVMTNFLKTEGQEQRLCPEYPTRRTLCSSDRGCKKGWMDPQSKGIQTGRCVVYEGNQKTCEVSAWCPIEAVEEAPRPALLNSAENFTVLIKNNIDFPGHNYTTRNILPGLNITCTFHKTQNPQCPIFRLGDIFRETGDNFSDVAIQGGIMGIEIYWDCNLDRWFHHCRPKYSFRRLDDKTTNVSLYPGYNFRYAKYYKENNVEKRTLIKVFGIRFDILVFGTGGKFDIIQLVVYIGSTLSYFGLAAVFIDFLIDTYSSNCCRSHIYPWCKCCQPCVVNEYYYRKKCESIVEPKPTLKYVSFVDESHIRMVNQQLLGRSLQDVKGQEVPRPAMDFTDLSRLPLALHDTPPIPGQPEEIQLLRKEATPRSRDSPVWCQCGSCLPSQLPESHRCLEELCCRKKPGACITTSELFRKLVLSRHVLQFLLLYQEPLLALDVDSTNSRLRHCAYRCYATWRFGSQDMADFAILPSCCRWRIRKEFPKSEGQYSGFKSPY

SEQ ID NO: 1390 - protein, 364 aa, Homo sapiens
MPACCSCSDVFQYETNKVTRIQSMNYGTIKWFFHVIIFSYVCFALVSDKLYQRKEPVISSVHTKVKGIAEVKEEIVENGVKKLVHSVFDTADYTFPLQGNSFFVMTNFLKTEGQEQRLCPEYPTRRTLCSSDRGCKKGWMDPQSKGIQTGRCVVYEGNQKTCEVSAWCPIEAVEEAPRPALLNSAENFTVLIKNNIDFPGHNYTTRNILPGLNITCTFHKTQNPQCPIFRLGDIFRETGDNFSDVAIQGGIMGIEIYWDCNLDRWFHHCRPKYSFRRLDDKTTNVSLYPGYNFRYAKYYKENNVEKRTLIKVFGIRFDILVFGTGGKFDIIQLVVYIGSTLSYFGLVRDSLFHALGKWFGEGSD

SEQ ID NO: 1391 - protein, 128 aa, Homo sapiens
MPACCSCSDVFQYETNKVTRIQSMNYGTIKWFFHVIIFSYVCFALVSDKLYQRKEPVISSVHTKVKGIAEVKEEIVENGVKKLVHSVFDTADYTFPLQGNSFFVMTNFLKTEGQEQRLCPEEFRPEGV

SEQ ID NO: 1392 - protein, 425 aa, Homo sapiens
MDGPAEQRPALLNSAENFTVLIKNNIDFPGHNYTTRNILPGLNITCTFHKTQNPQCPIFRLGDIFRETGDNFSDVAIQGGIMGIEIYWDCNLDRWFHHCRPKYSFRRLDDKTTNVSLYPGYNFRYAKYYKENNVEKRTLIKVFGIRFDILVFGTGGKFDIIQLVVYIGSTLSYFGLAAVFIDFLIDTYSSNCCRSHIYPWCKCCQPCVVNEYYYRKKCESIVEPKPTLKYVSFVDESHIRMVNQQLLGRSLQDVKGQEVPRPAMDFTDLSRLPLALHDTPPIPGQPEEIQLLRKEATPRSRDSPVWCQCGSCLPSQLPESHRCLEELCCRKKPGACITTSELFRKLVLSRHVLQFLLLYQEPLLALDVDSTNSRLRHCAYRCYATWRFGSQDMADFAILPSCCRWRIRKEFPKSEGQYSGFKSPY

SEQ ID NO: 1393 - protein, 275 aa, Homo sapiens
MPACCSCSDVFQYETNKVTRIQSMNYGTIKWFFHVIIFSYVCFALVSDKLYQRKEPVISSVHTKVKGIAEVKEEIVENGVKKLVHSVFDTADYTFPLQGNSFFVMTNFLKTEGQEQRLCPEYPTRRTLCSSDRGCKKGWMDPQSKGIQTGRCVVYEGNQKTCEVSAWCPIEAVEEAPRPALLNSAENFTVLIKNNIDFPGHNYTTYAKYYKENNVEKRTLIKVFGIRFDILVFGTGGKFDIIQLVVYIGSTLSYFGLVRDSLFHALGKWFGEGSD

SEQ ID NO: 1394 - protein, 306 aa, Homo sapiens
MWQFRYAKYYKENNVEKRTLIKVFGIRFDILVFGTGGKFDIIQLVVYIGSTLSYFGLAAVFIDFLIDTYSSNCCRSHIYPWCKCCQPCVVNEYYYRKKCESIVEPKPTLKYVSFVDESHIRMVNQQLLGRSLQDVKGQEVPRPAMDFTDLSRLPLALHDTPPIPGQPEEIQLLRKEATPRSRDSPVWCQCGSCLPSQLPESHRCLEELCCRKKPGACITTSELFRKLVLSRHVLQFLLLYQEPLLALDVDSTNSRLRHCAYRCYATWRFGSQDMADFAILPSCCRWRIRKEFPKSEGQYSGFKSPY

SEQ ID NO: 1395 - protein, 274 aa, Homo sapiens
MTPGDHSWGNSFFVMTNFLKTEGQEQRLCPEYPTRRTLCSSDRGCKKGWMDPQSKGIQTGRCVVYEGNQKTCEVSAWCPIEAVEEAPRPALLNSAENFTVLIKNNIDFPGHNYTTRNILPGLNITCTFHKTQNPQCPIFRLGDIFRETGDNFSDVAIQGGIMGIEIYWDCNLDRWFHHCRPKYSFRRLDDKTTNVSLYPGYNFRYAKYYKENNVEKRTLIKVFGIRFDILVFGTGGKFDIIQLVVYIGSTLSYFGLVRDSLFHALGKWFGEGSD

SEQ ID NO: 1396 - protein, 505 aa, Homo sapiens
MTPGDHSWGNSFFVMTNFLKTEGQEQRLCPEYPTRRTLCSSDRGCKKGWMDPQSKGIQTGRCVVYEGNQKTCEVSAWCPIEAVEEAPRPALLNSAENFTVLIKNNIDFPGHNYTTRNILPGLNITCTFHKTQNPQCPIFRLGDIFRETGDNFSDVAIQGGIMGIEIYWDCNLDRWFHHCRPKYSFRRLDDKTTNVSLYPGYNFRYAKYYKENNVEKRTLIKVFGIRFDILVFGTGGKFDIIQLVVYIGSTLSYFGLAAVFIDFLIDTYSSNCCRSHIYPWCKCCQPCVVNEYYYRKKCESIVEPKPTLKYVSFVDESHIRMVNQQLLGRSLQDVKGQEVPRPAMDFTDLSRLPLALHDTPPIPGQPEEIQLLRKEATPRSRDSPVWCQCGSCLPSQLPESHRCLEELCCRKKPGACITTSELFRKLVLSRHVLQFLLLYQEPLLALDVDSTNSRLRHCAYRCYATWRFGSQDMADFAILPSCCRWRIRKEFPKSEGQYSGFKSPY

SEQ ID NO: 1397 - protein, 849 aa, Homo sapiens
MLWALWPRWLADKMLPLLGAVLLQKREKRGPLWRHWRRETYPYYDLQVKVLRATNIRGTDLLSKADCYVQLWLPTASPSPAQTRIVANCSDPEWNETFHYQIHGAVKNVLELTLYDKDILGSDQLSLLLFDLRSLKCGQPHKHTFPLNHQDSQELQVEFVLEKSQVPASEVITNGVLVAHPCLRIQGTLRGDGTAPREEYGSRQLQLAVPGAYEKPQLLPLQPPTEPGLPPTFTFHVNPVLSSRLHVELMELLAAVQSGPSAELEAQTSKLGEGGILLSSLPLGQEEQCSVALGEGQEVALSMKVEMSSGDLDLRLGFDLSDGEQEFLDRRKQVVSKALQQVLGLSEALDSGQVPVVAVLGSGGGTRAMSSLYGSLAGLQELGLLDTVTYLSGVSGSTWCISTLYRDPAWSQVALQGPIERAQVHVCSSKMGALSTERLQYYTQELGVRERSGHSVSLIDLWGLLVEYLLYQEENPAKLSDQQEAVRQGQNPYPIYTSVNVRTNLSGEDFAEWCEFTPYEVGFPKYGAYVPTELFGSELFMGRLLQLQPEPRICYLQGMWGSAFATSLDEIFLKTAGSGLSFLEWYRGSVNITDDCQKPQLHNPSRLRTRLLTPQGPFSQAVLDIFTSRFTSAQSFNFTRGLCLHKDYVAGREFVAWKDTHPDAFPNQLTPMRDCLYLVDGGFAINSPFPLALLPQRAVDLILSFDYSLEAPFEVLKMTEKYCLDRGIPFPSIEVGPEDMEEARECYLFAKAEDPRSPIVLHFPLVNRTFRTHLAPGVERQTAEEKAFGDFVINRPDTPYGMMNFTYEPQDFYRLVALSRYNVLNNVETLKCALQLALDRHQARERAGA

SEQ ID NO: 1398 - protein, 454 aa, Homo sapiens
MLWALWPRWLADKMLPLLGAVLLQKREKRGPLWRHWRRETYPYYDLQVKVLRATNIRGTDLLSKADCYVQLWLPTASPSPAQTRIVANCSDPEWNETFHYQIHGAVKNVLELTLYDKDILGSDQLSLLLFDLRSLKCGQPHKHTFPLNHQDSQELQVEFVLEKSQVPASEVITNGVLVAHPCLRIQGTLRGDGTAPREEYGSRQLQLAVPGAYEKPQLLPLQPPTEPGLPPTFTFHVNPVLSSRLHVELMELLAAVQSGPSAELEAQTSKLGEGGILLSSLPLGQEEQCSVALGEGQEVALSMKVEMSSGDLDLRLGFDLSDGEQEFLDRRKQVVSKALQQVLGLSEALDSGQVPVVAVLGSGGGTRAMSSLYGSLAGLQELGLLDTVTYLSGVSGSTWCISTLYRDPAWSQVALQGPIERAQVHVCSSKMGDVRVSPCQLPRLHSSNLDHSLW

SEQ ID NO: 1399 - protein, 851 aa, Homo sapiens
MLWALWPRWLADKMLPLLGAVLLQKREKRGPLWRHWRRETYPYYDLQVKVLRATNIRGTDLLSKADCYVQLWLPTASPSPAQTRIVANCSDPEWNETFHYQIHGAVKNVLELTLYDKDILGSDQLSLLLFDLRSLKCGQPHKHTFPLNHQDSQELQVEFVLEKSQVPASEVITNGVLVAHPCLRIQGTLRGDGTAPREEYGSRQLQLAVPGAYEKPQLLPLQPPTEPGLPPTFTFHVNPVLSSRLHVELMELLAAVQSGPSAELEAQTSKLGEGGILLSSLPLGQEEQCSVALGEGQEVALSMKVEMSSGDLDLRLGFDLSDGEQEFLDRRKQVVSKALQQVLGLSEALDSGQVQVPVVAVLGSGGGTRAMSSLYGSLAGLQELGLLDTVTYLSGVSGSTWCISTLYRDPAWSQVALQGPIERAQVHVCSSKMGALSTERLQYYTQELGVRERSGHSVSLIDLWGLLVEYLLYQEENPAKLSDQQEAVRQGQNPYPIYTSVNVRTNLSGEDFAEWCEFTPYEVGFPKYGAYVPTELFGSELFMGRLLQLQPEPRICYLQGMWGSAFATSLDEIFLKTAGSGLSFLEWYRGSVNITDDCQKPQLHNPSRLRTRLLTPQGPFSQAVLDIFTSRFTSAQSFNFTRGLCLHKDYVAGREFVAWKDTHPDAFPNQLTPMRDCLYLVDGGFAINSPFPLALLPQRAVDLILSFDYSLEAPFEVLKMTEKYCLDRGIPFPSIEVGPEDMEEARECYLFAKAEDPRSPIVLHFPLVNRTFRTHLAPGVERQTAEEKAFGDFVINRPDTPYGMMNFTYEPQDFYRLVALSRYNVLNNVETLKCALQLALDRHQARERAGA

SEQ ID NO: 1400 - protein, 320 aa, Homo sapiens
MAGLAARLVLLAGAAALASGSQGDREPVYRDCVLQCEEQNCSGGALNHFRSRQPIYMSLAGWTCRDDCKYECMWVTVGLYLQEGHKVPQFHGKWPFSRFLFFQEPASAVASFLNGLASLVMLCRYRTFVPASSPMYHTCVAFAWVSLNAWFWSTVFHTRDTDLTEKMDYFCASTVILHSIYLCCVRTVGLQHPAVVSAFRALLLLMLTVHVSYLSLIRFDYGYNLVANVAIGLVNVVWWLAWCLWNQRRLPHVRKCVVVVLLLQGLSLLELLDFPPLFWVLDAHAIWHISTIPVHVLFFSFLEDDSLYLLKESEDKFKLD

SEQ ID NO: 1401 - protein, 269 aa, Homo sapiens
MAGLAARLVLLAGAAALASGSQGDREPVYRDCVLQCEEQNCSGGALNHFRSRQPIYMSLAGWTCRDDCKYECMWVTVGLYLQEGHKVPQFHGKVSLNAWFWSTVFHTRDTDLTEKMDYFCASTVILHSIYLCCVRTVGLQHPAVVSAFRALLLLMLTVHVSYLSLIRFDYGYNLVANVAIGLVNVVWWLAWCLWNQRRLPHVRKCVVVVLLLQGLSLLELLDFPPLFWVLDAHAIWHISTIPVHVLFFSFLEDDSLYLLKESEDKFKLD

SEQ ID NO: 1402 - protein, 299 aa, Homo sapiens
MAGLAARLVLLAGAAALASGSQGDREPVYRDCVLQCEEQNCSGGALNHFRSRQPIYMSLAGWTCRDDCKYECMWVTVGLYLQEGHKVPQFHGKWPFSRFLFFQEPASAVASFLNGLASLVMLCRYRTFVPASSPMYHTCVAFAWKMDYFCASTVILHSIYLCCVRTVGLQHPAVVSAFRALLLLMLTVHVSYLSLIRFDYGYNLVANVAIGLVNVVWWLAWCLWNQRRLPHVRKCVVVVLLLQGLSLLELLDFPPLFWVLDAHAIWHISTIPVHVLFFSFLEDDSLYLLKESEDKFKLD

SEQ ID NO: 1403 - protein, 254 aa, Homo sapiens
MAAYKLVLIRHGESTWNLENRFSCWYDADLSPAGHEEAKRGGQALRDAGYEFDICLTSVQKRVIRTLWTVLDAIDQMWLPVVRTWRLNERHYGGLTGLNKAETAAKHGEAQVKIWRRSYDVPPPPMEPDHPFYSNISKDRRYADLTEDQLPSYESPKDTIARALPFWNEEIVPQIKEGKRVLIAAHGNSLQGIAKHVEGLSEEAIMELNLPTGIPIVYELDKNLKPIKPMQFLGDEETVCKAIEAVAAQGKAKK

SEQ ID NO: 1404 - protein, 981 aa, Homo sapiens
MAADSEPESEVFEITDFTTASEWERFISKVEEVLNDWKLIGNSLGKPLEKGIFTSGTWEEKSDEISFADFKFSVTHHYLVQESTDKEGKDELLEDVVPQSMQDLLGMNNDFPPRAHCLVRWYGLREFVVIAPAAHSDAVLSESKCNLLLSSVSIALGNTGCQVPLFVQIHHKWRRMYVGECQGPGVRTDFEMVHLRKVPNQYTHLSGLLDIFKSKIGCPLTPLPPVSIAIRFTYVLQDWQQYFWPQQPPDIDALVGGEVGGLEFGKLPFGACEDPISELHLATTWPHLTEGIIVDNDVYSDLDPIQAPHWSVRVRKAENPQCLLGDFVTEFFKICRRKESTDEILGRSAFEEEGKETADITHALSKLTEPASVPIHKLSVSNMVHTAKKKIRKHRGVEESPLNNDVLNTILLFLFPDAVSEKPLDGTTSTDNNNPPSESEDYNLYNQFKSAPSDSLTYKLALCLCMINFYHGGLKGVAHLWQEFVLEMRFRWENNFLIPGLASGPPDLRCCLLHQKLQMLNCCIERKKARDEGKKTSASDVTNIYPGDAGKAGDQLVPDNLKETDKEKGEVGKSWDSWSDSEEEFFECLSDTEELKGNGQESGKKGGPKEMANLRPEGRLYQHGKLTLLHNGEPLYIPVTQEPAPMTEDLLEEQSEVLAKLGTSAEGAHLRARMQSACLLSDMESFKAANPGCSLEDFVRWYSPRDYIEEEVIDEKGNVVLKGELSARMKIPSNMWVEAWETAKPIPARRQRRLFDDTREAEKVLHYLAIQKPADLARHLLPCVIHAAVLKVKEEESLENISSVKKIIKQIISHSSKVLHFPNPEDKKLEEIIHQITNVEALIARARSLKAKFGTEKCEQEEEKEDLERFVSCLLEQPEVLVTGAGRGHAGRIIHKLFVNAQRAAAMTPPEEELKRMGSPEERRQNSVSDFPPPAGREFILRTTVPRPAPYSKALPQRMYSVLTKEDFRLAGAFSSDTSFF

SEQ ID NO: 1405 - protein, 988 aa, Homo sapiens
MAADSEPESEVFEITDFTTASEWERFISKVEEVLNDWKLIGNSLGKPLEKGIFTSGTWEEKSDEISFADFKFSVTHHYLVQESTDKEGKDELLEDVVPQSMQDLLGMNNDFPPRAHCLVRWYGLREFVVIAPAAHSDAVLSESKCNLLLSSVSIALGNTGCQVPLFVQIHHKWRRMYVGECQGPGVRTDFEMVHLRKVPNQYTHLSGLLDIFKSKIGCPLTPLPPVSIAIRFTYVLQDWQQYFWPQQPPDIDALVGGEVGGLEFGKLPFGACEDPISELHLATTWPHLTEGIIVDNDVYSDLDPIQAPHWSVRVRKAENPQCLLGDFVTEFFKICRRKESTDEILGRSAFEEEGKETADITHALSKLTEPASVPIHKLSVSNMVHTAKKKIRKHRGVEESPLNNDVLNTILLFLFPDAVSEKPLDGTTSTDNNNPPSESEDYNLYNQFKSAPSDSLTYKLALCLCMINFYHGGLKGVAHLWQEFVLEMRFRWENNFLIPGLASGPPDLRCCLLHQKLQMLNCCIERKKARDEGKKTSASDVTNIYPGDAGKAGDQLVPDNLKETDKEKGEVGKSWDSWSDSEEEFFECLSDTEELKGNGQESGKKGGPKEMANLRPEGRLYQHGKLTLLHNGEPLYIPVTQEPAPMTEDLLEEQSEVLAKLGTSAEGAHLRARMQSACLLSDMESFKAANPGCSLEDFVRWYSPRDYIEEEVIDEKGNVVLKGELSARMKIPSNMWVEAWETAKPIPARRQRRLFDDTREAEKVLHYLAIQKPADLARHLLPCVIHAAVLKVKEEESLENISSVKKIIKQIISHSSKVLHFPNPEDKKLEEIIHQITNVEALIARARSLKAKFGTEKCEQEEEKEDLERFVSCLLEQPEVLVTGAGRGHAGRIIHKLFVNAQRLTESSDEAAAMTPPEEELKRMGSPEERRQNSVSDFPPPAGREFILRTTVPRPAPYSKALPQRMYSVLTKEDFRLAGAFSSDTSFF

SEQ ID NO: 1406 - protein, 935 aa, Homo sapiens
MFSLISGIFTSGTWEEKSDEISFADFKFSVTHHYLVQESTDKEGKDELLEDVVPQSMQDLLGMNNDFPPRAHCLVRWYGLREFVVIAPAAHSDAVLSESKCNLLLSSVSIALGNTGCQVPLFVQIHHKWRRMYVGECQGPGVRTDFEMVHLRKVPNQYTHLSGLLDIFKSKIGCPLTPLPPVSIAIRFTYVLQDWQQYFWPQQPPDIDALVGGEVGGLEFGKLPFGACEDPISELHLATTWPHLTEGIIVDNDVYSDLDPIQAPHWSVRVRKAENPQCLLGDFVTEFFKICRRKESTDEILGRSAFEEEGKETADITHALSKLTEPASVPIHKLSVSNMVHTAKKKIRKHRGVEESPLNNDVLNTILLFLFPDAVSEKPLDGTTSTDNNNPPSESEDYNLYNQFKSAPSDSLTYKLALCLCMINFYHGGLKGVAHLWQEFVLEMRFRWENNFLIPGLASGPPDLRCCLLHQKLQMLNCCIERKKARDEGKKTSASDVTNIYPGDAGKAGDQLVPDNLKETDKEKGEVGKSWDSWSDSEEEFFECLSDTEELKGNGQESGKKGGPKEMANLRPEGRLYQHGKLTLLHNGEPLYIPVTQEPAPMTEDLLEEQSEVLAKLGTSAEGAHLRARMQSACLLSDMESFKAANPGCSLEDFVRWYSPRDYIEEEVIDEKGNVVLKGELSARMKIPSNMWVEAWETAKPIPARRQRRLFDDTREAEKVLHYLAIQKPADLARHLLPCVIHAAVLKVKEEESLENISSVKKIIKQIISHSSKVLHFPNPEDKKLEEIIHQITNVEALIARARSLKAKFGTEKCEQEEEKEDLERFVSCLLEQPEVLVTGAGRGHAGRIIHKLFVNAQRAAAMTPPEEELKRMGSPEERRQNSVSDFPPPAGREFILRTTVPRPAPYSKALPQRMYSVLTKEDFRLAVKIIDGDV

SEQ ID NO: 1407 - protein, 854 aa, Homo sapiens
MSLSEEQARSFLDQNPDFARQYFGKKLSPENVAAACEDGCPPDCDSLRDLCQVEESTALLELVQDMQESINMERVVFKVLRRLCTLLQADRCSLFMYRQRNGVAELATRLFSVQPDSVLEDCLVPPDSEIVFPLDIGVVGHVAQTKKMVNVEDVAECPHFSSFADELTDYKTKNMLATPIMNGKDVVAVIMAVNKLNGPFFTSEDEDVFLKYLNFATLYLKIYHLSYLHNCETRRGQVLLWSANKVFEELTDIERQFHKAFYTVRAYLNCERYSVGLLDMTKEKEFFDVWSVLMGESQPYSGPRTPDGREIVFYKVIDYVLHGKEEIKVIPTPSADHWALASGLPSYVAESGFICNIMNASADEMFKFQEGALDDSGWLIKNVLSMPIVNKKEEIVGVATFYNRKDGKPFDEQDEVLMESLTQFLGWSVMNTDTYDKMNKLENRKDIAQDMVLYHVKCDRDEIQLILPTRARLGKEPADCDEDELGEILKEELPGPTTFDIYEFHFSDLECTELDLVKCGIQMYYELGVVRKFQIPQEVLVRFLFSISKGYRRITYHNWRHGFNVAQTMFTLLMTGKLKSYYTDLEAFAMVTAGLCHDIDHRGTNNLYQMKSQNPLAKLHGSSILERHHLEFGKFLLSEETLNIYQNLNRRQHEHVIHLMDIAIIATDLALYFKKRAMFQKIVDESKNYQDKKSWVEYLSLETTRKEIVMAMMMTACDLSAITKPWEVQSKVALLVAAEFWEQGDLERTVLDQQPIPMMDRNKAAELPKLQVGFIDFVCTFVYKEFSRFHEEILPMFDRLQNNRKEWKALADEYEAKVKALEEKEEEERVAAKKVGTEICNGGPAPKSSTCCIL

SEQ ID NO: 1408 - protein, 853 aa, Homo sapiens
MSLSEEQARSFLDQNPDFARQYFGKKLSPENVAAACEDGCPPDCDSLRDLCQVEESTALLELVQDMQESINMERVVFKVLRRLCTLLQADRCSLFMYRQRNGVAELATRLFSVQPDSVLEDCLVPPDSEIVFPLDIGVVGHVAQTKKMVNVEDVAECPHFSSFADELTDYKTKNMLATPIMNGKDVVAVIMAVNKLNGPFFTSEDEDVFLKYLNFATLYLKIYHLSYLHNCETRRGQVLLWSANKVFEELTDIERQFHKAFYTVRAYLNCERYSVGLLDMTKEKEFFDVWSVLMGESQPYSGPRTPDGREIVFYKVIDYVLHGKEEIKVIPTPSADHWALASGLPSYVAESGFICNIMNASADEMFKFQEGALDDSGWLIKNVLSMPIVNKKEEIVGVATFYNRKDGKPFDEQDEVLMESLTQFLGWSVMNTDTYDKMNKLENRKDIAQDMVLYHVKCDRDEIQLILPTRARLGKEPADCDEDELGEILKEELPGPTTFDIYEFHFSDLECTELDLVKCGIQMYYELGVVRKFQIPQEVLVRFLFSISKGYRRITYHNWRHGFNVAQTMFTLLMTGKLKSYYTDLEAFAMVTAGLCHDIDHRGTNNLYQMKSQNPLAKLHGSSILERHHLEFGKFLLSEETLNIYQNLNRRQHEHVIHLMDIAIIATDLALYFKKRAMFQKIVDESKNYQDKKSWVEYLSLETTRKEIVMAMMMTACDLSAITKPWEVQSKVALLVAAEFWEQGDLERTVLDQQPIPMMDRNKAAELPKLQVGFIDFVCTFVYKEFSRFHEEILPMFDRLQNNRKEWKALADEYEAKVKALEEKEEEERVAAKKGTEICNGGPAPKSSTCCIL

SEQ ID NO: 1409 - protein, 575 aa, Homo sapiens
MTKEKEFFDVWSVLMGESQPYSGPRTPDGREIVFYKVIDYVLHGKEEIKVIPTPSADHWALASGLPSYVAESGFICNIMNASADEMFKFQEGALDDSGWLIKNVLSMPIVNKKEEIVGVATFYNRKDGKPFDEQDEVLMESLTQFLGWSVMNTDTYDKMNKLENRKDIAQDMVLYHVKCDRDEIQLILPTRARLGKEPADCDEDELGEILKEELPGPTTFDIYEFHFSDLECTELDLVKCGIQMYYELGVVRKFQIPQEVLVRFLFSISKGYRRITYHNWRHGFNVAQTMFTLLMTGKLKSYYTDLEAFAMVTAGLCHDIDHRGTNNLYQMKSQNPLAKLHGSSILERHHLEFGKFLLSEETLNIYQNLNRRQHEHVIHLMDIAIIATDLALYFKKRAMFQKIVDESKNYQDKKSWVEYLSLETTRKEIVMAMMMTACDLSAITKPWEVQSKVALLVAAEFWEQGDLERTVLDQQPIPMMDRNKAAELPKLQVGFIDFVCTFVYKEFSRFHEEILPMFDRLQNNRKEWKALADEYEAKVKALEEKEEEERVAAKKVGTEICNGGPAPKSSTCCIL

SEQ ID NO: 1410 - protein, 364 aa, Homo sapiens
MPQTVILPGPAPWGFRLSGGIDFNQPLVITRITPGSKAAAANLCPGDVILAIDGFGTESMTHADAQDRIKAAAHQLCLKIDRGETHLWSPQVSEDGKAHPFKINLESEPQDGNYFEHKHNIRPKPFVIPGRSSGCSTPSGIDCGSGRSTPSSVSTVSTICPGDLKVAAKLAPNIPLEMELPGVKIVHAQFNTPMQLYSDDNIMETLQGQVSTALGETPLMSEPTASVPPESDVYRMLHDNRNEPTQPRQSGSFRVLQGMVDDGSDDRPAGTRSVRAPVTKVHGGSGGAQRMPLCDKCGSGIVGAVVKARDKYRHPECFVCADCNLNLKQKGYFFIEGELYCETHARARTKPPEGYDTVTLYPKA

SEQ ID NO: 1411 - protein, 316 aa, Homo sapiens
MPQTVILPGPAPWGFRLSGGIDFNQPLVITRITPGSKAAAANLCPGDVILAIDGFGTESMTHADAQDRIKAAAHQLCLKIDRGETHLWSPQVSEDGKAHPFKINLESEPQEFKPIGTAHNRRAQPFVAAANIDDKRQVVSASYNSPIGLYSTSNIQDALHGQLRGLIPSSPQNEPTASVPPESDVYRMLHDNRNEPTQPRQSGSFRVLQGMVDDGSDDRPAGTRSVRAPVTKVHGGSGGAQRMPLCDKCGSGIVGAVVKARDKYRHPECFVCADCNLNLKQKGYFFIEGELYCETHARARTKPPEGYDTVTLYPKA

SEQ ID NO: 1412 - protein, 189 aa, Homo sapiens
MPQTVILPGPAPWGFRLSGGIDFNQPLVITRITPGSKAAAANLCPGDVILAIDGFGTESMTHADAQDRIKAAAHQLCLKIDRGETHLWSPQVSEDGKAHPFKINLESEPQEFKPIGTAHNRRAQPFVAAANIDDKRQVVSASYNSPIGLYSTSNIQDALHGQLRGLIPSSPQKTGTTLNTSIIFGPNLS

SEQ ID NO: 1413 - protein, 359 aa, Homo sapiens
MSMNNSKQLVSPAAALLSNTTCQTENRLSVFFSVIFMTVGILSNSLAIAILMKAYQRFRQKSKASFLLLASGLVITDFFGHLINGAIAVFVYASDKEWIRFDQSNVLCSIFGICMVFSGLCPLLLGSVMAIERCIGVTKPIFHSTKITSKHVKMMLSGVCLFAVFIALLPILGHRDYKIQASRTWCFYNTEDIKDWEDRFYLLLFSFLGLLALGVSLLCNAITGITLLRVKFKSQQHRQGRSHHLEMVIQLLAIMCVSCICWSPFLVTMANIGINGNHSLETCETTLFALRMATWNQILDPWVYILLRKAVLKNLYKLASQCCGVHVISLHIWELSSIKNSLKVAAISESPVAEKSAST

SEQ ID NO: 1414 - protein, 297 aa, Homo sapiens
MSMNNSKQLVSPAAALLSNTTCQTENRLSVFFSVIFMTVGILSNSLAIAILMKAYQRFRQKSKASFLLLASGLVITDFFGHLINGAIAVFVYASDKEWIRFDQSNVLCSIFGICMVFSGLCPLLLGSVMAIERCIGVTKPIFHSTKITSKHVKMMLSGVCLFAVFIALLPILGHRDYKIQASRTWCFYNTEDIKDWEDRFYLLLFSFLGLLALGVSLLCNAITGITLLRVKFKSQQHRQGRSHHLEMVIQLLAIMCVSCICWSPFLGYRIILNGKEKYKVYEEQSDFLHRLQWPTLE

SEQ ID NO: 1415 - protein, 275 aa, Homo sapiens
MSMNNSKQLVSPAAALLSNTTCQTENRLSVFFSVIFMTVGILSNSLAIAILMKAYQRFRQKSKASFLLLASGLVITDFFGHLINGAIAVFVYASDKEWIRFDQSNVLCSIFGICMVFSGLCPLLLGSVMAIERCIGVTKPIFHSTKITSKHVKMMLSGVCLFAVFIALLPILGHRDYKIQASRTWCFYNTEDIKDWEDRFYLLLFSFLGLLALGVSLLCNAITGITLLRVKFKSQQHRQGRSHHLEMVIQLLAIMCVSCICWSPFLKIEGKIKVT

SEQ ID NO: 1416 - protein, 291 aa, Homo sapiens
MSMNNSKQLVSPAAALLSNTTCQTENRLSVFFSVIFMTVGILSNSLAIAILMKAYQRFRQKSKASFLLLASGLVITDFFGHLINGAIAVFVYASDKEWIRFDQSNVLCSIFGICMVFSGLCPLLLGSVMAIERCIGVTKPIFHSTKITSKHVKMMLSGVCLFAVFIALLPILGHRDYKIQASRTWCFYNTEDIKDWEDRFYLLLFSFLGLLALGVSLLCNAITGITLLRVKFKSQQHRQGRSHHLEMVIQLLAIMCVSCICWSPFLGYRIILNGKEKYKVYEEQSDFLHRK

SEQ ID NO: 1417 - protein, 296 aa, Homo sapiens
MSMNNSKQLVSPAAALLSNTTCQTENRLSVFFSVIFMTVGILSNSLAIAILMKAYQRFRQKSKASFLLLASGLVITDFFGHLINGAIAVFVYASDKEWIRFDQSNVLCSIFGICMVFSGLCPLLLGSVMAIERCIGVTKPIFHSTKITSKHVKMMLSGVCLFAVFIALLPILGHRDYKIQASRTWCFYNTEDIKDWEDRFYLLLFSFLGLLALGVSLLCNAITGITLLRVKFKSQQHRQGRSHHLEMVIQLLAIMCVSCICWSPFLVKETHLQMRLWTWDFRVNALEDYCEGLTVF

SEQ ID NO: 1418 - protein, 267 aa, Homo sapiens
MSMNNSKQLVSPAAALLSNTTCQTENRLSVFFSVIFMTVGILSNSLAIAILMKAYQRFRQKSKASFLLLASGLVITDFFGHLINGAIAVFVYASDKEWIRFDQSNVLCSIFGICMVFSGLCPLLLGSVMAIERCIGVTKPIFHSTKITSKHVKMMLSGVCLFAVFIALLPILGHRDYKIQASRTWCFYNTEDIKDWEDRFYLLLFSFLGLLALGVSLLCNAITGITLLRVKFKSQQHRQGRSHHLEMVIQLLAIMCVSCICWSPFLR

SEQ ID NO: 1419 - protein, 274 aa, Homo sapiens
MSMNNSKQLVSPAAALLSNTTCQTENRLSVFFSVIFMTVGILSNSLAIAILMKAYQRFRQKSKASFLLLASGLVITDFFGHLINGAIAVFVYASDKEWIRFDQSNVLCSIFGICMVFSGLCPLLLGSVMAIERCIGVTKPIFHSTKITSKHVKMMLSGVCLFAVFIALLPILGHRDYKIQASRTWCFYNTEDIKDWEDRFYLLLFSFLGLLALGVSLLCNAITGITLLRVKFKSQQHRQGRSHHLEMVIQLLAIMCVSCICWSPFLTHWGKEIP

SEQ ID NO: 1420 - protein, 336 aa, Homo sapiens
MAVATAAAVLAALGGALWLAARRFVGPRVQRLRRGGDPGLMHGKTVLITGANSGLGRATAAELLRLGARVIMGCRDRARAEEAAGQLRRELRQAAECGPEPGVSGVGELIVRELDLASLRSVRAFCQEMLQEEPRLDVLINNAGIFQCPYMKTEDGFEMQFGVNHLGHFLLTNLLLGLLKSSAPSRIVVVSSKLYKYGDINFDDLNSEQSYNKSFCYSRSKLANILFTRELARRLEGTNVTVNVLHPGIVRTNLGRHIHIPLLVKPLFNLVSWAFFKTPVEGAQTSIYLASSPEVEGVSGRYFGDCKEEELLPKAMDESVARKLWDISEVMVGLLK

SEQ ID NO: 1421 - protein, 858 aa, Homo sapiens
MGEINQVAVEKYLEENPQFAKEYFDRKLRVEVLGEIFKNSQVPVQSSMSFSELTQVEESALCLELLWTVQEEGGTPEQGVHRALQRLAHLLQADRCSMFLCRSRNGIPEVASRLLDVTPTSKFEDNLVGPDKEVVFPLDIGIVGWAAHTKKTHNVPDVKKNSHFSDFMDKQTGYVTKNLLATPIVVGKEVLAVIMAVNKVNASEFSKQDEEVFSKYLNFVSIILRLHHTSYMYNIESRRSQILMWSANKVFEELTDVERQFHKALYTVRSYLNCERYSIGLLDMTKEKEFYDEWPIKLGEVEPYKGPKTPDGREVNFYKIIDYILHGKEEIKVIPTPPADHWTLISGLPTYVAENGFICNMMNAPADEYFTFQKGPVDETGWVIKNVLSLPIVNKKEDIVGVATFYNRKDGKPFDEHDEYITETLTQFLGWSLLNTDTYDKMNKLENRKDIAQEMLMNQTKATPEEIKSILKFQEKLNVDVIDDCEEKQLVAILKEDLPDPRSAELYEFRFSDFPLTEHGLIKCGIRLFFEINVVEKFKVPVEVLTRWMYTVRKGYRAVTYHNWRHGFNVGQTMFTLLMTGRLKKYYTDLEAFAMLAAAFCHDIDHRGTNNLYQMKSTSPLARLHGSSILERHHLEYSKTLLQDESLNIFQNLNKRQFETVIHLFEVAIIATDLALYFKKRTMFQKIVDACEQMQTEEEAIKYVTVDPTKKEIIMAMMMTACDLSAITKPWEVQSQVALMVANEFWEQGDLERTVLQQQPIPMMDRNKRDELPKLQVGFIDFVCTFVYKEFSRFHKEITPMLSGLQNNRVEWKSLADEYDAKMKVIEEEAKKQEGGAEKAAEDSGGGDDKKSKTCLML

SEQ ID NO: 1422 - protein, 219 aa, Homo sapiens
MASVTDGKTGVKDASDQNFDYMFKLLIIGNSSVGKTSFLFRYADDTFTPAFVSTVGIDFKVKTVYRHEKRVKLQIWDTAGQERYRTITTAYYRGAMGFILMYDITNEESFNAVQDWATQIKTYSWDNAQVILVGNKCDMEEERVVPTEKGQLLAEQLGFDFFEASAKENISVRQAFERLVDAICDKMSDSLDTDPSMLGSSKNTRLSDTPPLLQQNCSC

SEQ ID NO: 1423 - protein, 108 aa, Homo sapiens [sequence omitted]

SEQ ID NO: 1424 - protein, 317 aa, Homo sapiens
MWLYLAVFVGLYYLLHWYRERQVLSHLRDKYVFITGCDSGFGKLLARQLDARGLRVLAACLTEKGAEQLRGQTSDRLETVTLDVTKTESVAAAAQWVKECVRDKGLWGLVNNAGISLPTAPNELLTKQDFVTILDVNLLGVIDVTLSLLPLVRRARGRVVNVSSVMGRVSLFGGGYCISKYGVEAFSDSLRRELSYFGVKVAMIEPGYFKTAVTSKERFLKSFLEIWDRSSPEVKEAYGEKFVADYKKSAEQMEQKCTQDLSLVTNCMEHALIACHPRTRYSAGWDAKLLYLPMSYMPTFLVDAIMYWVSPSPAKAL

SEQ ID NO: 1425 - protein, 1116 aa, Homo sapiens
MYGSARSVGKVEPSSQSPGRSPRLPRSPRLGHRRTNSTGGSSGSSVGGGSGKTLSMENIQSLNAAYATSGPMYLSDHENVGSETPKSTMTLGRSGGRLPYGVRMTAMGSSPNIASSGVASDTIAFGEHHLPPVSMASTVPHSLRQARDNTIMDLQTQLKEVLRENDLLRKDVEVKESKLSSSMNSIKTFWSPELKKERALRKDEASKITIWKEQYRVVQEENQHMQMTIQALQDELRIQRDLNQLFQQDSSSRTGEPCVAELTEENFQRLHAEHERQAKELFLLRKTLEEMELRIETQKQTLNARDESIKKLLEMLQSKGLSAKATEEDHERTRRLAEAEMHVHHLESLLEQKEKENSMLREEMHRRFENAPDSAKTKALQTVIEMKDSKISSMERGLRDLEEEIQMLKSNGALSTEEREEEMKQMEVYRSHSKFMKNKVEQLKEELSSKEAQWEELKKKAAGLQAEIGQVKQELSRKDTELLALQTKLETLTNQFSDSKQHIEVLKESLTAKEQRAAILQTEVDALRLRLEEKETMLNKKTKQIQDMAEEKGTQAGEIHDLKDMLDVKERKVNVLQKKIENLQEQLRDKEKQMSSLKERVKSLQADTTNTDTALTTLEEALAEKERTIERLKEQRDRDEREKQEEIDNYKKDLKDLKEKVSLLQGDLSEKEASLLDLKEHASSLASSGLKKDSRLKTLEIALEQKKEECLKMESQLKKAHEAALEARASPEMSDRIQHLEREITRYKDESSKAQAEVDRLLEILKEVENEKNDKDKKIAELERQVKDQNKKVANLKHKEQVEKKKSAQMLEEARRREDNLNDSSQQLQDSLRKKDDRIEELEEALRESVQITAEREMVLAQEESARTNAEKQVEELLMAMEKVKQELESMKAKLSSTQQSLAEKETHLTNLRAERRKHLEEVLEMKQEALLAAISEKDANIALLELSSSKKKTQEEVAALKREKDRLVQQLKQQTQNRMKLMADNYEDDHFKSSHSNQTNHKPSPDQIIQPLLELDQNRSKLKLYIGHLTTLCHDRDPLILRGLTPPASYNLDDDQAAWENELQKMTRGQLQDELEKGERDNAELQEFANAILQQIADHCPDILEQVVNALEESS

SEQ ID NO: 1426 - protein, 992 aa, Homo sapiens
MYGSARSVGKVEPSSQSPGRSPRLPRSPRLGHRRTNSTGGSSGSSVGGGSGKTLSMENIQSLNAAYATSGPMYLSDHENVGSETPKSTMTLGRSGGRLPYGVRMTAMGSSPNIASSGVASDTIAFGEHHLPPVSMASTVPHSLRQARDNTIMDLQTQLKEVLRENDLLRKDVEVKESKLSSSMNSIKTFWSPELKKERALRKDEASKITIWKEQYRVVQEENQHMQMTIQALQDELRIQRDLNQLFQQDSSSRTGEPCVAELTEENFQRLHAEHERQAKELFLLRKTLEEMELRIETQKQTLNARDESIKKLLEMLQSKGLSAKATEEDHERTRRLAEAEMHVHHLESLLEQKEKENSMLREEMHRRFENAPDSAKTKALQTVIEMKDSKISSMERGLRDLEEEIQMLKSNGALSTEEREEEMKQMEVYRSHSKFMKNKIGQVKQELSRKDTELLALQTKLETLTNQFSDSKQHIEVLKESLTAKEQRAAILQTEVDALRLRLEEKETMLNKKTKQIQDMAEEKGTQAGEIHDLKDMLDVKERKVNVLQKKIENLQEQLRDKEKQMSSLKERVKSLQADTTNTDTALTTLEEALAEKERTIERLKEQRDRDEREKQEEIDNYKKDLKDLKEKVSLLQGDLSEKEASLLDLKEHASSLASSGLKKDSRLKTLEIALEQKKEECLKMESQLKKAHEAALEARASPEMSDRIQHLEREITRYKDESSKAQAEVDRLLEILKEVENEKNDKDKKIAELESLTSRQVKDQNKKVANLKHKEQVEKKKSAQMLEEARRREDNLNDSSQQLQDSLRKKDDRIEELEEALRESVQITAEREMVLAQEESARTNAEKQVEELLMAMEKVKQELESMKAKLSSTQQSLAEKETHLTNLRAERRKHLEEVLEMKQEALLAAISEKDANIALLELSSSKKKTQEEVAALKREKDRLVQQLKQQTQNRMKLMADNYEDDHFKSSHSNQTNHKPSPDQDEEEGIWA

SEQ ID NO: 1427 - protein, 1088 aa, Homo sapiens
MYGSARSVGKVEPSSQSPGRSPRLPRSPRLGHRRTNSTGGSSGSSVGGGSGKTLSMENIQSLNAAYATSGPMYLSDHENVGSETPKSTMTLGRSGGRLPYGVRMTAMGSSPNIASSGVASDTIAFGEHHLPPVSMASTVPHSLRQARDNTIMDLQTQLKEVLRENDLLRKDVEVKESKLSSSMNSIKTFWSPELKKERALRKDEASKITIWKEQYRVVQEENQHMQMTIQALQDELRIQRDLNQLFQQDSSSRTGEPCVAELTEENFQRLHAEHERQAKELFLLRKTLEEMELRIETQKQTLNARDESIKKLLEMLQSKGLSAKATEEDHERTRRLAEAEMHVHHLESLLEQKEKENSMLREEMHRRFENAPDSAKTKALQTVIEMKDSKISSMERGLRDLEEEIQMLKSNGALSTEEREEEMKQMEVYRSHSKFMKNKIGQVKQELSRKDTELLALQTKLETLTNQFSDSKQHIEVLKESLTAKEQRAAILQTEVDALRLRLEEKETMLNKKTKQIQDMAEEKGTQAGEIHDLKDMLDVKERKVNVLQKKIENLQEQLRDKEKQMSSLKERVKSLQADTTNTDTALTTLEEALAEKERTIERLKEQRDRDEREKQEEIDNYKKDLKDLKEKVSLLQGDLSEKEASLLDLKEHASSLASSGLKKDSRLKTLEIALEQKKEECLKMESQLKKAHEAALEARASPEMSDRIQHLEREITRYKDESSKAQAEVDRLLEILKEVENEKNDKDKKIAELERQVKDQNKKVANLKHKEQVEKKKSAQMLEEARRREDNLNDSSQQLQDSLRKKDDRIEELEEALRESVQITAEREMVLAQEESARTNAEKQVEELLMAMEKVKQELESMKAKLSSTQQSLAEKETHLTNLRAERRKHLEEVLEMKQEALLAAISEKDANIALLELSSSKKKTQEEVAALKREKDRLVQQLKQQTQNRMKLMADNYEDDHFKSSHSNQTNHKPSPDQIIQPLLELDQNRSKLKLYIGHLTTLCHDRDPLILRGLTPPASYNLDDDQAAWENELQKMTRGQLQDELEKGERDNAELQEFANAILQQIADHCPDILEQVVNALEESS

SEQ ID NO: 1428 - protein, 948 aa, Homo sapiens
MYGSARSVGKVEPSSQSPGRSPRLPRSPRLGHRRTNSTGGSSGSSVGGGSGKTLSMENIQSLNAAYATSGPMYLSDHENVGSETPKSTMTLGRSGGRLPYGVRMTAMGSSPNIASSGVASDTIAFGEHHLPPVSMASTVPHSLRQARDNTIMDLQTQLKEVLRENDLLRKDVEVKESKLSSSMNSIKTFWSPELKKERALRKDEASKITIWKEQYRVVQEENQHMQMTIQALQDELRIQRDLNQLFQQDSSSRTGEPCVAELTEENFQRLHAEHERQAKELFLLRKTLEEMELRIETQKQTLNARDESIKKLLEMLQSKGLSAKATEEDHERTRRLAEAEMHVHHLESLLEQKEKENSMLREEMHRRFENAPDSAKTKALQTVIEMKDSKISSMERGLRDLEEEIQMLKSNGALSTEEREEEMKQMEVYRSHSKFMKNKIGQVKQELSRKDTELLALQTKLETLTNQFSDSKQHIEVLKESLTAKEQRAAILQTEVDALRLRLEEKETMLNKKTKQIQDMAEEKGTQAGEIHDLKDMLDVKERKVNVLQKKIENLQEQLRDKEKQMSSLKERVKSLQADTTNTDTALTTLEEALAEKERTIERLKEQRDRDEREKQEEIDNYKKDLKDLKEKVSLLQGDLSEKEASLLDLKEHASSLASSGLKKDSRLKTLEIALEQKKEECLKMESQLKKAHEAALEARASPEMSDRIQHLEREITRYKDESSKAQAEVDRLLEILKEVENEKNDKDKKIAELESLTSRQVKDQNKKVANLKHKEQVEKKKSAQMLEEARRREDNLNDSSQQLQVEELLMAMEKVKQELESMKAKLSSTQQSLAEKETHLTNLRAERRKHLEEVLEMKQEALLAAISEKDANIALLELSSSKKKTQEEVAALKREKDRLVQQLKQQTQNRMKLMADNYEDDHFKSSHSNQTNHKPSPDQDEEEGIWA

SEQ ID NO: 1429 - protein, 720 aa, Homo sapiens
MYGSARSVGKVEPSSQSPGRSPRLPRSPRLGHRRTNSTGGSSGSSVGGGSGKTLSMENIQSLNAAYATSGPMYLSDHENVGSETPKSTMTLGRSGGRLPYGVRMTAMGSSPNIASSGVASDTIAFGEHHLPPVSMASTVPHSLRQARDNTIMDLQTQLKEVLRENDLLRKDVEVKESKLSSSMNSIKTFWSPELKKERALRKDEASKITIWKEQYRVVQEENQVDALRLRLEEKETMLNKKTKQIQDMAEEKGTQAGEIHDLKDMLDVKERKVNVLQKKIENLQEQLRDKEKQMSSLKERVKSLQADTTNTDTALTTLEEALAEKERTIERLKEQRDRDEREKQEEIDNYKKDLKDLKEKVSLLQGDLSEKEASLLDLKEHASSLASSGLKKDSRLKTLEIALEQKKEECLKMESQLKKAHEAALEARASPEMSDRIQHLEREITRYKDESSKAQAEVDRLLEILKEVENEKNDKDKKIAELESLTSRQVKDQNKKVANLKHKEQVEKKKSAQMLEEARRREDNLNDSSQQLQDSLRKKDDRIEELEEALRESVQITAEREMVLAQEESARTNAEKQVEELLMAMEKVKQELESMKAKLSSTQQSLAEKETHLTNLRAERRKHLEEVLEMKQEALLAAISEKDANIALLELSSSKKKTQEEVAALKREKDRLVQQLKQQTQNRMKLMADNYEDDHFKSSHSNQTNHKPSPDQDEEEGIWA

SEQ ID NO: 1430 - protein, 227 aa, Homo sapiens
MRHEAPMQMASAQDARYGQKDSSDQNFDYMFKLLIIGNSSVGKTSFLFRYADDSFTSAFVSTVGIDFKVKTVFKNEKRIKLQIWDTAGQERYRTITTAYYRGAMGFILMYDITNEESFNAVQDWSTQIKTYSWDNAQVILVGNKCDMEDERVISTERGQHLGEQLGFEFFETSAKDNINVKQTFERLVDIICDKMSESLETDPAITAAKQNTRLKETPPPPQPNCAC

SEQ ID NO: 1431 - protein, 113 aa, Homo sapiens
MADVEDGEETCALASHSGSSGSKSGGDKMFSLKKWNAVAMWSWDVECDTCAICRVQVMDACLRCQAENKQEDCVVVWGECNHSFHNCCMSLWVKQNNRCPLCQQDWVVQRIGK

SEQ ID NO: 1432 - protein, 108 aa, Homo sapiens
MADVEDGEETCALASHSGSSGSKSGGDKMFSLKKWNAVAMWSWDVECDTCAICRVQVMDEGIGVRNWSEALNLINASEMGFDCRSGSTALAVPSVSLASHQPCLDDHR

SEQ ID NO: 1433 - protein, 90 aa, Homo sapiens
MADVEDGEETCALASHSGSSGSKSGGDKMFSLKKWNAVAMWSWDVECDTCAICRVQMPVLDVKLKTNKRTVLWSGENVIIPSTTAACPCG

SEQ ID NO: 1434 - protein, 97 aa, Homo sapiens
MADVEDGEETCALASHSGSSGSKSGGDKMFSLKKWNAVAMWSWDVECDTCAICRVQVMVVWGECNHSFHNCCMSLWVKQNNRCPLCQQDWVVQRIGK

SEQ ID NO: 1435 - protein, 664 aa, Homo sapiens
MESFMESLNRLKEIHEKEVLGLQNKLLELNSERCRDAQRIEELFSKNHQLREQQKTLKENLRVLENRLRAGLCDRCMVTQELARKRQQEFESSHLQNLQRIFILTNEMNGLKEENETLKEEVKRLRGLGDRPKPRAKEGTSDPPSPLLLPSPGGWKAITEKPPGGHEEAEEDHQGVGLRGEEKPAGHRTSPVAKISPGATLPESRAPDMSPQRISNQLHGTIAVVRPGSQACPADRGPANGTPPPLPARSSPPSPAYERGLSLDSFLRASRPSAMTHEAPKLSPKVDRLCLLNRPLSLHLQSPHSSPLAPAAAPSDPRLQDLKAREAEAWEEPTELLGLPSALAGMQDLRLEGALHLLLAQQQLRARARAGSVRPRGQPTPGEMLPSLPVGSDSEGPENEGTRAALAAAGLSGGRHTQPAGPGRAQRTEAAATQDCALDKPLDLSEWGRARGQDTPKPAGQHGSLSPAAAHTASPEPPTQSGPLTRSPQALSNGTKGTRVPEQEEASTPMDPSRPLPGSQLSLSSPGSTEDEDTGRPLPPPHPQPPPHPQPPDLDGHPEPSKAEVLRPESDELDETDTPGSEVGLSSQAEATTSTTGEGPECICTQEHGQGPPRKRKRASEPGDKASKKPSRGRRKLTATEGPGSPRDAEDHSPSPNSSPWEET

SEQ ID NO: 1436 - protein, 283 aa, Homo sapiens
MNGEEQYYAATQLYKDPCAFQRGPAPEFSASPPACLYMGRQPPPPPPHPFPGALGALEQGSPPDISPYEVPPLADDPAVAHLHHHLPAQLALPHPPAGPFPEGAEPGVLEEPNRVQLPFPWMKSTKAHAWKGQWAGGAYAAEPEENKRTRTAYTRAQLLELEKEFLFNKYISRPRRVELAVMLNLTERHIKIWFQNRRMKWKKEEDKKRGGGTAVGGGGVAEPEQDCAVTSGEELLALPPPPPPGGAVPPAAPVAAREGRLPPGLSASPQPSSVAPRRPQEPR

SEQ ID NO: 1437 - protein, 376 aa, Homo sapiens
MRGKTFRFEMQRDLVSFPLSPAVRVKLVSAGFQTAEELLEVKPSELSKEVGISKAEALETLQIIRRECLTNKPRYAGTSESHKKCTALELLEQEHTQGFIITFCSALDDILGGGVPLMKTTEICGAPGVGKTQLCMQLAVDVQIPECFGGVAGEAVFIDTEGSFMVDRVVDLATACIQHLQLIAEKHKGEEHRKALEDFTLDNILSHIYYFRCRDYTELLAQVYLLPDFLSEHSKVRLVIVDGIAFPFRHDLDDLSLRTRLLNGLAQQMISLANNHRLAVILTNQMTTKIDRNQALLVPALGESWGHAATIRLIFHWDRKQRLATLYKSPSQKECTVLFQIKPQGFRDTVVTSACSLQTEGSLSTRKRSRDPEEEL

SEQ ID NO: 1438 - protein, 135 aa, Homo sapiens
MRGKTFRFEMQRDLVSFPLSPAVRVKLVSAGFQTAEELLEVKPSELSKEVGISKAEALETLQIIRRECLTNKPRYAGTSESHKKCTALELLEQEHTQGFIITFCSALDDILGGGVPLMKTTEICGAPGVGKTQLW

SEQ ID NO: 1439 - protein, 199 aa, Homo sapiens
MNPRKKVDLKLIIVGAIGVGKTSLLHQYVHKTFYEEYQTTLGASILSKIIILGDTTLKLQIWDTGGQERFRSMVSTFYKGSDGCILAFDVTDLESFEALDIWRGDVLAKIVPMEQSYPMVLLGNKIDLADRKVPQEVAQGWCREKDIPYFEVSAKNDINVVQAFEMLASRALSRYQSILENHLTESIKLSPDQSRSRCC

SEQ ID NO: 1440 - protein, 328 aa, Homo sapiens
MGVLRVGLCPGLTEEMIQLLRSHRIKTVVDLVSADLEEVAQKCGLSYKALVALRRVLLAQFSAFPVNGADLYEELKTSTAILSTGIGSLDKLLDAGLYTGEVTEIVGGPGSGKTQVCLCMAANVAHGLQQNVLYVDSNGGLTASRLLQLLQAKTQDEEEQAEALRRIQVVHAFDIFQMLDVLQELRGTVAQQVTGSSGTVKVVVVDSVTAVVSPLLGGQQREGLALMMQLARELKTLARDLGMAVVVTNHITRDRDSGRLKPALGRSWSFVPSTRILLDTIEGAGASGGRRMACLAKSSRQPTGFQEMVDIGTWGTSEQSATLQGDQT

SEQ ID NO: 1441 - protein, 49 aa, Homo sapiens
MGVLRVGLCPGLTEEMIQLLRSHRIKTVVDLVSADLEEVAQKCGLSYKS

SEQ ID NO: 1442 - protein, 216 aa, Homo sapiens
MGVLRVGLCPGLTEEMIQLLRSHRIKTVVDLVSADLEEVAQKCGLSYKAEALRRIQVVHAFDIFQMLDVLQELRGTVAQQVTGSSGTVKVVVVDSVTAVVSPLLGGQQREGLALMMQLARELKTLARDLGMAVVVTNHITRDRDSGRLKPALGRSWSFVPSTRILLDTIEGAGASGGRRMACLAKSSRQPTGFQEMVDIGTWGTSEQSATLQGDQT

SEQ ID NO: 1443 - protein, 283 aa, Homo sapiens
MGVLRVGLCPGLTEEMIQLLRSHRIKTVVDLVSADLEEVAQKCGLSYKALVALRRVLLAQFSAFPVNGADLYEELKTSTAILSTGIGSLDKLLDAGLYTGEVTEIVGGPGSGKTQAEALRRIQVVHAFDIFQMLDVLQELRGTVAQQVTGSSGTVKVVVVDSVTAVVSPLLGGQQREGLALMMQLARELKTLARDLGMAVVVTNHITRDRDSGRLKPALGRSWSFVPSTRILLDTIEGAGASGGRRMACLAKSSRQPTGFQEMVDIGTWGTSEQSATLQGDQT

SEQ ID NO: 1444 - protein, 328 aa, Homo sapiens
MGVLRVGLCPGLTEEMIQLLRSHRIKTVVDLVSADLEEVAQKCGLSYKALVALRRVLLAQFSAFPVNGADLYEELKTSTAILSTGIGRQKLSGGSRWCMHLVTEIVGGPGSGKTQVCLCMAANVAHGLQQNVLYVDSNGGLTASRLLQLLQAKTQDEEEQAEALRRIQVVHAFDIFQMLDVLQELRGTVAQQVTGSSGTVKVVVVDSVTAVVSPLLGGQQREGLALMMQLARELKTLARDLGMAVVVTNHITRDRDSGRLKPALGRSWSFVPSTRILLDTIEGAGASGGRRMACLAKSSRQPTGFQEMVDIGTWGTSEQSATLQGDQT

SEQ ID NO: 1445 - protein, 118 aa, Homo sapiens
MGVLRVGLCPGLTEEMIQLLRSHRIKTVVDLVSADLEEVAQKCGLSYKALVALRRVLLAQFSAFPVNGADLYEELKTSTAILSTGIGRHGGRTQVGTWEDCSCLRSPQGDRGVGSGML

SEQ ID NO: 1446 - protein, 212 aa, Homo sapiens
MGVLRVGLCPGLTEEMIQLLRSHRIKTVVDLVSADLEEVAQKCGLSYKALVALRRVLLAQFSAFPVNGADLYEELKTSTAILSTGIGSLDKLLDAGLYTGEVTEIVGGPGSGKTQVCLCMAANVAHGLQQNVLYVDSNGGLTASRLLQLLQAKTQDEEEQAEALRRIQVVHAFDIFQMLDVLQELRGTVAQQDGIPEHLNHIPHCLHVHLPC

SEQ ID NO: 1447 - protein, 348 aa, Homo sapiens
MGVLRVGLCPGLTEEMIQLLRSHRIKTVVDLVSADLEEVAQKCGLSYKTWRAHSSGNLGGLQLPQVPAGRSWSGVRNALKKAGLGHGGTDGLSLNAFDERGTAVSTSRLDKLLDAGLYTGEVTEIVGGPGSGKTQVCLCMAANVAHGLQQNVLYVDSNGGLTASRLLQLLQAKTQDEEEQAEALRRIQVVHAFDIFQMLDVLQELRGTVAQQVTGSSGTVKVVVVDSVTAVVSPLLGGQQREGLALMMQLARELKTLARDLGMAVVVTNHITRDRDSGRLKPALGRSWSFVPSTRILLDTIEGAGASGGRRMACLAKSSRQPTGFQEMVDIGTWGTSEQSATLQGDQT

SEQ ID NO: 1448 - protein, 203 aa, Homo sapiens
MGSRDHLFKVLVVGDAAVGKTSLVQRYSQDSFSKHYKSTVGVDFALKVLQWSDYEIVRLQLWDIAGQERFTSMTRLYYRDASACVIMFDVTNATTFSNSQRWKQDLDSKLTLPNGEPVPCLLLANKCDLSPWAVSRDQIDRFSKENGFTGWTETSVKENKNINEAMRVLIEKMMRNSTEDIMSLSTQGDYINLQTKSSSWSCC

SEQ ID NO: 1449 - protein, 179 aa, Homo sapiens
MGSRDHLFKVLVVGDAAVGKTSLVQRYSQDSFSKHYKSTVGGQERFTSMTRLYYRDASACVIMFDVTNATTFSNSQRWKQDLDSKLTLPNGEPVPCLLLANKCDLSPWAVSRDQIDRFSKENGFTGWTETSVKENKNINEAMRVLIEKMMRNSTEDIMSLSTQGDYINLQTKSSSWSCC

SEQ ID NO: 1450 - protein, 131 aa, Homo sapiens
MTRLYYRDASACVIMFDVTNATTFSNSQRWKQDLDSKLTLPNGEPVPCLLLANKCDLSPWAVSRDQIDRFSKENGFTGWTETSVKENKNINEAMRVLIEKMMRNSTEDIMSLSTQGDYINLQTKSSSWSCC

SEQ ID NO: 1451 - protein, 910 aa, Homo sapiens
MRRSAAPSQLQGNSFKKPKFIPPGRSNPGLNEEITKLNPDIKLFEGVAINNTFLPSQNDLRICSLNLPSEESTREINNRDNCSGKYCFEAPTLATLDPPHTVHSAPKEVAVSKEQEEKSDSLVKYFSVVWCKPSKKKHKKWEGDAVLIVKGKSFILKNLEGKDIGRGIGYKFKELEKIEEGQTLMICGKEIEVMGVISPDDFSSGRCFQLGGGSTAISHSSQVARKCFSNPFKSVCKPSSKENRQNDFQNCKPRHDPYTPNSLVMPRPDKNHQWVFNKNCFPLVDVVIDPYLVYHLRPHQKEGIIFLYECVMGMRMNGRCGAILADEMGLGKTLQCISLIWTLQCQGPYGGKPVIKKTLIVTPGSLVNNWKKEFQKWLGSERIKIFTVDQDHKVEEFIKSIFYSVLIISYEMLLRSLDQIKNIKFDLLICDEGHRLKNSAIKTTTALISLSCEKRIILTGTPIQNDLQEFFALIDFVNPGILGSLSSYRKIYEEPIILSREPSASEEEKELGERRAAELTCLTGLFILRRTQEIINKYLPPKIENVVFCRPGALQIELYRKLLNSQVVRFCLQGLLENSPHLICIGALKKLCNHPCLLFNSIKEKECSSTCDKNEEKSLYKGLLSVFPADYNPLLFTEKESGKLQVLSKLLAVIHELRPTEKVVLVSNYTQTLNILQEVCKRHGYAYTRLDGQTPISQRQQIVDGFNSQHSSFFIFLLSSKAGGVGLNLIGGSHLILYDIDWNPATDIQAMSRVWRDGQKYPVHIYRLLTTGTIEEKIYQRQISKQGLCGAVVDLTKTSEHIQFSVEELKNLFTLHESSDCVTHDLLDCECTGEEVHTGDSLEKFIVSRDCQLGPHHQKSNSLKPLSMSQLKQWKHFSGDHLNLTDPFLERITENVSFIFQNITTQATGT

SEQ ID NO: 1452 - protein, 117 aa, Homo sapiens
MRRSAAPSQLQGNSFKKPKFIPPGRSNPGLNEEITKLNPDIKLFEGVAINNTFLPSQNDLRICSLNLPSEESTREINNRDNCSGKYCFEAPTLATLDPPHTVQTWMRRHRLVPVHYR

SEQ ID NO: 1453 - protein, 207 aa, Homo sapiens
MAKTYDYLFKLLLIGDSGVGKTCVLFRFSEDAFNSTFISTIGIDFKIRTIELDGKRIKLQIWDTAGQERFRTITTAYYRGAMGIMLVYDITNEKSFDNIRNWIRNIEEHASADVEKMILGNKCDVNDKRQVSKERGEKLALDYGIKFMETSAKANINVENAFFTLARDIKAKMDKKLEGNSPQGSNQGVKITPDQQKRSSFFRCVLL

SEQ ID NO: 1454 - protein, 207 aa, Homo sapiens
MAKTYDYLFKLLLIGDSGVGKTCVLFRFSEDAFNSTFISTIGIDFKIRTIELDGKRIKLQIWDTAGQERFRTITTAYYRGAMGIMLVYDITNEKSFDNIRNWIRNIEEHASADVEKMILGNKCDVNDKRQVSKERGEKLALDYGIKFMETSAKANINVENRYQSKNGQKIGRQQPPGEQPGSQNHTGPAEEEQLFPMCSSVRNTALL

SEQ ID NO: 1455 - protein, 341 aa, Homo sapiens
MVSSQPKYDLIREVGRGSYGVVYEAVIRKTSARVAVKKIRCHAPENVELALREFWALSSIKSQHPNVIHLEECILQKDGMVQKMSHGSNSSLYLQLVETSLKGEIAFDPRSAYYLWFVMDFCDGGDMNEYLLSRKPNRKTNTSFMLQLSSALAFLHKNQIIHRDLKPDNILISQTRLDTSDLEPTLKVADFGLSKVCSASGQNPEEPVSVNKCFLSTACGTDFYMAPEVWEGHYTAKADIFALGIIIWAMLERITFIDTETKKELLGSYVKQGTEIVPVGEALLENPKMELLIPVKKKSMNGRMKQLIKEMLAANPQDRPDAFELELRLVQIAFKDSSWET

SEQ ID NO: 1456 - protein, 406 aa, Homo sapiens
MRLFRWLLKQPVPKQIERYSRFSPSPLSIKQFLDFGRDNACEKTSYMFLRKELPVRLANTMREVNLLPDNLLNRPSVGLVQSWYMQSFLELLEYENKSPEDPQVLDNFLQVLIKVRNRHNDVVPTMAQGVIEYKEKFGFDPFISTNIQYFLDRFYTNRISFRMLINQHTLLFGGDTNPVHPKHIGSIDPTCNVADVVKDAYETAKMLCEQYYLVAPELEVEEFNAKAPDKPIQVVYVPSHLFHMLFELFKNSMRATVELYEDRKEGYPAVKTLVTLGKEDLSIKISDLGGGVPLRKIDRLFNYMYSTAPRPSLEPTRAAPLAGFGYGLPISRLYARYFQGDLKLYSMEGVGTDAVIYLKALSSESFERLPVFNKSAWRHYKTTPEADDWSNPSSEPRDASKYKAKQ

SEQ ID NO: 1457 - protein, 415 aa, Homo sapiens
MRLFRWLLKQPVPKQIERYSRFSPSPLSIKQFLDFGRDNACEKTSYMFLRKELPVRLANTMREVNLLPDNLLNRPSVGLVQSWYMQSFLELLEYENKSPEDPQVLDNFLQVLIKVRNRHNDVVPTMAQGVIEYKEKFGFDPFISTNIQYFLDRFYTNRISFRMLINQHTLLFGGDTNPVHPKHIGSIDPTCNVADVVKDAYETAKMLCEQYYLVAPELEVEEFNAKAPDKPIQVVYVPSHLFHMLFELFKNSMRATVELYEDRKEGYPAVKTLVTLGKEDLSIKISDLGGGVPLRKIDRLFNYMYSTAPRPSLEPTRAAPLAGFGYGLPISRLYARYFQGDLKLYSMEGVGTDAVIYLKALSSESFERLPVFNKSAWRHYKTTPEADDWSNPSSEPRDASKYKAKQDKIKTNRTF

SEQ ID NO: 1458 - protein, 795 aa, Homo sapiens
MTSGATRYRLSCSLRGHELDVRGLVCCAYPPGAFVSVSRDRTTRLWAPDSPNRSFTEMHCMSGHSNFVSCVCIIPSSDIYPHGLIATGGNDHNICIFSLDSPMPLYILKGHKNTVCSLSSGKFGTLLSGSWDTTAKVWLNDKCMMTLQGHTAAVWAVKILPEQGLMLTGSADKTVKLWKAGRCERTFSGHEDCVRGLAILSETEFLSCANDASIRRWQITGECLEVYYGHTNYIYSISVFPNCRDFVTTAEDRSLRIWKHGECAQTIRLPAQSIWCCCVLDNGDIVVGASDGIIRVFTESEDRTASAEEIKAFEKELSHATIDSKTGDLGDINAEQLPGREHLNEPGTREGQTRLIRDGEKVEAYQWSVSEGRWIKIGDVVGSSGANQQTSGKVLYEGKEFDYVFSIDVNEGGPSYKLPYNTSDDPWLTAYNFLQKNDLNPMFLDQVAKFIIDNTKGQMLGLGNPSFSDPFTGGGRYVPGSSGSSNTLPTADPFTGAGRYVPGSASMGTTMAGVDPFTGNSAYRSAASKTMNIYFPKKEAVTFDQANPTQILGKLKELNGTAPEEKKLTEDDLILLEKILSLICNSSSEKPTVQQLQILWKAINCPEDIVFPALDILRLSIKHPSVNENFCNEKEGAQFSSHLINLLNPKGKPANQLLALRTFCNCFVGQAGQKLMMSQRESLMSHAIELKSGSNKNIHIALATLALNYSVCFHKDHNIEGKAQCLSLISTILEVVQDLEATFRLLVALGTLISDDSNAVQLAKSLGVDSQIKKYSSVSEPAKVSECCRFILNLL

SEQ ID NO: 1459 - protein, 463 aa, Homo sapiens
MATFPCQLCGKTFLTLEKFTIHNYSHSRERPYKCVQPDCGKAFVSRYKLMRHMATHSPQKSHQCAHCEKTFNRKDHLKNHLQTHDPNKMAFGCEECGKKYNTMLGYKRHLALHAASSGDLTCGVCALELGSTEVLLDHLKAHAEEKPPSGTKEKKHQCDHCERCFYTRKDVRRHLVVHTGCKDFLCQFCAQRFGRKDHLTRHTKKTHSQELMKESLQTGDLLSTFHTISPSFQLKAAALPPFPLGASAQNGLASSLPAEVHSLTLSPPEQAAQPMQPLPESLASLHPSVSPGSPPPPLPNHKYNTTSTSYSPLASLPLKADTKGFCNISLFEDLPLQEPQSPQKLNPGFDLAKGNAGKVNLPKELPADAVNLTIPASLDLSPLLGFWQLPPPATQNTFGNSTLALGPGESLPHRLSCLGQQQQEPPLAMGTVSLGQLPLPPIPHVFSAGTGSAILPHFHHAFR

SEQ ID NO: 1460 - protein, 411 aa, Homo sapiens
MATHSPQKSHQCAHCEKTFNRKDHLKNHLQTHDPNKMAFGCEECGKKYNTMLGYKRHLALHAASSGDLTCGVCALELGSTEVLLDHLKAHAEEKPPSGTKEKKHQCDHCERCFYTRKDVRRHLVVHTGCKDFLCQFCAQRFGRKDHLTRHTKKTHSQELMKESLQTGDLLSTFHTISPSFQLKAAALPPFPLGASAQNGLASSLPAEVHSLTLSPPEQAAQPMQPLPESLASLHPSVSPGSPPPPLPNHKYNTTSTSYSPLASLPLKADTKGFCNISLFEDLPLQEPQSPQKLNPGFDLAKGNAGKVNLPKELPADAVNLTIPASLDLSPLLGFWQLPPPATQNTFGNSTLALGPGESLPHRLSCLGQQQQEPPLAMGTVSLGQLPLPPIPHVFSAGTGSAILPHFHHAFR

SEQ ID NO: 1461 - protein, 252 aa, Homo sapiens
MESEMETQSARAEEGFTQVTRKGGRRAKKRQAEQLSAAGEGGDAGRMDTEEARPAKRPVFPPLCGDGLLSGKEETRKIPVPANRYTPLKENWMKIFTPIVEHLGLQIRFNLKSRNVEIRTCKETKDVSALTKAADFVKAFILGFQVEDALALIRLDDLFLESFEITDVKPLKGDHLSRAIGRIAGKGGKTKFTIENVTRTRIVLADVKVHILGSFQNIKMARTAICNLILGNPPSKVYGNIRAVASRSADRF

SEQ ID NO: 1462 - protein, 496 aa, Homo sapiens
MTTFFTSVPPWIQDAKQEEEVGWKLVPRPRGREAESQVKCQCEISGTPFSNGEKLRPHSLPQPEQRPYSCPQLHCGKAFASKYKLYRHMATHSAQKPHQCMYCDKMFHRKDHLRNHLQTHDPNKEALHCSECGKNYNTKLGYRRHLAMHAASSGDLSCKVCLQTFESTQALLEHLKAHSRRVAGGAKEKKHPCDHCDRRFYTRKDVRRHLVVHTGRKDFLCQYCAQRFGRKDHLTRHVKKSHSQELLKIKTEPVDMLGLLSCSSTVSVKEELSPVLCMASRDVMGTKAFPGMLPMGMYGAHIPTMPSTGVPHSLVHNTLPMGMSYPLESSPISSPAQLPPKYQLGSTSYLPDKLPKVEVDSFLAELPGSLSLSSAEPQPASPQPAAAAALLDEALLAKSPANLSEALCAANVDFSHLLGFLPLNLPPCNPPGATGGLVMGYSQAEAQPLLTTLQAQPQDSPGAGGPLNFGPLHSLPPVFTSGLSSTTLPRFHQAFQ

SEQ ID NO: 1463 - protein, 168 aa, Homo sapiens
MNTLQGPVSFKDVAVDFTQEEWRQLDPDEKIAYGDVMLENYSHLVSVGYDYHQAKHHHGVEVKEVEQGEEPWIMEGEFPCQHSPEPAKAIKPIDRKSVHQICSGPVVLSLSTAVKELVENSLDAGATNIDLKLKDYGVDLIEVSDNGCGVEEENFEGLISFSSETSHM

SEQ ID NO: 1464 - protein, 169 aa, Homo sapiens
MNTLQGPVSFKDVAVDFTQEEWRQLDPDEKIAYGDVMLENYSHLVSVGYDYHQAKHHHGVEVKEVEQGEEPWIMEGEFPCQHSPEPAKAIKPIDRKSVHQICSGPVVLSLSTAVKELVENSLDAGATNIDLKLKDYGVDLIEVSDNGCGVEEENFEGLTMSPFLPATRR

SEQ ID NO: 1465 - protein, 109 aa, Homo sapiens
MNTLQGPVSFKDVAVDFTQEEWRQLDPDEKIAYGDVMLENYSHLVSVGYDYHQAKHHHGVEVKEVEQGEEPWIMEGEFPCQHSPVQNLLRPSNLLIGSQSIRFALGQWY

SEQ ID NO: 1466 - protein, 252 aa, Homo sapiens
MGRLSWQVAAAAAVGLALTLEALPWVLRWLRSRRRRPRREALFFPSQVTCTEALLRAPGAELAELPEGCPCGLPHGESALSRLLRALLAARASLDLCLFAFSSPQLGRAVQLLHQRGVRVRVVTDCDYMALNGSQIGLLRKAGIQVRHDQDPGYMHHKFAIVDKRVLITGSLNWTTQAIQNNRENVLITEDDEYVRLFLEEFERIWEQFNPTKYTFFPPKKSHGSCAPPVSRAGGRLLSWHRTCGTSSESQT

SEQ ID NO: 1467 - protein, 203 aa, Homo sapiens
MAKAYDHLFKLLLIGDSGVGKTCLIIRFAEDNFNNTYISTIGIDFKIRTVDIEGKKIKLQVWDTAGQERFKTITTAYYRGAMGIILVYDITDEKSFENIQNWMKSIKENASAGVERLLLGNKCDMEAKRKVQKEQADKLAREHGIRFFETSAKSSMNVDEAFSSLARDILLKSGGRRSGNGNKPPSTDLKTCDKKNTNKCSLG

SEQ ID NO: 1468 - protein, 498 aa, Homo sapiens
MVAEVSPKLAASPMKKPFGFRGKMGKWCCCCFPCCRGSGKNNMGAWRDHDDSAFTEPRYHVRREDLGKLHRAAWWGEVPRADLIVMLRGPGINKRDKKKRTALHLACANGNSEVVSLLLDRQCQLHVFDSKKRTALIKAVQCQEDECALMLLQHGTDPNLPDMYGNTALHYAVYNEDKLMAKTLLLYGADIESKNKGGLTPLLLAVHGQKQRMVKFLIKKKANLNALDRFGRTALILAVRCGSASIVSLLLQQNIDVFSQDVFGQTAEDYAVSSHHSIICQLLSDYKENQMPNNSSGNSNPEQDLKLTSEEEPQRLKGSENSQHEKVTQEPDINKDCDREVEEEMQKHGSNNVGLSENLTDGAAAGNGDGGLVPQRKSRKHENQQFPNTEIEEYHRPEKKSNEKNKVKSQIHSVDNLDDITWPSEIASEDYDLLFSNYETFTLLIEQLKMDFNDSASLSKIQDAVISEEHLLELKNSHYEQLTVEVEQMENMVHVLQK

SEQ ID NO: 1469 - protein, 452 aa, Homo sapiens
MVAEVSPKLAASPMKKPFGFRGKMGKWCCCCFPCCRGSGKNNMGAWRDHDDSAFTEPRYHVRREDLGKLHRAAWWGEVPRADLIVMLRGPGINKRDKKKRTALHLACANGNSEVVSLLLDRQCQLHVFDSKKRTALIKAVQCQEDECALMLLQHGTDPNLPDMYGNTALHYAVYNEDKLMAKTLLLYGADIESKNKGGLTPLLLAVHGQKQRMVKFLIKKKANLNALDRFGRICQLLSDYKENQMPNNSSGNSNPEQDLKLTSEEEPQRLKGSENSQHEKVTQEPDINKDCDREVEEEMQKHGSNNVGLSENLTDGAAAGNGDGGLVPQRKSRKHENQQFPNTEIEEYHRPEKKSNEKNKVKSQIHSVDNLDDITWPSEIASEDYDLLFSNYETFTLLIEQLKMDFNDSASLSKIQDAVISEEHLLELKNSHYEQLTVEVEQMENMVHVLQK

SEQ ID NO: 1470 - protein, 54 aa, Homo sapiens
MFRRLTFAQLLFATVLGIAGGVYIFQPVFEQYAKDQKELKEKMQLVQESEEKKS

SEQ ID NO: 1471 - protein, 506 aa, Homo sapiens
MFTSKSNSVSPSPSLEQADSDALDISTKVQLYGVLWKRPFGRPSAKWSRRFFIIKESFLLYYSESEKKSFETNKYFNIHPKGVIPLGGCLVEPKEEPSMPYAMKISHQDFHGNILLAAESEFEQTQWLEMLQESGKVTWKNAQLGEAMIKSLEAQGLQLAKEKQEYLDKLMEETEELCLQREQREELERLNQVLEAEKQQFEEVVQELRMEQEQIKRELELTARCLKGVEQEKKELRHLTESLQQTLEELSIEKKKTLEMLEENENHLQTLANQSEQPPPSGGLHSNLRQIEEKMQQLLEEKLLAEKRMKENEERSRALEEEREFYSSQSQALQNSLQELTAEKQQAERELKAEVKVRMDLERRLREAEGALRSLEQGLNSKVRNKEKEERMRADVSHLKRFFEECIRNAELEAKMPVIMKNSVYIHKAATRRIKSCRFHRRRSSTSWNDMKPSQSFMTSQLDANNMEELKEVAKRLSRDQRFRESIYHIMATQPGAPSALSRGGK

SEQ ID NO: 1472 - protein, 810 aa, Homo sapiens
MEHKEVVLLLLLFLKSGQGEPLDDYVNTQGASLFSVTKKQLGAGSIEECAAKCEEDEEFTCRAFQYHSKEQQCVIMAENRKSSIIIRMRDVVLFEKKVYLSECKTGNGKNYRGTMSKTKNGITCQKWSSTSPHRPRFSPATHPSEGLEENYCRNPDNDPQGPWCYTTDPEKRYDYCDILECEEECMHCSGENYDGKISKTMSGLECQAWDSQSPHAHGYIPSKFPNKNLKKNYCRNPDRELRPWCFTTDPNKRWELCDIPRCTTPPPSSGPTYQCLKGTGENYRGNVAVTVSGHTCQHWSAQTPHTHNRTPENFPCKNLDENYCRNPDGKRAPWCHTTNSQVRWEYCKIPSCDSSPVSTEQLAPTAPPELTPVVQDCYHGDGQSYRGTSSTTTTGKKCQSWSSMTPHRHQKTPENYPNAGLTMNYCRNPDADKGPWCFTTDPSVRWEYCNLKKCSGTEASVVAPPPVVLLPDVETPSEEDCMFGNGKGYRGKRATTVTGTPCQDWAAQEPHRHSIFTPETNPRAGLEKNYCRNPDGDVGGPWCYTTNPRKLYDYCDVPQCAAPSFDCGKPQVEPKKCPGRVVGGCVAHPHSWPWQVSLRTRFGMHFCGGTLISPEWVLTAAHCLEKSPRPSSYKVILGAHQEVNLEPHVQEIEVSRLFLEPTRKDIALLKLSSPAVITDKVIPACLPSPNYVVADRTECFITGWGETQGTFGAGLLKEAQLPVIENKVCNRYEFLNGRVQSTELCAGHLAGGTDSCQGDSGGPLVCFEKDKYILQGVTSWGLGCARPNKPGVYVRVSRFVTWIEGVMRNN

SEQ ID NO: 1473 - protein, 208 aa, Homo sapiens
MGLGARGAWAALLLGTLQVLALLGAAHESAAMAASANIENSGLPHNSSANSTETLQHVPSDHTNETSNSTVKPPTSVASDSSNTTVTTMKPTAASNTTTPGMVSTNMTSTTLKSTPKTTSVSQNTSQISTSTMTVTHNSSVTSAASSVTITTTMHSEAKKGSKFDTGSFVGGIVLTLGVLSILYIGCKMYYSRRGIRYRTIDEHDAII

SEQ ID NO: 1474 - protein, 189 aa, Homo sapiens
MGLGARGAWAALLLGTLQVLALLGAAHESAAMAETLQHVPSDHTNETSNSTVKPPTSVASDSSNTTVTTMKPTAASNTTTPGMVSTNMTSTTLKSTPKTTSVSQNTSQISTSTMTVTHNSSVTSAASSVTITTTMHSEAKKGSKFDTGSFVGGIVLTLGVLSILYIGCKMYYSRRGIRYRTIDEHDAII

SEQ ID NO: 1475 - protein, 437 aa, Homo sapiens
MASVAVDPQPSVVTRVVNLPLVSSTYDLMSSAYLSTKDQYPYLKSVCEMAENGVKTITSVAMTSALPIIQKLEPQIAVANTYACKGLDRIEERLPILNQPSTQIVANAKGAVTGAKDAVTTTVTGAKDSVASTITGVMDKTKGAVTGSVEKTKSVVSGSINTVLGSRMMQLVSSGVENALTKSELLVEQYLPLTEEELEKEAKKVEGFDLVQKPSYYVRLGSLSTKLHSRAYQQALSRVKEAKQKSQQTISQLHSTVHLIEFARKNVYSANQKIQDAQDKLYLSWVEWKRSIGYDDTDESHCAEHIESRTLAIARNLTQQLQTTCHTLLSNIQGVPQNIQDQAKHMGVMAGDIYSVFRNAASFKEVSDSLLTSSKGQLQKMKESLDDVMDYLVNNTPLNWLVGPFYPQLTESQNAQDQGAEMDKSSQETQRSEHKTH

SEQ ID NO: 1476 - protein, 295 aa, Homo sapiens
MPSPRRSMEGRPLGVSASSSSSSPGSPAHGGGGGGSRFEFQSLLSSRATAVDPTCARLRASESPVHRRGSFPLAAAGPSQSPAPPLPEEDRMDLNPSFLGIALRSLLAIDLWLSKKLGVCAGESSSWGSVRPLMKLLEISGHGIPWLLGTLYCLCRSDSWAGREVLMNLLFALLLDLLLVALIKGLVRRRRPAHNQMDMFVTLSVDKYSFPSGHATRAALMSRFILNHLVLAIPLRVLVVLWAFVLGLSRVMLGRHNVTDVAFGFFLGYMQYSIVDYCWLSPHNAPVLFLLWSQR

SEQ ID NO: 1477 - protein, 932 aa, Homo sapiens
MKQLPAATVRLLSSSQIITSVVSVVKELIENSLDAGATSVDVKLENYGFDKIEVRDNGEGIKAVDAPVMAMKYYTSKINSHEDLENLTTYGFRGEALGSICCIAEVLITTRTAADNFSTQYVLDGSGHILSQKPSHLGQGTTVTALRLFKNLPVRKQFYSTAKKCKDEIKKIQDLLMSFGILKPDLRIVFVHNKAVIWQKSRVSDHKMALMSVLGTAVMNNMESFQYHSEESQIYLSGFLPKCDADHSFTSLSTPERSFIFINSRPVHQKDILKLIRHHYNLKCLKESTRLYPVFFLKIDVPTADVDVNLTPDKSQVLLQNKESVLIALENLMTTCYGPLPSTNSYENNKTDVSAADIVLSKTAETDVLFNKVESSGKNYSNVDTSVIPFQNDMHNDESGKNTDDCLNHQISIGDFGYGHCSSEISNIDKNTKNAFQDISMSNVSWENSQTEYSKTCFISSVKHTQSENGNKDHIDESGENEEEAGLENSSEISADEWSRGNILKNSVGENIEPVKILVPEKSLPCKVSNNNYPIPEQMNLNEDSCNKKSNVIDNKSGKVTAYDLLSNRVIKKPMSASALFVQDHRPQFLIENPKTSLEDATLQIEELWKTLSEEEKLKYEEKATKDLERYNSQMKRAIEQESQMSLKDGRKKIKPTSAWNLAQKHKLKTSLSNQPKLDELLQSQIEKRRSQNIKMVQIPFSMKNLKINFKKQNKVDLEEKDEPCLIHNLRFPDAWLMTSKTEVMLLNPYRVEEALLFKRLLENHKLPAEPLEKPIMLTESLFNGSHYLDVLYKMTADDQRYSGSTYLSDPRLTANGFKIKLIPGVSITENYLEIEGMANCLPFYGVADLKEILNAILNRNAKEVYECRPRKVISYLEGEAVRLSRQLPMYLSKEDIQDIIYRMKHQFGNEIKECVHGRPFFHHLTYLPETT

SEQ ID NO: 1478 - protein, 770 aa, Homo sapiens
MKQLPAATVRLLSSSQIITSVVSVVKELIENSLDAGATSVDVKLENYGFDKIEVRDNGEGIKAVDAPVMAMKYYTSKINSHEDLENLTTYGFRGEALGSICCIAEVLITTRTAADNFSTQYVLDGSGHILSQKPSHLGQGTTVTALRLFKNLPVRKQFYSTAKKCKDEIKKIQDLLMSFGILKPDLRIVFVHNKAVIWQKSRVSDHKMALMSVLGTAVMNNMESFQYHSEESQIYLSGFLPKCDADHSFTSLSTPERSFIFINSRPVHQKDILKLIRHHYNLKCLKESTRLYPVFFLKIDVPTADVDVNLTPDKSQVLLQNKESVLIALENLMTTCYGPLPSTNSYENNKTDVSAADIVLSKTAETDVLFNKVESSGKNYSNVDTSVIPFQNDMHNDESGKNTDDCLNHQISIGDFGYGHCSSEISNIDKNTKNAFQDISMSNVSWENSQTEYSKTCFISSVKHTQSENGNKDHIDESGENEEEAGLENSSEISADEWSRGNILKNSVGENIEPVKILVPEKSLPCKVSNNNYPIPEQMNLNEDSCNKKSNVIDNKSGKVTAYDLLSNRVIKKPMSASALFVQDHRPQFLIENPKTSLEDATLQIEELWKTLSEEEKLNLFNGSHYLDVLYKMTADDQRYSGSTYLSDPRLTANGFKIKLIPGVSITENYLEIEGMANCLPFYGVADLKEILNAILNRNAKEVYECRPRKVISYLEGEAVRLSRQLPMYLSKEDIQDIIYRMKHQFGNEIKECVHGRPFFHHLTYLPETT

SEQ ID NO: 1479 - protein, 893 aa, Homo sapiens
MKQLPAATVRLLSSSQIITSVVSVVKELIENSLDAGATSVDVKLENYGFDKIEVRDNGEGIKAVDAPVMAMKYYTSKINSHEDLENLTTYGFRGEALGSICCIAEVLITTRTAADNFSTQYVLDGSGHILSQKPSHLGQGTTVTALRLFKNLPVRKQFYSTAKKCKDEIKKIQDLLMSFGILKPDLRIVFVHNKIYLSGFLPKCDADHSFTSLSTPERSFIFINSRPVHQKDILKLIRHHYNLKCLKESTRLYPVFFLKIDVPTADVDVNLTPDKSQVLLQNKESVLIALENLMTTCYGPLPSTNSYENNKTDVSAADIVLSKTAETDVLFNKVESSGKNYSNVDTSVIPFQNDMHNDESGKNTDDCLNHQISIGDFGYGHCSSEISNIDKNTKNAFQDISMSNVSWENSQTEYSKTCFISSVKHTQSENGNKDHIDESGENEEEAGLENSSEISADEWSRGNILKNSVGENIEPVKILVPEKSLPCKVSNNNYPIPEQMNLNEDSCNKKSNVIDNKSGKVTAYDLLSNRVIKKPMSASALFVQDHRPQFLIENPKTSLEDATLQIEELWKTLSEEEKLKYEEKATKDLERYNSQMKRAIEQESQMSLKDGRKKIKPTSAWNLAQKHKLKTSLSNQPKLDELLQSQIEKRRSQNIKMVQIPFSMKNLKINFKKQNKVDLEEKDEPCLIHNLRFPDAWLMTSKTEVMLLNPYRVEEALLFKRLLENHKLPAEPLEKPIMLTESLFNGSHYLDVLYKMTADDQRYSGSTYLSDPRLTANGFKIKLIPGVSITENYLEIEGMANCLPFYGVADLKEILNAILNRNAKEVYECRPRKVISYLEGEAVRLSRQLPMYLSKEDIQDIIYRMKHQFGNEIKECVHGRPFFHHLTYLPETT

SEQ ID NO: 1480 - protein, 555 aa, Homo sapiens
MSFGILKPDLRIVFVHNKIYLSGFLPKCDADHSFTSLSTPERSFIFINSRPVHQKDILKLIRHHYNLKCLKESTRLYPVFFLKIDVPTADVDVNLTPDKSQVLLQNKESVLIALENLMTTCYGPLPSTNSYENNKTDVSAADIVLSKTAETDVLFNKVESSGKNYSNVDTSVIPFQNDMHNDESGKNTDDCLNHQISIGDFGYGHCSSEISNIDKNTKNAFQDISMSNVSWENSQTEYSKTCFISSVKHTQSENGNKDHIDESGENEEEAGLENSSEISADEWSRGNILKNSVGENIEPVKILVPEKSLPCKVSNNNYPIPEQMNLNEDSCNKKSNVIDNKSGKVTAYDLLSNRVIKKPMSASALFVQDHRPQFLIENPKTSLEDATLQIEELWKTLSEEEKLNLFNGSHYLDVLYKMTADDQRYSGSTYLSDPRLTANGFKIKLIPGVSITENYLEIEGMANCLPFYGVADLKEILNAILNRNAKEVYECRPRKVISYLEGEAVRLSRQLPMYLSKEDIQDIIYRMKHQFGNEIKECVHGRPFFHHLTYLPETT

SEQ ID NO: 1481 - protein, 325 aa, Homo sapiens
MAVGNNTQRSYSIIPCFIFVELVIMAGTVLLAYYFECTDTFQVHIQGFFCQDGDLMKPYPGTEEESFITPLVLYCVLAATPTAIIFIGEISMYFIKSTRESLIAQEKTILTGECCYLNPLLRRIIRFTGVFAFGLFATDIFVNAGQVVTGHLTPYFLTVCKPNYTSADCQAHHQFINNGNICTGDLEVIEKARRSFPSKHAALSIYSALYATMYITSTIKTKSSRLAKPVLCLGTLCTAFLTGLNRVSEYRNHCSDVIAGFILGTAVALFLGMCVVHNFKGTQGSPSKPKPEDPRGVPLMAFPRIESPLETLSAQNHSASMTEVT

SEQ ID NO: 1482 - protein, 384 aa, Homo sapiens
MAAQNGNTSFTPNFNPPQDHASSLSFNFSYGDYDLPMDEDEDMTKTRTFFAAKIVIGIALAGIMLVCGIGNFVFIAALTRYKKLRNLTNLLIANLAISDFLVAIICCPFEMDYYVVRQLSWEHGHVLCASVNYLRTVSLYVSTNALLAIAIDRYLAIVHPLKPRMNYQTASFLIALVWMVSILIAIPSAYFATETVLFIVKSQEKIFCGQIWPVDQQLYYKSYFLFIFGVEFVGPVVTMTLCYARISRELWFKAVPGFQTEQIRKRLRCRRKTVLVLMCILTAYVLCWAPFYGFTIVRDFFPTVFVKEKHYLTAFYVVECIAMSNSMINTVCFVTVKNNTMKYFKKMMLLHWRPSQRGSKSSADLDLRTNGVPTTEEVDCIRLK

SEQ ID NO: 1483 - protein, 318 aa, Homo sapiens
MDKQNSQMNASHPETNLPVGYPPQYPPTAFQGPPGYSGYPGPQVSYPPPPAGHSGPGPAGFPVPNQPVYNQPVYNQPVGAAGVPWMPAPQPPLNCPPGLEYLSQIDQILIHQQIELLEVLTGFETNNKYEIKNSFGQRVYFAAEDTDCCTRNCCGPSRPFTLRIIDNMGQEVITLERPLRCSSCCCPCCLQEIEIQAPPGVPIGYVIQTWHPCLPKFTIQNEKREDVLKISGPCVVCSCCGDVDFEIKSLDEQCVVGKISKHWTGILREAFTDADNFGIQFPLDLDVKMKAVMIGACFLIDFMFFESTGSQEQKSGVW

SEQ ID NO: 1484 - protein, 237 aa, Homo sapiens
MLLTRKQTCQLGILLSIHRQHSKIDQILIHQQIELLEVLTGFETNNKYEIKNSFGQRVYFAAEDTDCCTRNCCGPSRPFTLRIIDNMGQEVITLERPLRCSSCCCPCCLQEIEIQAPPGVPIGYVIQTWHPCLPKFTIQNEKREDVLKISGPCVVCSCCGDVDFEIKSLDEQCVVGKISKHWTGILREAFTDADNFGIQFPLDLDVKMKAVMIGACFLIDFMFFESTGSQEQKSGVW

SEQ ID NO: 1485 - protein, 172 aa, Homo sapiens
MLTEVMEVWHGLVIAVVSLFLQACFLTAINYLLSRHMAHKSEQILKAASLQVPRPSPGHHHPPAVKEMKETQTERDIPMSDSLYRHDSDTPSDSLDSSCSSPPACQATEDVDYTQVVFSDPGELKNDSPLDYENIKEITDYVNVNPERHKPSFWYFVNPALSEPAEYDQVAM

SEQ ID NO: 1486 - protein, 205 aa, Homo sapiens
MAHGPGALMLKCVVVGDGAVGKTCLLMSYANDAFPEEYVPTVFDHYAVSVTVGGKQYLLGLYDTAGQEDYDRLRPLSYPMTDVFLICFSVVNPASFQNVKEEWVPELKEYAPNVPFLLIGTQIDLRDDPKTLARLNDMKEKPICVEQGQKLAKEIGACCYVECSALTQKGLKTVFDEAIIAILTPKKHTVKKRIGSRCINCCLIT

SEQ ID NO: 1487 - protein, 1568 aa, Homo sapiens
MEVSRRKAPPRPPRPAAPLPLLAYLLALAAPGRGADEPVWRSEQAIGAIAASQEDGVFVASGSCLDQLDYSLEHSLSRLYRDQAGNCTEPVSLAPPARPRPGSSFSKLLLPYREGAAGLGGLLLTGWTFDRGACEVRPLGNLSRNSLRNGTEVVSCHPQGSTAGVVYRAGRNNRWYLAVAATYVLPEPETASRCNPAASDHDTAIALKDTEGRSLATQELGRLKLCEGAGSLHFVDAFLWNGSIYFPYYPYNYTSGAATGWPSMARIAQSTEVLFQGQASLDCGHGHPDGRRLLLSSSLVEALDVWAGVFSAAAGEGQERRSPTTTALCLFRMSEIQARAKRVSWDFKTAESHCKEGDQPERVQPIASSTLIHSDLTSVYGTVVMNRTVLFLGTGDGQLLKVILGENLTSNCPEVIYEIKEETPVFYKLVPDPVKNIYIYLTAGKEVRRIRVANCNKHKSCSECLTATDPHCGWCHSLQRCTFQGDCVHSENLENWLDISSGAKKCPKIQIIRSSKEKTTVTMVGSFSPRHSKCMVKNVDSSRELCQNKSQPNRTCTCSIPTRATYKDVSVVNVMFSFGSWNLSDRFNFTNCSSLKECPACVETGCAWCKSARRCIHPFTACDPSDYERNQEQCPVAVEKTSGGGRPKENKGNRTNQALQVFYIKSIEPQKVSTLGKSNVIVTGANFTRASNITMILKGTSTCDKDVIQVSHVLNDTHMKFSLPSSRKEMKDVCIQFDGGNCSSVGSLSYIALPHCSLIFPATTWISGGQNITMMGRNFDVIDNLIISHELKGNINVSEYCVATYCGFLAPSLKSSKVRTNVTVKLRVQDTYLDCGTLQYREDPRFTGYRVESEVDTELEVKIQKENDNFNISKKDIEITLFHGENGQLNCSFENITRNQDLTTILCKIKGIKTASTIANSSKKVRVKLGNLELYVEQESVPSTWYFLIVLPVLLVIVIFAAVGVTRHKSKELSRKQSQQLELLESELRKEIRDGFAELQMDKLDVVDSFGTVPFLDYKHFALRTFFPESGGFTHIFTEDMHNRDANDKNESLTALDALICNKSFLVTVIHTLEKQKNFSVKDRCLFASFLTIALQTKLVYLTSILEVLTRDLMEQCSNMQPKLMLRRTESVVEKLLTNWMSVCLSGFLRETVGEPFYLLVTTLNQKINKGPVDVITCKALYTLNEDWLLWQVPEFSTVALNVVFEKIPENESADVCRNISVNVLDCDTIGQAKEKIFQAFLSKNGSPYGLQLNEIGLELQMGTRQKELLDIDSSSVILEDGITKLNTIGHYEISNGSTIKVFKKIANFTSDVEYSDDHCHLILPDSEAFQDVQGKRHRGKHKFKVKEMYLTKLLSTKVAIHSVLEKLFRSIWSLPNSRAPFAIKYFFDFLDAQAENKKITDPDVVHIWKTNSLPLRFWVNILKNPQFVFDIKKTPHIDGCLSVIAQAFMDAFSLTEQQLGKEAPTNKLLYAKDIPTYKEEVKSYYKAIRDLPPLSSSEMEEFLTQESKKHENEFNEEVALTEIYKYIVKYFDEILNKLERERGLEEAQKQLLHVKVLFDEKKKCKWM

SEQ ID NO: 1488 - protein, 159 aa, Homo sapiens
MSRRNCWICKMCRDESKRPPSNLTLEEVLQWAQSFENLMATKYGPVVYAAYLKMEHSDENIQFWMACETYKKIASRWSRISRAKKLYKIYIQPQSPREINIDSSTRETIIRNIQEPTETCFEEAQKIVYMHMERDSYPRFLKSEMYQKLLKTMQSNNSF

SEQ ID NO: 1489 - protein, 806 aa, Homo sapiens
MQFFGRLVNTFSGVTNLFSNPFRVKEVAVADYTSSDRVREEGQLILFQNTPNRTWDCVLVNPRNSQSGFRLFQLELEADALVNFHQYSSQLLPFYESSPQVLHTEVLQHLTDLIRNHPSWSVAHLAVELGIRECFHHSRIISCANCAENEEGCTPLHLACRKGDGEILVELVQYCHTQMDVTDYKGETVFHYAVQGDNSQVLQLLGRNAVAGLNQVNNQGLTPLHLACQLGKQEMVRVLLLCNARCNIMGPNGYPIHSAMKFSQKGCAEMIISMDSSQIHSKDPRYGASPLHWAKNAEMARMLLKRGCNVNSTSSAGNTALHVAVMRNRFDCAIVLLTHGANADARGEHGNTPLHLAMSKDNVEMIKALIVFGAEVDTPNDFGETPTFLASKIGRLVTRKAILTLLRTVGAEYCFPPIHGVPAEQGSAAPHHPFSLERAQPPPISLNNLELQDLMHISRARKPAFILGSMRDEKRTHDHLLCLDGGGVKGLIIIQLLIAIEKASGVATKDLFDWVAGTSTGGILALAILHSKSMAYMRGMYFRMKDEVFRGSRPYESGPLEEFLKREFGEHTKMTDVRKPKVMLTGTLSDRQPAELHLFRNYDAPETVREPRFNQNVNLRPPAQPSDQLVWRAARSSGAAPTYFRPNGRFLDGGLLANNPTLDAMTEIHEYNQDLIRKGQANKVKKLSIVVSLGTGRSPQVPVTCVDVFRPSNPWELAKTVFGAKELGKMVVDCCTDPDGRAVDRARAWCEMVGIQYFRLNPQLGTDIMLDEVSDTVLVNALWETEVYIYEHREEFQKLIQLLLSP

SEQ ID NO: 1490 - protein, 752 aa, Homo sapiens
MQFFGRLVNTFSGVTNLFSNPFRVKEVAVADYTSSDRVREEGQLILFQNTPNRTWDCVLVNPRNSQSGFRLFQLELEADALVNFHQYSSQLLPFYESSPQVLHTEVLQHLTDLIRNHPSWSVAHLAVELGIRECFHHSRIISCANCAENEEGCTPLHLACRKGDGEILVELVQYCHTQMDVTDYKGETVFHYAVQGDNSQVLQLLGRNAVAGLNQVNNQGLTPLHLACQLGKQEMVRVLLLCNARCNIMGPNGYPIHSAMKFSQKGCAEMIISMDSSQIHSKDPRYGASPLHWAKNAEMARMLLKRGCNVNSTSSAGNTALHVAVMRNRFDCAIVLLTHGANADARGEHGNTPLHLAMSKDNVEMIKALIVFGAEVDTPNDFGETPTFLASKIGRQLQDLMHISRARKPAFILGSMRDEKRTHDHLLCLDGGGVKGLIIIQLLIAIEKASGVATKDLFDWVAGTSTGGILALAILHSKSMAYMRGMYFRMKDEVFRGSRPYESGPLEEFLKREFGEHTKMTDVRKPKVMLTGTLSDRQPAELHLFRNYDAPETVREPRFNQNVNLRPPAQPSDQLVWRAARSSGAAPTYFRPNGRFLDGGLLANNPTLDAMTEIHEYNQDLIRKGQANKVKKLSIVVSLGTGRSPQVPVTCVDVFRPSNPWELAKTVFGAKELGKMVVDCCTDPDGRAVDRARAWCEMVGIQYFRLNPQLGTDIMLDEVSDTVLVNALWETEVYIYEHREEFQKLIQLLLSP

SEQ ID NO: 1491 - protein, 479 aa, Homo sapiens
MQFFGRLVNTFSGVTNLFSNPFRVKEVAVADYTSSDRVREEGQLILFQNTPNRTWDCVLVNPRNSQSGFRLFQLELEADALVNFHQYSSQLLPFYESSPQVLHTEVLQHLTDLIRNHPSWSVAHLAVELGIRECFHHSRIISCANCAENEEGCTPLHLACRKGDGEILVELVQYCHTQMDVTDYKGETVFHYAVQGDNSQVLQLLGRNAVAGLNQVNNQGLTPLHLACQLGKQEMVRVLLLCNARCNIMGPNGYPIHSAMKFSQKGCAEMIISMDSSQIHSKDPRYGASPLHWAKNAEMARMLLKRGCNVNSTSSAGNTALHVAVMRNRFDCAIVLLTHGANADARGEHGNTPLHLAMSKDNVEMIKALIVFGAEVDTPNDFGETPTFLASKIGRLVTRKAILTLLRTVGAEYCFPPIHGVPAEQGSAAPHHPFSLERAQPPPISLNNLELQDLMHISRARKPAFILGSMRDEKRTCRT

SEQ ID NO: 1492 - protein, 427 aa, Homo sapiens
MQFFGRLVNTFSGVTNLFSNPFRVKEVAVADYTSSDRVREEGQLILFQNTPNRTWDCVLVNPRNSQSGFRCANCAENEEGCTPLHLACRKGDGEILVELVQYCHTQMDVTDYKGETVFHYAVQGDNSQVLQLLGRNAVAGLNQVNNQGLTPLHLACQLGKQEMVRVLLLCNARCNIMGPNGYPIHSAMKFSQKGCAEMIISMDSSQIHSKDPRYGASPLHWAKNAEMARMLLKRGCNVNSTSSAGNTALHVAVMRNRFDCAIVLLTHGANADARGEHGNTPLHLAMSKDNVEMIKALIVFGAEVDTPNDFGETPTFLASKIGRLVTRKAILTLLRTVGAEYCFPPIHGVPAEQGSAAPHHPFSLERAQPPPISLNNLGSHPSQAGWWAWGAVSDGTTGSHAHLTGPEASVHPGLHEGREADMQNLSP

SEQ ID NO: 1493 - protein, 566 aa, Homo sapiens
MPGKPKHLGVPNGRMVLAVSDGELSSTTGPQGQGEGRGSSLSIHSLPSGPSSPFPTEEQPVASWALSFERLLQDPLGLAYFTEFLKKEFSAENVTFWKACERFQQIPASDTQQLAQEARNIYQEFLSSQALSPVNIDRQAWLGEEVLAEPRPDMFRAQQLQIFNLMKFDSYARFVKSPLYRECLLAEAEGRPLREPGSSRLGSPDATRKKPKLKPGKSLPLGVEELGQLPPVEGPGGRPLRKSFRRELGGTANAALRRESQGSLNSSASLDLGFLAFVSSKSESHRKSLGSTEGESESRPGKYCCVYLPDGTASLALARPGLTIRDMLAGICEKRGLSLPDIKVYLVGNEQALVLDQDCTVLADQEVRLENRITFELELTALERVVRISAKPTKRLQEALQPILEKHGLSPLEVVLHRPGEKQPLDLGKLVSSVAAQRLVLDTLPGVKISKARDKSPCRSQGCPPRTQDKATHPPPASPSSLVKVPSSATGKRQTCDIEGLVELLNRVQSSGAHDQRGLLRKEDLVLPEFLQLPAQGPSSEETPPQTKSAAQPIGGSLNSTTDSAL

SEQ ID NO: 1494 - protein, 201 aa, Homo sapiens
MFRAQQLQIFNLMKFDSYARFVKSPLYRECLLAEAEGRPLREPGSSRLGSPDATRKKPKLKPGKSLPLGVEELGQLPPVEGPGGRPLRKSFRRELGGTANAALRRESQGSLNSSASLDLGFLAFVSSKSESHRKSLGSTEGESESRPGKYCCVYLPDGTASLALARPGLTIRDMLAGICEKRGLSLPDIKVYLVGNEQVGT

SEQ ID NO: 1495 - protein, 414 aa, Homo sapiens
MFRAQQLQIFNLMKFDSYARFVKSPLYRECLLAEAEGRPLREPGSSRLGSPDATRKKPKLKPGKSLPLGVEELGQLPPVEGPGGRPLRKSFRRELGGTANAALRRESQGSLNSSASLDLGFLAFVSSKSESHRKSLGSTEGESESRPGKYCCVYLPDGTASLALARPGLTIRDMLAGICEKRGLSLPDIKVYLVGNEQKALVLDQDCTVLADQEVRLENRITFELELTALERVVRISAKPTKRLQEALQPILEKHGLSPLEVVLHRPGEKQPLDLGKLVSSVAAQRLVLDTLPGVKISKARDKSPCRSQGCPPRTQDKATHPPPASPSSLVKVPSSATGKRQTCDIEGLVELLNRVQSSGAHDQRGLLRKEDLVLPEFLQLPAQGPSSEETPPQTKSAAQPIGGSLNSTTDSAL

SEQ ID NO: 1496 - protein, 347 aa, Homo sapiens
MPGKPKHLGVPNGRMVLAVSDGELSSTTGPQGQGEGRGSSLSIHSLPSGPSSPFLAFVSSKSESHRKSLGSTEGESESRPGKYCCVYLPDGTASLALARPGLTIRDMLAGICEKRGLSLPDIKVYLVGNEQKALVLDQDCTVLADQEVRLENRITFELELTALERVVRISAKPTKRLQEALQPILEKHGLSPLEVVLHRPGEKQPLDLGKLVSSVAAQRLVLDTLPGVKISKARDKSPCRSQGCPPRTQDKATHPPPASPSSLVKVPSSATGKRQTCDIEGLVELLNRVQSSGAHDQRGLLRKEDLVLPEFLQLPAQGPSSEETPPQTKSAAQPIGGSLNSTTDSAL

SEQ ID NO: 1497 - protein, 1385 aa, Homo sapiens
MELSDSDRPVSFGSTSSSASSRDSHGSFGSRMTLVSNSHMGLFNQDKEVGAIKLELIPARPFSSSELQRDNPATGQQNADEGSERPPRAQWRVDSNGAPKTIADSATSPKLLYVDRVVQEILETERTYVQDLKSIVEDYLDCIRDQTKLPLGTEERSALFGNIQDIYHFNSELLQDLENCENDPVAIAECFVSKSEEFHIYTQYCTNYPRSVAVLTECMRNKILAKFFRERQETLKHSLPLGSYLLKPVQRILKYHLLLHEIENHLDKDTEGYDVVLDAIDTMQRVAWHINDMKRKHEHAVRLQEIQSLLTNWKGPDLTSYGELVLEGTFRIQRAKNERTLFLFDKLLLITKKRDDTFTYKAHILCGNLMLVEVIPKEPLSFSVFHYKNPKLQHTVQAKSQQDKRLWVLHLKRLILENHAAKIPAKAKQAILEMDAIHHPGFCYSPEGGTKALFGSKEGSAPYRLRRKSEPSSRSHKVLKTSETAQDIQKVSREEGSPQLSSARPSPAQRNSQPSSSTMISVLRAGGALRNIWTDHQIRQALFPSRRSPQENEDDEDDYQMFVPSFSSSDLNSTRLCEDSTSSRPCSWHMGQMESTETSSSGHRIVRRASSAGESNTCPPEIGTSDRTRELQNSPKTEGQEEMTPFGSSIELTIDDIDHVYDNISYEDLKLMVAKREEAESTPSKSARDSVRPKSTPELAFTKRQAGHSKGSLYAQTDGTLSGGEASSQSTHELQAVEENIYDTIGLPDPPSLGFKCSSLKRAKRSTFLGLEADFVCCDSLRPFVSQDSLQLSEDEAPYHQATPDHGYLSLLYDSPSGNLSMPHKPVSDKLSEEVDEIWNDLENYIKKNEDKARDRLLAAFPVSKDDVPDRLHAESTPELSRDVGRSVSTLSLPESQALLTPVKSRAGRASRANCPFEEDLISKEGSFMSLNRLSLASEMPLMDNPYDLANSGLSQTDPENPDLGMEATDKTKSRVFMMARQYSQKIKKANQLLKVKSLELEQPPASQHQKSMHKDLAAILEEKKQGGPAIGARIAEYSQLYDQIVFRESPLKIQKDGWASPQESSLLRSVSPSQVHHGSGDWLLHSTYSNGELADFCLPPEQDLRSRYPTFEINTKSTPRQLSAACSVPSLQTSDPLPGSVQRCSVVVSQPNKENWCQDHLYNSLGRKGISAKSQPYHRSQSSSSVLINKSMDSINYPSDVGKQQLLSLHRSSRCESHQDLLPDIADSHQQGTEKLSDLTLQDSQKVVVVNRNLPLNAQIATQNYFSNFKETDGDEDDYVEIKSEEDESELELSHNRRRKSDSKFVDADFSDNVCSGNTLHSLNSPRTPKKPVNSKLGLSPYLTPYNDSDKLNDYLWRGPSPNQQNIVQSLREKFQCLSSSSFA

SEQ ID NO: 1498 - protein, 1386 aa, Homo sapiens
MPEGAQGLSLSKPSPSLGCGRRGEVCDCGTVCETRTAPAAPTMASPRGSGSSTSLSTVGSEGDPAPGPTPACSASRPEPLPGPPIRLHLSPVGIPGSARPSRLERVAREIVETERAYVRDLRSIVEDYLGPLLDGGVLGLSVEQVGTLFANIEDIYEFSSELLEDLENSSSAGGIAECFVQRSEDFDIYTLYCMNYPSSLALLRELSLSPPAALWLQERQAQLRHSLPLQSFLLKPVQRILKYHLLLQELGKHWAEGPGTGGREMVEEAIVSMTAVAWYINDMKRKQEHAARLQEVQRRLGGWTGPELSAFGELVLEGAFRGGGGGGPRLRGGERLLFLFSRMLLVAKRRGLEYTYKGHIFCCNLSVSESPRDPLGFKVSDLTIPKHRHLLQAKNQEEKRLWIHCLQRLFFENHPASIPAKAKQVLLENSLHCAPKSKPVLEPLTPPLGSPRPRDARSFTPGRRNTAPSPGPSVIRRGRRQSEPVKDPYVMFPQNAKPGFKHAGSEGELYPPESQPPVSGSAPPEDLEDAGPPTLDPSGTSITEEILELLNQRGLRDPGPSTHDIPKFPGDSQVPGDSETLTFQALPSRDSSEEEEEEEEGLEMDERGPSPLHVLEGLESSIAAEMPSIPCLTKIPDVPNLPEIPSRCEIPEGSRLPSLSDISDVFEMPCLPAIPSVPNTPSLSSTPTLSCDSWLQGPLQEPAEAPATRRELFSGSNPGKLGEPPSGGKAGPEEDEEGVSFTDFQPQDVTQHQGFPDELAFRSCSEIRSAWQALEQGQLARPGFPEPLLILEDSDLGGDSGSGKAGAPSSERTASRVRELARLYSERIQQMQRAETRASANAPRRRPRVLAQPQPSPCLPQEQAEPGLLPAFGHVLVCELAFPLTCAQESVPLGPAVWVQAAIPLSKQGGSPDGQGLHVSNLPKQDLPGIHVSAATLLPEQGGSRHVQAPAATPLPKQEGPLHLQVPALTTFSDQGHPEIQVPATTPLPEHRSHMVIPAPSTAFCPEQGHCADIHVPTTPALPKEICSDFTVSVTTPVPKQEGHLDSESPTNIPLTKQGGSRDVQGPDPVCSQPIQPLSWHGSSLDPQGPGDTLPPLPCHLPDLQIPGTSPLPAHGSHLDHRIPANAPLSLSQELPDTQVPATTPLPLPQVLTDIWVQALPTSPKQGSLPDIQGPAAAPPLPEPSLTDTQVQKLTPSLEQKSLIDAHVPAATPLPERGGSLDIQGLSPTPVQTTMVLSKPGGSLASHVARLESSDLTPPHSPPPSSRQLLGPNAAALSRYLAASYISQSLARRQGPGGGAPAASRGSWSSAPTSRASSPPPQPQPPPPPARRLSYATTVNIHVGGGGRLRPAKAQVRLNHPALLASTQESMGLHRAQGAPDAPFHM

SEQ ID NO: 1499 - protein, 577 aa, Homo sapiens
MPEGAQGLSLSKPSPSLGCGRRGEVCDCGTVCETRTAPAAPTMASPRGSGSSTSLSTVGSEGDPAPGPTPACSASRPEPLPGPPIRLHLSPVGIPGSARPSRLERVAREIVETERAYVRDLRSIVEDYLGPLLDGGVLGLSVEQVGTLFANIEDIYEFSSELLEDLENSSSAGGIAECFVQRSEDFDIYTLYCMNYPSSLALLRELSLSPPAALWLQERQAQLRHSLPLQSFLLKPVQRILKYHLLLQELGKHWAEGPGTGGREMVEEAIVSMTAVAWYINDMKRKQEHAARLQEVQRRLGGWTGPELSAFGELVLEGAFRGGGGGGPRLRGGERLLFLFSRMLLVAKRRGLEYTYKGHIFCCNLSVSESPRDPLGFKVSDLTIPKHRHLLQAKNQEEKRLWIHCLQRLFFENHPASIPAKAKQVLLENSLHCAPKSKPVLEPLTPPLGSPRPRDARSFTPGRRNTAPSPGPSVIRRGRRQSEPVKDPYVMFPQNAKPGFKHAGSEGELYPPESQPPVSGSAPPEDLEDAGPPTLDPSGTSITEEILELLNQRGLRDPGESMGLHRAQGAPDAPFHM

SEQ ID NO: 1500 - protein, 1357 aa, Homo sapiens
MPEGAQGLSLSKPSPSLGCGRRGEVCDCGTVCETRTAPAAPTMASPRGSGSSTSLSTVGSEGDPAPGPTPACSASRPEPLPGPPIRLHLSPVGIPGSARPSRLERVAREIVETERAYVRDLRSIVEDYLGPLLDGGVLGLSVEQVGTLFANIEDIYEFSSELLEDLENSSSAGGIAECFVQRSEDFDIYTLYCMNYPSSLALLRELSLSPPAALWLQERQAQLRHSLPLQSFLLKPVQRILKYHLLLQELGKHWAEGPGTGGREMVEEAIVSMTAVAWYINDMKRKQEHAARLQEVQRRLGGWTGPELSAFGELVLEGAFRGGGGGGPRLRGGERLLFLFSRMLLVAKRRGLEYTYKGHIFCCNLSVSESPRDPLGFKVSDLTIPKHRHLLQAKNQEEKRLWIHCLQRLFFENHPASIPAKAKQVLLENSLHCAPKSKPVLEPLTPPLGSPRPRDARSFTPGRRNTAKPGFKHAGSEGELYPPESQPPVSGSAPPEDLEDAGPPTLDPSGTSITEEILELLNQRGLRDPGPSTHDIPKFPGDSQVPGDSETLTFQALPSRDSSEEEEEEEEGLEMDERGPSPLHVLEGLESSIAAEMPSIPCLTKIPDVPNLPEIPSRCEIPEGSRLPSLSDISDVFEMPCLPAIPSVPNTPSLSSTPTLSCDSWLQGPLQEPAEAPATRRELFSGSNPGKLGEPPSGGKAGPEEDEEGVSFTDFQPQDVTQHQGFPDELAFRSCSEIRSAWQALEQGQLARPGFPEPLLILEDSDLGGDSGSGKAGAPSSERTASRVRELARLYSERIQQMQRAETRASANAPRRRPRVLAQPQPSPCLPQEQAEPGLLPAFGHVLVCELAFPLTCAQESVPLGPAVWVQAAIPLSKQGGSPDGQGLHVSNLPKQDLPGIHVSAATLLPEQGGSRHVQAPAATPLPKQEGPLHLQVPALTTFSDQGHPEIQVPATTPLPEHRSHMVIPAPSTAFCPEQGHCADIHVPTTPALPKEICSDFTVSVTTPVPKQEGHLDSESPTNIPLTKQGGSRDVQGPDPVCSQPIQPLSWHGSSLDPQGPGDTLPPLPCHLPDLQIPGTSPLPAHGSHLDHRIPANAPLSLSQELPDTQVPATTPLPLPQVLTDIWVQALPTSPKQGSLPDIQGPAAAPPLPEPSLTDTQVQKLTPSLEQKSLIDAHVPAATPLPERGGSLDIQGLSPTPVQTTMVLSKPGGSLASHVARLESSDLTPPHSPPPSSRQLLGPNAAALSRYLAASYISQSLARRQGPGGGAPAASRGSWSSAPTSRASSPPPQPQPPPPPARRLSYATTVNIHVGGGGRLRPAKAQVRLNHPALLASTQESMGLHRAQGAPDAPFHM

SEQ ID NO: 1501 - protein, 542 aa, Homo sapiens
MVTEVCSMPAASAVKKPFDLRSKMGKWFHHRFPCCKGSGKSNMGTSGDHDDSFMKMLRSKMGKCCHHCFPCCRGSGTSNVGTSGDHDNSFMKTLRSKMGKWCCHCFPCCRGSGKSNVGAWGDYDDSAFMEPRYHVRREDLDKLHRAAWWGKVPRKDLIVMLRDTDMNKRDKQKRTALHLASANGNSEVVQLLLDRRCQLNVLDNKKRTALIKAVQCQEDECVLMLLEHGADQNIPDEYGNTTLHYAVHNEDKLMAKALLLYGADIESKNKCGLTPLLLGVHEQKQQVVKFLIKKKANLNALDRYGRTALILAVCCGSASIVNLLLEQNVDVSSQDLSGQTAREYAVSSHHHVICELLSDYKEKQMLKISSENSNPEQDLKLTSEEESQRLKVSENSQPEKMSQEPEINKDCDREVEEEIKKHGSNPVGLPENLTNGASAGNGDDGLIPQRRSRKPENQQFPDTENEEYHSDEQNDTRKQLSEEQNTGISQDEILTNKQKQIEVAEKKMNSELSLSHKKEEDLLRENSMLQEEIAMLISGDWN

SEQ ID NO: 1502 - protein, 311 aa, Homo sapiens
MQNYKYDKAIVPESKNGGSPALNNNPRRSGSKRVLLICLDLFCLFMAGLPFLIIETSTIKPYHRGFYCNDESIKYPLKTGETINDAVLCAVGIVIAILAIITGEFYRIYYLKKSRSTIQNPYVAALYKQVGCFLFGCAISQSFTDIAKVSIGRLRPHFLSVCNPDFSQINCSEGYIQNYRCRGDDSKVQEARKSFFSGHASFSMYTMLYLVLYLQARFTWRGARLLRPLLQFTLIMMAFYTGLSRVSDHKHHPSDVLAGFAQGALVACCIVFFVSDLFKTKTTLSLPAPAIRKEILSPVDIIDRNNHHNMM

SEQ ID NO: 1503 - protein, 1219 aa, Homo sapiens
MPVSTSLHQDGSQERPVSLTSTTSSSGSSCDSRSAMEEPSSSEAPAKNGAGSLRSRHLPNSNNNSSSWLNVKGPLSPFNSRAAAGPAHHKLSYLGRVVREIVETERMYVQDLRSIVEDYLLKIIDTPGLLKPEQVSALFGNIENIYALNSQLLRDLDSCNSDPVAVASCFVERSQEFDIYTQYCNNYPNSVAALTECMRDKQQAKFFRDRQELLQHSLPLGSYLLKPVQRILKYHLLLQEIAKHFDEEEDGFEVVEDAIDTMTCVAWYINDMKRRHEHAVRLQEIQSLLINWKGPDLTTYGELVLEGTFRVHRVRNERTFFLFDKTLLITKKRGDHFVYKGNIPCSSLMLIESTRDSLCFTVTHYKHSKQQYSIQAKTVEEKRNWTHHIKRLILENHHATIPQKAKEAILEMDSYYPNRYRCSPERLKKAWSSQDEVSTNVRQGRRQSEPTKHLLRQLNEKARAAGMKGKGRRESESSRSSRRPSGRSPTSTEKRMSFESISSLPEVEPDPEAGSEQEVFSAVEGPSAEETPSDTESPEVLETQLDAHQGLLGMDPPGDMVDFVAAESTEDLKALSSEEEEEMGGAAQEPESLLPPSVLDQASVIAERFVSSFSRRSSVAQEDSKSSGFGSPRLVSRSSSVLSLEGSEKGLARHGSATDSLSCQLSPEVDISVGVATEDSPSVNGMEPPSPGCPVEPDRSSCKKKESALSTRDRLLLDKIKSYYENAEHHDAGFSVRRRESLSYIPKGLVRNSISRFNSLPRPDPEPVPPVGSKRQVGSRPTSWALFELPGPSQAVKGDPPPISDAEFRPSSEIVKIWEGMESSGGSPGKGPGQGQANGFDLHEPLFILEEHELGAITEESATASPESSSPTEGRSPAHLARELKELVKELSSSTQGELVAPLHPRIVQLSHVMDSHVSERVKNKVYQLARQYSLRIKSNKPVMARPPLQWEKVAPERDGKSPTVPCLQEEAGEPLGGKGKRKPVLSLFDYEQLMAQEHSPPKPSSAGEMSPQRFFFNPSAVSQRTTSPGGRPSARSPLSPTETFSWPDVRELCSKYASRDEARRAGGGRPRGPPVNRSHSVPENMVEPPLSGRVGRCRSLSTKRGRGGGEAAQSPGPLPQSKPDGGETLYVTADLTLEDNRRVIVMEKGPLPSPTAGLEESSGQGPSSPVALLGQVQDFQQSAECQPKEEGSRDPADPSQQGRVRNLREKFQALNSVG

SEQ ID NO: 1504 - protein, 752 aa, Homo sapiens
MGKGRRESESSRSSRRPSGRSPTSTEKRMSFESISSLPEVEPDPEAGSEQEVFSAVEGPSAEETPSDTESPEVLETQLDAHQGLLGMDPPGDMVDFVAAESTEDLKALSSEEEEEMGGAAQEPESLLPPSVLDQASVIAERFVSSFSRRSSVAQEDSKSSGFGSPRLVSRSSSVLSLEGSEKGLARHGSATDSLSCQLSPEVDISVGVATEDSPSVNGMEPPSPGCPVEPDRSSCKKKESALSTRDRLLLDKIKSYYENAEHHDAGFSVRRRESLSYIPKGLVRNSISRFNSLPRPDPEPVPPVGSKRQVGSRPTSWALFELPGPSQAVKGDPPPISDAEFRPSSEIVKIWEGMESSGGSPGKGPGQGQANGFDLHEPLFILEEHELGAITEESATASPESSSPTEGRSPAHLARELKELVKELSSSTQGELVAPLHPRIVQLSHVMDSHVSERVKNKVYQLARQYSLRIKSNKPVMARPPLQWEKVAPERDGKSPTVPCLQEEAGEPLGGKGKRKPVLSLFDYEQLMAQEHSPPKPSSAGEMSPQRFFFNPSAVSQRTTSPGGRPSARSPLSPTETFSWPDVRELCSKYASRDEARRAGGGRPRGPPVNRSHSVPENMVEPPLSGRVGRCRSLSTKRGRGGGEAAQSPGPLPQSKPDGGETLYVTADLTLEDNRRVIVMEKGPLPSPTAGLEESSGQGPSSPVALLGQVQDFQQSAECQPKEEGSRDPADPSQQGRVRNLREKFQALNSVG

SEQ ID NO: 1505 - protein, 1163 aa, Homo sapiens
MPVSTSLHQDGSQERPVSLTSTTSSSGSSCDSRSAMEEPSSSEAPAKNGAGSLRSRHLPNSNNNSSSWLNVKGPLSPFNSRAAAGPAHHKLSYLGRVVREIVETERMYVQDLRSIVESQEFDIYTQYCNNYPNSVAALTECMRDKQQAKFFRDRQELLQHSLPLGSYLLKPVQRILKYHLLLQEIAKHFDEEEDGFEVVEDAIDTMTCVAWYINDMKRRHEHAVRLQEIQSLLINWKGPDLTTYGELVLEGTFRVHRVRNERTFFLFDKTLLITKKRGDHFVYKGNIPCSSLMLIESTRDSLCFTVTHYKHSKQQYSIQAKTVEEKRNWTHHIKRLILENHHATIPQKAKEAILEMDSYYPNRYRCSPERLKKAWSSQDEVSTNVRQGRRQSEPTKHLLRQLNEKARAAGMKGKGRRESESSRSSRRPSGRSPTSTEKRMSFESISSLPEVEPDPEAGSEQEVFSAVEGPSAEETPSDTESPEVLETQLDAHQGLLGMDPPGDMVDFVAAESTEDLKALSSEEEEEMGGAAQEPESLLPPSVLDQASVIAERFVSSFSRRSSVAQEDSKSSGFGSPRLVSRSSSVLSLEGSEKGLARHGSATDSLSCQLSPEVDISVGVATEDSPSVNGMEPPSPGCPVEPDRSSCKKKESALSTRDRLLLDKIKSYYENAEHHDAGFSVRRRESLSYIPKGLVRNSISRFNSLPRPDPEPVPPVGSKRQVGSRPTSWALFELPGPSQAVKGDPPPISDAEFRPSSEIVKIWEGMESSGGSPGKGPGQGQANGFDLHEPLFILEEHELGAITEESATASPESSSPTEGRSPAHLARELKELVKELSSSTQGELVAPLHPRIVQLSHVMDSHVSERVKNKVYQLARQYSLRIKSNKPVMARPPLQWEKVAPERDGKSPTVPCLQEEAGEPLGGKGKRKPVLSLFDYEQLMAQEHSPPKPSSAGEMSPQRFFFNPSAVSQRTTSPGGRPSARSPLSPTETFSWPDVRELCSKYASRDEARRAGGGRPRGPPVNRSHSVPENMVEPPLSGRVGRCRSLSTKRGRGGGEAAQSPGPLPQSKPDGGETLYVTADLTLEDNRRVIVMEKGPLPSPTAGLEESSGQGPSSPVALLGQVQDFQQSAECQPKEEGSRDPADPSQQGRVRNLREKFQALNSVG

SEQ ID NO: 1506 - protein, 407 aa, Homo sapiens
MAAPCAEDPSLERHFKGHRDAVTCVDFSINTKQLASGSMDSCLMVWHMKPQSRAYRFTGHKDAVTCVNFSPSGHLLASGSRDKTVRIWVPNVKGESTVFRAHTATVRSVHFCSDGQSFVTASDDKTVKVWATHRQKFLFSLSQHINWVRCAKFSPDGRLIVSASDDKTVKLWDKSSRECVHSYCEHGGFVTYVDFHPSGTCIAAAGMDNTVKVWDVRTHRLLQHYQLHSAAVNGLSFHPSGNYLITASSDSTLKILDLMEGRLLYTLHGHQGPATTVAFSRTGEYFASGGSDEQVMVWKSNFDIVDHGEVTKVPRPPATLASSMGNLPEVDFPVPPGRGRSVESVQSQPQEPVSVPQTLTSTLEHIVGQLDVLTQTVSILEQRLTLTEDKLKQCLENQQLIMQRATP

SEQ ID NO: 1507 - protein, 359 aa, Homo sapiens
MAAPCAEDPSLERHFKGHRDAVTCVDFSINTKQLASGSMDSCLMVWHMKPQSRAYRFTGHKDAVTCVNFSPSGHLLASGSRDKTVRIWVPNVKGESTVFRAHTATVRSVHFCSDGQSFVTASDDKTVKVWATHRQKFLFSLSQHINWVRCAKFSPDGRLIVSASDDKTVKLWDKSSRECVHSYCEHGGFVTYVDFHPSGTCIAAAGMDNTVKVWDVRTHRLLQHYQLHSAAVNGLSFHPSGNYLITASSDSTLKILDLMEGRLLYTLHGHQGPATTVAFSRTGEYFASGGSDEQVMVWKSNFDIVDHGEVTKVPRPPATLASSMGNLTVSILEQRLTLTEDKLKQCLENQQLIMQRATP

SEQ ID NO: 1508 - protein, 369 aa, Homo sapiens
MDSCLMVWHMKPQSRAYRFTGHKDAVTCVNFSPSGHLLASGSRDKTVRIWVPNVKGESTVFRAHTATVRSVHFCSDGQSFVTASDDKTVKVWATHRQKFLFSLSQHINWVRCAKFSPDGRLIVSASDDKTVKLWDKSSRECVHSYCEHGGFVTYVDFHPSGTCIAAAGMDNTVKVWDVRTHRLLQHYQLHSAAVNGLSFHPSGNYLITASSDSTLKILDLMEGRLLYTLHGHQGPATTVAFSRTGEYFASGGSDEQVMVWKSNFDIVDHGEVTKVPRPPATLASSMGNLPEVDFPVPPGRGRSVESVQSQPQEPVSVPQTLTSTLEHIVGQLDVLTQTVSILEQRLTLTEDKLKQCLENQQLIMQRATP

SEQ ID NO: 1509 - protein, 409 aa, Homo sapiens
MMKKNNSAKRGPQDGNQQPAPPEKVGWVRKFCGKGIFREIWKNRYVVLKGDQLYISEKEVKDEKNIQEVFDLSDYEKCEELRKSKSRSKKNHSKFTLAHSKQPGNTAPNLIFLAVSPEEKESWINALNSAITRAKNRILDEVTVEEDSYLAHPTRDRAKIQHSRRPPTRGHLMAVASTSTSDGMLTLDLIQEEDPSPEEPTSCAESFRVDLDKSVAQLAGSRRRADSDRIQPSADRASSLSRPWEKTDKGATYTPQAPKKLTPTEKGRCASLEEILSQRDAASARTLQLRAEEPPTPALPNPGQLSRIQDLVARKLEETQELLAEVQGLGDGKRKAKDPPRSPPDSESEQLLLETERLLGEASSNWSQAKRVLQEVRELRDLYRQMDLQTPDSHLRQTTPHSQYRKSLM

SEQ ID NO: 1510 - protein, 375 aa, Homo sapiens
MMKKNNSAKRGPQDGNQQPAPPEKVGWVRKFCGKGIFREIWKNRYVVLKGDQLYISEKEVKDEKNIQEVFDLSDYEKCEELRKSKSRSKKNHSKFTLAHSKQPGNTAPNLIFLAVSPEEKESWINALNSAITRAKNRILDEASTSTSDGMLTLDLIQEEDPSPEEPTSCAESFRVDLDKSVAQLAGSRRRADSDRIQPSADRASSLSRPWEKTDKGATYTPQAPKKLTPTEKGRCASLEEILSQRDAASARTLQLRAEEPPTPALPNPGQLSRIQDLVARKLEETQELLAEVQGLGDGKRKAKDPPRSPPDSESEQLLLETERLLGEASSNWSQAKRVLQEVRELRDLYRQMDLQTPDSHLRQTTPHSQYRKSLM

SEQ ID NO: 1511 - protein, 158 aa, Homo sapiens
MVPRSTSLTLIVFLFHRLSKAPGKMVENSPSPLPERAIYGFVLFLSSQFGFILYLVWAFIPESWLNSLGLTYWPQKYWAVALPVYLLIAIVIGYVLLFGINMMSTSPLDSIHTITDNYAKNQQQKKYQEEAIPALRDISISEVNQMFFLAAKELYTKN

SEQ ID NO: 1512 - protein, 134 aa, Homo sapiens
MVENSPSPLPERAIYGFVLFLSSQFGFILYLVWAFIPESWLNSLGLTYWPQKYWAVALPVYLLIAIVIGYVLLFGINMMSTSPLDSIHTITDNYAKNQQQKKYQEEAIPALRDISISEVNQMFFLAAKELYTKN

SEQ ID NO: 1513 - protein, 108 aa, Homo sapiens
MVLYLVWAFIPESWLNSLGLTYWPQKYWAVALPVYLLIAIVIGYVLLFGINMMSTSPLDSIHTITDNYAKNQQQKKYQEEAIPALRDISISEVNQMFFLAAKELYTKN

SEQ ID NO: 1514 - protein, 579 aa, Homo sapiens
MLRSGPASGPSVPTGRAMPSRRVARPPAAPELGALGSPDLSSLSLAVSRSTDELEIIDEYIKENGFGLDGGQPGPGEGLPRLVSRGAASLSTVTLGPVAPPATPPPWGCPLGRLVSPAPGPGPQPHLVITEQPKQRGMRFRYECEGRSAGSILGESSTEASKTLPAIELRDCGGLREVEVTACLVWKDWPHRVHPHSLVGKDCTDGICRVRLRPHVSPRHSFNNLGIQCVRKKEIEAAIERKIQLGIDPYNAGSLKNHQEVDMNVVRICFQASYRDQQGQMRRMDPVLSEPVYDKKSTNTSELRICRINKESGPCTGGEELYLLCDKVQKEDISVVFSRASWEGRADFSQADVHRQIAIVFKTPPYEDLEIVEPVTVNVFLQRLTDGVCSEPLPFTYLPRDHDSYGVDKKRKRGMPDVLGELNSSDPHGIESKRRKKKPAILDHFLPNHGSGPFLPPSALLPDPDFFSGTVSLPGLEPPGGPDLLDDGFAYDPTAPTLFTMLDLLPPAPPHASAVVCSGGAGAVVGETPGPEPLTLDSYQAPGPGDGGTASLVGSNMFPNHYREAAFGGGLLSPGPEAT

SEQ ID NO: 1515 - protein, 785 aa, Homo sapiens
MASKVTDAIVWYQKKEFLSVATTAPGPQQVLPGYCQCSLKDQGLFIQCLIGAYDQQIWEKSVEQREIKFIKLGLRNKPKKTAHVKPDLIDVDLVRGSAFAKAKPESPWTSLTRKGIVRVVFFPFFFRWWLQVTSKVIFFWLLVLYLLQVAAIVLFCSTSSPHSIPLTEVIGPIWLMLLLGTVHCQIVSTRTPKPPLSTGGKRRRKLRKAAHLEVHREGDGSSTTDNTQEGAVQNHGTSTSHSVGTVFRDLWHAAFFLSGSKKAKNSIDKSTETDNGYVSLDGKKTVKSGEDGIQNHEPQCETIRPEETAWNTGTLRNGPSKDTQRTITNVSDEVSSEEGPETGYSLRRHVDRTSEGVLRNRKSHHYKKHYPNEDAPKSGTSCSSRCSSSRQDSESARPESETEDVLWEDLLHCAECHSSCTSETDVENHQINPCVKKEYRDDPFHQSHLPWLHSSHPGLEKISAIVWEGNDCKKADMSVLEISGMIMNRVNSHIPGIGYQIFGNAVSLILGLTPFVFRLSQATDLEQLTAHSASELYVIAFGSNEDVIVLSMVIISFVVRVSLVWIFFFLLCVAERTYKQRLLFAKLFGHLTSARRARKSEVPHFRLKKVQNIKMWLSLRSYLKRRGPQRSVDVIVSSAFLLTISVVFICCAQLLHVHEIFLDCHYNWELVIWCISLTLFLLRFVTLGSETSKKYSNTSILLTEQINLYLKMEKKPNKKEELTLVNNVLKLATKLLKELDSPFRLYGLTMNPLLYNITQVVILSAVSGVISDLLGFNLKLWKIKS

SEQ ID NO: 1516 - protein, 751 aa, Homo sapiens
MASKVTDAIVWYQKKIGAYDQQIWEKSVEQREIKFIKLGLRNKPKKTAHVKPDLIDVDLVRGSAFAKAKPESPWTSLTRKGIVRVVFFPFFFRWWLQVTSKVIFFWLLVLYLLQVAAIVLFCSTSSPHSIPLTEVIGPIWLMLLLGTVHCQIVSTRTPKPPLSTGGKRRRKLRKAAHLEVHREGDGSSTTDNTQEGAVQNHGTSTSHSVGTVFRDLWHAAFFLSGSKKAKNSIDKSTETDNGYVSLDGKKTVKSGEDGIQNHEPQCETIRPEETAWNTGTLRNGPSKDTQRTITNVSDEVSSEEGPETGYSLRRHVDRTSEGVLRNRKSHHYKKHYPNEDAPKSGTSCSSRCSSSRQDSESARPESETEDVLWEDLLHCAECHSSCTSETDVENHQINPCVKKEYRDDPFHQSHLPWLHSSHPGLEKISAIVWEGNDCKKADMSVLEISGMIMNRVNSHIPGIGYQIFGNAVSLILGLTPFVFRLSQATDLEQLTAHSASELYVIAFGSNEDVIVLSMVIISFVVRVSLVWIFFFLLCVAERTYKQRLLFAKLFGHLTSARRARKSEVPHFRLKKVQNIKMWLSLRSYLKRRGPQRSVDVIVSSAFLLTISVVFICCAQLLHVHEIFLDCHYNWELVIWCISLTLFLLRFVTLGSETSKKYSNTSILLTEQINLYLKMEKKPNKKEELTLVNNVLKLATKLLKELDSPFRLYGLTMNPLLYNITQVVILSAVSGVISDLLGFNLKLWKIKS

SEQ ID NO: 1517 - protein, 747 aa, Homo sapiens
MASKVTDAIVWYQKKIGAYDQQIWEKSVEQREIKGLRNKPKKTAHVKPDLIDVDLVRGSAFAKAKPESPWTSLTRKGIVRVVFFPFFFRWWLQVTSKVIFFWLLVLYLLQVAAIVLFCSTSSPHSIPLTEVIGPIWLMLLLGTVHCQIVSTRTPKPPLSTGGKRRRKLRKAAHLEVHREGDGSSTTDNTQEGAVQNHGTSTSHSVGTVFRDLWHAAFFLSGSKKAKNSIDKSTETDNGYVSLDGKKTVKSGEDGIQNHEPQCETIRPEETAWNTGTLRNGPSKDTQRTITNVSDEVSSEEGPETGYSLRRHVDRTSEGVLRNRKSHHYKKHYPNEDAPKSGTSCSSRCSSSRQDSESARPESETEDVLWEDLLHCAECHSSCTSETDVENHQINPCVKKEYRDDPFHQSHLPWLHSSHPGLEKISAIVWEGNDCKKADMSVLEISGMIMNRVNSHIPGIGYQIFGNAVSLILGLTPFVFRLSQATDLEQLTAHSASELYVIAFGSNEDVIVLSMVIISFVVRVSLVWIFFFLLCVAERTYKQRLLFAKLFGHLTSARRARKSEVPHFRLKKVQNIKMWLSLRSYLKRRGPQRSVDVIVSSAFLLTISVVFICCAQLLHVHEIFLDCHYNWELVIWCISLTLFLLRFVTLGSETSKKYSNTSILLTEQINLYLKMEKKPNKKEELTLVNNVLKLATKLLKELDSPFRLYGLTMNPLLYNITQVVILSAVSGVISDLLGFNLKLWKIKS

SEQ ID NO: 1518 - protein, 695 aa, Homo sapiens
MASKVTDAIVWYQKKIGAYDQQIWEKSVEQREIKGLRNKPKKTAHVKPDLIDVDLVRGSAFAKAKPESPWTSLTRKGIVRVVFFPFFFRWWLQVTSKVIFFWLLVLYLLQVAAIVLFCSTSSPHSIPLTEVIGPIWLMLLLGTVHCQIVSTRTPKPPLSTGGKRRRKLRKAAHLEVHREGDGSSTTDNTQEGAVQNHGTSTSHSVGTVFRDLWHAAFFLSGSKKAKNSIDKSTETDNGYVSLDGKKTVKSGEDGIQNHEPQCETIRPEETAWNTGTLRNGPSKDTQRTITNVSDEVSSEEGPETGYSLRRHVDRTSEGVLRNRKSHHYKKHYPNEDAPKSGTSCSSRCSSSRQDSESARPESETEDVLWEDLLHCAECHSSCTSETDVENHQINPCVKKEYRDDPFHQSHLPWLHSSHPGLEKISAIVWEGNDCKKADMSVLEISGMIMNRVNSHIPGIGYQIFGNAVSLILGLTPFVFRLSQATDLEQLTAHSASELYVIAFGSNEDVIVLSMVIISFVVRVSLVWIFFFLLCVAERTYKQRLLFAKLFGHLTSARRARKSEVPHFRLKKVQNIKMWLSLRSYLKRRGPQRSVDVIVSSAFLLTISVVFICCAQINLYLKMEKKPNKKEELTLVNNVLKLATKLLKELDSPFRLYGLTMNPLLYNITQVVILSAVSGVISDLLGFNLKLWKIKS

SEQ ID NO: 1519 - protein, 356 aa, Homo sapiens
MASKVTDAIVWYQKKIGAYDQQIWEKSVEQREIKFIKLGLRNKPKKTAHVKPDLIDVDLVRGSAFAKAKPESPWTSLTRKGIVRVVFFPFFFRWWLQVTSKVIFFWLLVLYLLQVAAIVLFCSTSSPHSIPLTEVIGPIWLMLLLGTVHCQIVSTRTPKPPLSTGGKRRRKLRKAAHLEVHREGDGSSTTDNTQEGAVQNHGTSTSHSVGTVFRDLWHAAFFLSGSKKAKNSIDKSTETDNGYVSLDGKKTVKSGEDGIQNHEPQCETIRPEETAWNTGTLRNGPSKDTQRTITNVSDEVSSEEGPETGYSLRRHVDRTSEGVLRNRKSHHYKKHYPNEVYTLSLSVYIRIYFICY

SEQ ID NO: 1520 - protein, 352 aa, Homo sapiens
MASKVTDAIVWYQKKIGAYDQQIWEKSVEQREIKGLRNKPKKTAHVKPDLIDVDLVRGSAFAKAKPESPWTSLTRKGIVRVVFFPFFFRWWLQVTSKVIFFWLLVLYLLQVAAIVLFCSTSSPHSIPLTEVIGPIWLMLLLGTVHCQIVSTRTPKPPLSTGGKRRRKLRKAAHLEVHREGDGSSTTDNTQEGAVQNHGTSTSHSVGTVFRDLWHAAFFLSGSKKAKNSIDKSTETDNGYVSLDGKKTVKSGEDGIQNHEPQCETIRPEETAWNTGTLRNGPSKDTQRTITNVSDEVSSEEGPETGYSLRRHVDRTSEGVLRNRKSHHYKKHYPNEVYTLSLSVYIRIYFICY

SEQ ID NO: 1521 - protein, 546 aa, Homo sapiens
MASKVTDAIVWYQKKIGAYDQQIWEKSVEQREIKGLRNKPKKTAHVKPDLIDVDLVRGSAFAKAKPESPWTSLTRKGIVRVVFFPFFFRWWLQVTSKVIFFWLLVLYLLQVAAIVLFCSTSSPHSIPLTEVIGPIWLMLLLGTVHCQIVSTRTPKPPLSTGGKRRRKLRKAAHLEVHREGDGSSTTDNTQEGAVQNHGTSTSHSVGTVFRDLWHAAFFLSGSKKAKNSIDKSTETDNGYVSLDGKKTVKSGEDGIQNHEPQCETIRPEETAWNTGTLRNGPSKDTQRTITNVSDEVSSEEGPETGYSLRRHVDRTSEGVLRNRKSHHYKKHYPNEDAPKSGTSCSSRCSSSRQDSESARPESETEDVLWEDLLHCAECHSSCTSETDVENHQINPCVKKEYRDDPFHQSHLPWLHSSHPGLEKISAIVWEGNDCKKADMSVLEISGMIMNRVNSHIPGIGYQIFGNAVSLILGLTPFVFRLSQATDLEQLTAHSASELYVIAFGSNEDVIVLSMVIISFVVRVSLVWIFFFLLCVAERTYKQVGIM

SEQ ID NO: 1522 - protein, 764 aa, Homo sapiens
MLLFVLTCLLAVFPAISTKSPIFGPEEVNSVEGNSVSITCYYPPTSVNRHTRKYWCRQGARGGCITLISSEGYVSSKYAGRANLTNFPENGTFVVNIAQLSQDDSGRYKCGLGINSRGLSFDVSLEVSQGPGLLNDTKVYTVDLGRTVTINCPFKTENAQKRKSLYKQIGLYPVLVIDSSGYVNPNYTGRIRLDIQGTGQLLFSVVINQLRLSDAGQYLCQAGDDSNSNKKNADLQVLKPEPELVYEDLRGSVTFHCALGPEVANVAKFLCRQSSGENCDVVVNTLGKRAPAFEGRILLNPQDKDGSFSVVITGLRKEDAGRYLCGAHSDGQLQEGSPIQAWQLFVNEESTIPRSPTVVKGVAGGSVAVLCPYNRKESKSIKYWCLWEGAQNGRCPLLVDSEGWVKAQYEGRLSLLEEPGNGTFTVILNQLTSRDAGFYWCLTNGDTLWRTTVEIKIIEGEPNLKVPGNVTAVLGETLKVPCHFPCKFSSYEKYWCKWNNTGCQALPSQDEGPSKAFVNCDENSRLVSLTLNLVTRADEGWYWCGVKQGHFYGETAAVYVAVEERKAAGSRDVSLAKADAAPDEKVLDSGFREIENKAIQDPRLFAEEKAVADTRDQADGSRASVDSGSSEEQGGSSRALVSTLVPLGLVLAVGAVAVGVARARHRKNVDRVSIRSYRTDISMSDFENSREFGANDNMGASSITQETSLGGKEEFVATTESTTETKEPKKAKRSSKEEAEMAYKDFLLQSSTVAAEAQDGPQEA

SEQ ID NO: 1523 - protein, 723 aa, Homo sapiens
MQNSEGGADSPASVALRPSAAAPPVPASPQRVLVQAASSNPKGAQMQPISLPRVQQVPQQVQPVQHVYPAQVQYVEGGDAVYTNGAIRTAYTYNPEPQMYAPSSTASYFEAPGGAQVTVAASSPPAVPSHSMVGITMDVGGSPIVSSAGAYLIHGGMDSTRHSLAHTSRSSPATLEMAIENLQKSEGITSHKSGLLNSHLQWLLDNYETAEGVSLPRSSLYNHYLRHCQEHKLDPVNAASFGKLIRSVFMGLRTRRLGTRGNSKYHYYGIRLKPDSPLNRLQEDTQYMAMRQQPMHQKPRYRPAQKTDSLGDSGSHSGLHSTPEQTMAVQSQHHQQYIDVSHVFPEFPAPDLGSFLLQDGVTLHDVKALQLVYRRHCEATVDVVMNLQFHYIEKLWLSFWNSKASSSDGPTSLPASDEDPEGAVLPKDKLISLCQCDPILRWMRSCDHILYQALVEILIPDVLRPVPSTLTQAIRNFAKSLEGWLTNAMSDFPQQVIQTKVGVVSAFAQTLRRYTSLNHLAQAARAVLQNTSQINQMLSDLNRVDFANVQEQASWVCQCEESVVQRLEQDFKLTLQQQSSLDQWASWLDSVVTQVLKQHAGSPSFPKAARQFLLKWSFYSSMVIRDLTLRSAASFGSFHLIRLLYDEYMFYLVEHRVAEATGETPIAVMGEFNDLASLSLTLLDKDDMGDEQRGSEAGPDARSLGEPLVKRERSDPNHSLQGI

SEQ ID NO: 1524 - protein, 698 aa, Homo sapiens
MQNSEGGADSPASVALRPSAAAPPVPASPQRVLVQAASSNPKGAQMQPISLPRVQQVPQQVQPVQHVYPAQVQYVEGGDAVYTNGAIRTAYTYNPEPQMYAPSSTASYFEAPGGAQVTVAASSPPAVPSHSMVGITMDVGGSPIVSSAGAYLIHGGMDSTRHSLAHTSRSSPATLQWLLDNYETAEGVSLPRSSLYNHYLRHCQEHKLDPVNAASFGKLIRSVFMGLRTRRLGTRGNSKYHYYGIRLKPDSPLNRLQEDTQYMAMRQQPMHQKPRYRPAQKTDSLGDSGSHSGLHSTPEQTMAVQSQHHQQYIDVSHVFPEFPAPDLGSFLLQDGVTLHDVKALQLVYRRHCEATVDVVMNLQFHYIEKLWLSFWNSKASSSDGPTSLPASDEDPEGAVLPKDKLISLCQCDPILRWMRSCDHILYQALVEILIPDVLRPVPSTLTQAIRNFAKSLEGWLTNAMSDFPQQVIQTKVGVVSAFAQTLRRYTSLNHLAQAARAVLQNTSQINQMLSDLNRVDFANVQEQASWVCQCEESVVQRLEQDFKLTLQQQSSLDQWASWLDSVVTQVLKQHAGSPSFPKAARQFLLKWSFYSSMVIRDLTLRSAASFGSFHLIRLLYDEYMFYLVEHRVAEATGETPIAVMGEFNDLASLSLTLLDKDDMGDEQRGSEAGPDARSLGEPLVKRERSDPNHSLQGI

SEQ ID NO: 1525 - protein, 340 aa, Homo sapiens
METSALKQQEQPAATKIRNLPWVEKYRPQTLNDLISHQDILSTIQKFINEDRLPHLLLYGPPGTGKTSTILACAKQLYKDKEFGSMVLELNASDDRGIDIIRGPILSFASTRTIFKKGFKLVILDEADAMTQDAQNALRRVIEKFTENTRFCLICNYLSKIIPALQSRCTRFRFGPLTPELMVPRLEHVVEEEKVDISEDGMKALVTLSSGDMRRALNILQSTNMAFGKVTEETVYTCTGHPLKSDIANILDWMLNQDFTTAYRNITELKTLKGLALHDILTEIHLFVHRVDFPSSVRIHLLTKMADIEYRLSVGTNEKIQLSSLIAAFQVTRDLIVAEA

SEQ ID NO: 1526 - protein, 319 aa, Homo sapiens
MVEKYRPQTLNDLISHQDILSTIQKFINEDRLPHLLLYGPPGTGKTSTILACAKQLYKDKEFGSMVLELNASDDRGIDIIRGPILSFASTRTIFKKGFKLVILDEADAMTQDAQNALRRVIEKFTENTRFCLICNYLSKIIPALQSRCTRFRFGPLTPELMVPRLEHVVEEEKVDISEDGMKALVTLSSGDMRRALNILQSTNMAFGKVTEETVYTCTGHPLKSDIANILDWMLNQDFTTAYRNITELKTLKGLALHDILTEIHLFVHRVDFPSSVRIHLLTKMADIEYRLSVGTNEKIQLSSLIAAFQVTRDLIVAEA

SEQ ID NO: 1527 - protein, 619 aa, Homo sapiens
MASGAYNPYIEIIEQPRQRGMRFRYKCEGRSAGSIPGEHSTDNNRTYPSIQIMNYYGKGKVRITLVTKNDPYKPHPHDLVGKDCRDGYYEAEFGQERRPLFFQNLGIRCVKKKEVKEAIITRIKAGINPFNVPEKQLNDIEDCDLNVVRLCFQVFLPDEHGNLTTALPPVVSNPIYDNRAPNTAELRICRVNKNCGSVRGGDEIFLLCDKVQKDDIEVRFVLNDWEAKGIFSQADVHRQVAIVFKTPPYCKAITEPVTVKMQLRRPSDQEVSESMDFRYLPDEKDTYGNKAKKQKTTLLFQKLCQDHVETGFRHVDQDGLELLTSGDPPTLASQSAGITVNFPERPRPGLLGSIGEGRYFKKEPNLFSHDAVVREMPTGVSSQAESYYPSPGPISSGLSHHASMAPLPSSSWSSVAHPTPRSGNTNPLSSFSTRTLPSNSQGIPPFLRIPVGNDLNASNACIYNNADDIVGMEASSMPSADLYGISDPNMLSNCSVNMMTTSSDSMGETDNPRLLSMNLENPSCNSVLDPRDLRQLHQMSSSSMSAGANSNTTVFVSQSDAFEGSDFSCADNSMINESGPSNSTNPNSHGFVQDSQYSGIGSMQNEQLSDSFPYEFFQV

SEQ ID NO: 1528 - protein, 587 aa, Homo sapiens
MASGAYNPYIEIIEQPRQRGMRFRYKCEGRSAGSIPGEHSTDNNRTYPSIQIMNYYGKGKVRITLVTKNDPYKPHPHDLVGKDCRDGYYEAEFGQERRPLFFQNLGIRCVKKKEVKEAIITRIKAGINPFNVPEKQLNDIEDCDLNVVRLCFQVFLPDEHGNLTTALPPVVSNPIYDNRAPNTAELRICRVNKNCGSVRGGDEIFLLCDKVQKDDIEVRFVLNDWEAKGIFSQADVHRQVAIVFKTPPYCKAITEPVTVKMQLRRPSDQEVSESMDFRYLPDEKDTYGNKAKKQKTTLLFQKLCQDHVNFPERPRPGLLGSIGEGRYFKKEPNLFSHDAVVREMPTGVSSQAESYYPSPGPISSGLSHHASMAPLPSSSWSSVAHPTPRSGNTNPLSSFSTRTLPSNSQGIPPFLRIPVGNDLNASNACIYNNADDIVGMEASSMPSADLYGISDPNMLSNCSVNMMTTSSDSMGETDNPRLLSMNLENPSCNSVLDPRDLRQLHQMSSSSMSAGANSNTTVFVSQSDAFEGSDFSCADNSMINESGPSNSTNPNSHGFVQDSQYSGIGSMQNEQLSDSFPYEFFQV

SEQ ID NO: 1529 - protein, 1423 aa, Homo sapiens
MYFLSGWPKRLLCPLGSPAEAPFHVQSDPQRAFFAVLAAARLSIWYSRPSVLIVTYKEPAKSSTQFGSYKQAEWRPDSTMIAVSTANGYILFFHITSTRGDKYLYEPVYPKGSPQMKGTPHFKEEQCAPALNLEMRKILDLQAPIMSLQSVLEDLLVATSDGLLHLIHWEGMTNGRKAINLCTVPFSVDLQSSRVGSFLGFTDVHIRDMEYCATLDGFAVVFNDGKVGFITPVSSRFTAEQLHGVWPQDVVDGTCVAVNNKYRLMAFGCVSGSVQVYTIDNSTGAMLLSHKLELTAKQYPDIWNKTGAVKLMRWSPDNSVVIVTWEYGGLSLWSVFGAQLICTLGGDFAYRSDGTKKDPLKINSMSWGAEGYHLWVISGFGSQNTEIESDLRSVVKQPSILLFQFIKSVLTVNPCMSNQEQVLLQGEDRLYLNCGEASQTQNPRSSSTHSEHKPSREKSPFADGGLESQGLSTLLGHRHWHVVQISSTYLESNWPIRFSAIDKLGQNIAVVGKFGFAHYSLLTKKWKLFGNITQEQNMIVTGGLAWWNDFMVLACYNINDRQEELRVYLRTSNLDNAFAHVTKAQAETLLLSVFQDMVIVFRADCSICLYSIERKSDGPNTTAGIQVLQEVSMSRYIPHPFLVVSVTLTSVSTENGITLKMPQQARGAESIMLNLAGQLIMMQRDRSGPQIREKDSNPNNQRKLLPFCPPVVLAQSVENVWTTCRANKQKRHLLEALWLSCGGAGMKVWLPLFPRDHRKPHSFLSQRIMLPFHINIYPLAVLFEDALVLGAVNDTLLYDSLYTRNNAREQLEVLFPFCVVERTSQIYLHHILRQLLVRNLGEQALLLAQSCATLPYFPHVLELMLHEVLEEEATSREPIPDPLLPTVAKFITEFPLFLQTVVHCARKTEYALWNYLFAAVGNPKDLFEECLMAQDLDTAASYLIILQNMEVPAVSRQHATLLFNTALEQGKWDLCRHMIRFLKAIGSGESETPPSTPTAQEPSSSGGFEFFRNRSISLSQSAENVPASKFSLQKTLSMPSGPSGKRWSKDSDCAENMYIDMMLWRHARRLLEDVRLKDLGCFAAQLGFELISWLCKERTRAARVDNFVIALKRLHKDFLWPLPIIPASSISSPFKNGKYRTVGEQLLKSQSADPFLNLEMDAGISNIQRSQSWLSNIGPTHHEIDTASSHGPQMQDAFLSPLSNKGDECSIGSATDLTESSSMVDGDWTMVDENFSTLSLTQSELEHISMELASKGPHKSQVQLRYLLHIFMEAGCLDWCIVIGLILRESSIINQILVITQSSEVDGEMLQNIKTGLHAVDRWASTDCPGYKPFLNIIKPQLQKLSEITEEQVQPDAFQPITMGKTPEQTSPRAEESRGSSSHGSIPQGEVGSSNMVSRKEEDTAQAEEEEPFQDGTYDCSVS

SEQ ID NO: 1530 - protein, 1165 aa, Homo sapiens
MYFLSGWPKRLLCPLGSPAEAPFHVQSDPQRAFFAVLAAARLSIWYSRPSVLIVTYKEPAKSSTQFGSYKQAEWRPDSTMIAVSTANGYILFFHITSTRGDKYLYEPVYPKGSPQMKGTPHFKEEQCAPALNLEMRKILDLQAPIMSLQSVLEDLLVATSDGLLHLIHWEGMTNGRKAINLCTVPFSVDLQSSRVGSFLGFTDVHIRDMEYCATLDGFAVVFNDGKVGFITPVSSRFTAEQLHGVWPQDVVDGTCVAVNNKYRLMAFGCVSGSVQVYTIDNSTGAMLLSHKLELTAKQYPDIWNKTGAVKLMRWSPDNSVVIVTWEYGGLSLWSVFGAQLICTLGGDFAYRSDGTKKDPLKINSMSWGAEGYHLWVISGFGSQNTEIESDLRSVVKQPSILLFQFIKSVLTVNPCMSNQEQVLLQGEDRLYLNCGEASQTQNPRSSSTHSEHKPSREKSPFADGGLESQGLSTLLGHRHWHVVQISSTYLESNWPIRFSAIDKLGQNIAVVGKFGFAHYSLLTKKWKLFGNITQEQNMIVTGGLAWWNDFMVLACYNINDRQEELRVYLRTSNLDNAFAHVTKAQAETLLLSVFQDMVIVFRADCSICLYSIERKSDGPNTTAGIQVLQEVSMSRYIPHPFLVVSVTLTSVSTENGITLKMPQQARGAESIMLNLAGQLIMMQRDRSGPQIREKDSNPNNQRKLLPFCPPVVLAQSVENVWTTCRANKQKRHLLEALWLSCGGAGMKVWLPLFPRDHRKPHSFLSQRIMLPFHINIYPLAVLFEDALVLGAVNDTLLYDSLYTRNNAREQLEVLFPFCVVERTSQIYLHHILRQLLVRNLGEQALLLAQSCATLPYFPHVLELMLHEVLEEEATSREPIPDPLLPTVAKFITEFPLFLQTVVHCARKTEYALWNYLFAAVGNPKDLFEECLMAQDLDTAASYLIILQNMEVPAVSRQHATLLFNTALEQGKWDLCRHMIRFLKAIGSGESETPPSTPTAQEPSSSGGFEFFRNRSISLSQSAENVPASKFSLQKTLSMPSGPSGKRWSKDSDCAENMYIDMMLWRHARRLLEDVRLKDLGCFAAQLGFELISWLCKERTRAARVDNFVIALKRLHKDFLWPLPIIPASSISSPFKNGKYRTGNVDFMSLVQGELYFTPCIYTFCY

SEQ ID NO: 1531 - protein, 1386 aa, Homo sapiens
MYFLSGWPKRLLCPLGSPAEAPFHVQSDPQRAFFAVLAAARLSIWYSRPSVLIVTYKEPAKSSTQFGSYKQAEWRPDSTMIAVSTANGYILFFHITSTRGDKYLYEPVYPKGSPQMKGTPHFKEEQCAPALNLEMRKILDLQAPIMSLQSVLEDLLVATSDGLLHLIHWEGMTNGRKAINLCTVPFSVDLQSSRVGSFLGFTDVHIRDMEYCATLDGFAVVFNDGKVGFITPVSSRFTAEQLHGVWPQDVVDGTCVAVNNKYRLMAFGCVSGSVQVYTIDNSTGAMLLSHKLELTAKQYPDIWNKTGAVKLMRWSPDNSVVIVTWEYGGLSLWSVFGAQLICTLGGDFAYRSDGTKKDPLKINSMSWGAEGYHLWVISGFGSQNTEIESDLRSVVKQPSILLFQFIKSVLTVNPCMSNQEQVLLQGEDRLYLNCGEASQTQNPRSSSTHSEHKPSREKSPFADGGLESQGLSTLLGHRHWHVVQISSTYLESNWPIREQNMIVTGGLAWWNDFMVLACYNINDRQEELRVYLRTSNLDNAFAHVTKAQAETLLLSVFQDMVIVFRADCSICLYSIERKSDGPNTTAGIQVLQEVSMSRYIPHPFLVVSVTLTSVSTENGITLKMPQQARGAESIMLNLAGQLIMMQRDRSGPQIREKDSNPNNQRKLLPFCPPVVLAQSVENVWTTCRANKQKRHLLEALWLSCGGAGMKVWLPLFPRDHRKPHSFLSQRIMLPFHINIYPLAVLFEDALVLGAVNDTLLYDSLYTRNNAREQLEVLFPFCVVERTSQIYLHHILRQLLVRNLGEQALLLAQSCATLPYFPHVLELMLHEVLEEEATSREPIPDPLLPTVAKFITEFPLFLQTVVHCARKTEYALWNYLFAAVGNPKDLFEECLMAQDLDTAASYLIILQNMEVPAVSRQHATLLFNTALEQGKWDLCRHMIRFLKAIGSGESETPPSTPTAQEPSSSGGFEFFRNRSISLSQSAENVPASKFSLQKTLSMPSGPSGKRWSKDSDCAENMYIDMMLWRHARRLLEDVRLKDLGCFAAQLGFELISWLCKERTRAARVDNFVIALKRLHKDFLWPLPIIPASSISSPFKNGKYRTVGEQLLKSQSADPFLNLEMDAGISNIQRSQSWLSNIGPTHHEIDTASSHGPQMQDAFLSPLSNKGDECSIGSATDLTESSSMVDGDWTMVDENFSTLSLTQSELEHISMELASKGPHKSQVQLRYLLHIFMEAGCLDWCIVIGLILRESSIINQILVITQSSEVDGEMLQNIKTGLHAVDRWASTDCPGYKPFLNIIKPQLQKLSEITEEQVQPDAFQPITMGKTPEQTSPRAEESRGSSSHGSIPQGEVGSSNMVSRKEEDTAQAEEEEPFQDGTYDCSVS

SEQ ID NO: 1532 - protein, 298 aa, Homo sapiens
MTLNTEQEAKTPLHRRASTPLPLSPRGHQPGRLSTVPSTQSQHPRLGQSASLNPPTQKPSPAPDDWSSESSDSEGSWEALYRVVLLGDPGVGKTSLASLFAGKQERDLHEQLGEDVYERTLTVDGEDTTLVVVDTWEAEKLDKSWSQESCLQGGSAYVIVYSIADRGSFESASELRIQLRRTHQADHVPIILVGNKADLARCREVSVEEGRACAVVFDCKFIETSATLQHNVAELFEGVVRQLRLRRRDSAAKEPPAPRRPASLAQRARRFLARLTARSARRRALKARSKSCHNLAVL

SEQ ID NO: 1533 - protein, 616 aa, Homo sapiens
MVGQLSEGAIAAIMQKGDTNIKPILQVINIRPITTGNSPPRYRLLMSDGLNTLSSFMLATQLNPLVEEEQLSSNCVCQIHRFIVNTLKDGRRVVILMELEVLKSAEAVGVKIGNPVPYNEGLGQPQVAPPAPAASPAASSRPQPQNGSSGMGSTVSKAYGASKTFGKAAGPSLSHTSGGTQSKVVPIASLTPYQSKWTICARVTNKSQIRTWSNSRGEGKLFSLELVDESGEIRATAFNEQVDKFFPLIEVNKVYYFSKGTLKIANKQFTAVKNDYEMTFNNETSVMPCEDDHHLPTVQFDFTGIDDLENKSKDSLVDIIGICKSYEDATKITVRSNNREVAKRNIYLMDTSGKVVTATLWGEDADKFDGSRQPVLAIKGARVSDFGGRSLSVLSSSTIIANPDIPEAYKLRGWFDAEGQALDGVSISDLKSGGVGGSNTNWKTLYEVKSENLGQGDKPDYFSSVATVVYLRKENCMYQACPTQDCNKKVIDQQNGLYRCEKCDTEFPNFKYRMILSVNIADFQENQWVTCFQESAEAILGQNAAYLGELKDKNEQAFEEVFQNANFRSFIFRVRVKVETYNDESRIKATVMDVKPVDYREYGRRLVMSIRRSALM

SEQ ID NO: 1534 - protein, 340 aa, Homo sapiens
MHTDLDTDMDMDTETTALCPSGSRRASPPGTPTPEADATLLKKSEKLLAELDRSGLPSAPGAPRRRGSMPVPYKHQLRRAQAVDELDWPPQASSSGSSDSLGSGEAAPAQKDGIFKVMLVGESGVGKSTLAGTFGGLQGDSAHEPENPEDTYERRIMVDKEEVTLVVYDIWEQGDAGGWLRDHCLQTGDAFLIVFSVTDRRSFSKVPETLLRLRAGRPHHDLPVILVGNKSDLARSREVSLEEGRHLAGTLSCKHIETSAALHHNTRELFEGAVRQIRLRRGRNHAGGQRPDPGSPEGPAPPARRESLTKKAKRFLANLVPRNAKFFKQRSRSCHDLSVL

SEQ ID NO: 1535 - protein, 221 aa, Homo sapiens
MHTDLDTDMDMDTETTALCPSGSRRASPPGTPTPEADATLLKKSEKLLAELDRSGLPSAPGAPRRRGSMPVPYKHQLRRAQAVDELDWPPQASSSGSSDSLGSGEAAPAQKDGIFKVMLVGESGVGKSTLAGTFGGLQGDSAHEPENPGGCRRVAAGPLPSDRGRLSHRLLSHRPTEFLQSSRDPTSAPGWEAAPRPTRYPRWKQERLGPLPGGITGGCVS

SEQ ID NO: 1536 - protein, 369 aa, Homo sapiens
MAYSTVQRVALASGLVLALSLLLPKAFLSRGKRQEPPPTPEGKLGRFPPMMHHHQAPSDGQTPGARFQRSHLAEAFAKAKGSGGGAGGGGSGRGLMGQIIPIYGFGIFLYILYILFKLSKGKTTAEDGKCYTAMPGNTHRKITSFELAQLQEKLKETEAAMEKLINRVGPNGESRAQTVTSDQEKRLLHQLREITRVMKEGKFIDRFSPEKEAEEAPYMEDWEGYPEETYPIYDLSDCIKRRQETILVDYPDPKELSAEEIAERMGMIEEEESDHLGWESLPTDPRAQEDNSVTSCDPKPETCSCCFHEDEDPAVLAENAGFSADSYPEQEETTKEEWSQDFKDEGLGISTDKAYTGSMLRKRNPQGLE

SEQ ID NO: 1537 - protein, 128 aa, Homo sapiens
MAYSTVQRVALASGLVLALSLLLPKAFLSRGKRQEPPPTPEGKLGRFPPMMHHHQAPSDGQTPGARFQRSHLAEAFAKAKGSGGGAGGGGSGRGLMGQIIPIYGFGIFLYILYILFKVSRIILIILHQ

SEQ ID NO: 1538 - protein, 187 aa, Homo sapiens
MAYSTVQRVALASGLVLALSLLLPKAFLSRGKRQEPPPTPEGYPEETYPIYDLSDCIKRRQETILVDYPDPKELSAEEIAERMGMIEEEESDHLGWESLPTDPRAQEDNSVTSCDPKPETCSCCFHEDEDPAVLAENAGFSADSYPEQEETTKEEWSQDFKDEGLGISTDKAYTGSMLRKRNPQGLE

SEQ ID NO: 1539 - protein, 368 aa, Homo sapiens
MAYSTVQRVALASGLVLALSLLLPKAFLSRGKRQEPPPTPEGKLGRFPPMMHHHQAPSDGQTPGARFQRSHLAEAFAKAKGSGGGAGGGGSGRGLMGQIIPIYGFGIFLYILYILFKLSKGKTTAEDGKCYTAMPGNTHRKITSFELAQLQEKLKETEAAMEKLINRVGPNGERAQTVTSDQEKRLLHQLREITRVMKEGKFIDRFSPEKEAEEAPYMEDWEGYPEETYPIYDLSDCIKRRQETILVDYPDPKELSAEEIAERMGMIEEEESDHLGWESLPTDPRAQEDNSVTSCDPKPETCSCCFHEDEDPAVLAENAGFSADSYPEQEETTKEEWSQDFKDEGLGISTDKAYTGSMLRKRNPQGLE

SEQ ID NO: 1540 - protein, 288 aa, Homo sapiens
MAYSTVQRVALASGLVLALSLLLPKAFLSRGKRQEPPPTPEGKLGRFPPMMHHHQAPSDGQTPGARFQRSHLAEAFAKAKGSGGGAGGGGSGRGLMGQIIPIYGFGIFLYILYILFKLSKGKTTAEDGKCYTAMPGNTHRKISYPEETYPIYDLSDCIKRRQETILVDYPDPKELSAEEIAERMGMIEEEESDHLGWESLPTDPRAQEDNSVTSCDPKPETCSCCFHEDEDPAVLAENAGFSADSYPEQEETTKEEWSQDFKDEGLGISTDKAYTGSMLRKRNPQGLE

SEQ ID NO: 1541 - protein, 632 aa, Homo sapiens
MDTMMLNVRNLFEQLVRRVEILSEGNEVQFIQLAKDFEDFRKKWQRTDHELGKYKDLLMKAETERSALDVKLKHARNQVDVEIKRRQRAEADCEKLERQIQLIREMLMCDTSGSIQLSEEQKSALAFLNRGQPSSSNAGNKRLSTIDESGSILSDISFDKTDESLDWDSSLVKTFKLKKREKRRSTSRQFVDGPPGPVKKTRSIGSAVDQGNESIVAKTTVTVPNDGGPIEAVSTIETVPYWTRSRRKTGTLQPWNSDSTLNSRQLEPRTETDSVGTPQSNGGMRLHDFVSKTVIKPESCVPCGKRIKFGKLSLKCRDCRVVSHPECRDRCPLPCIPTLIGTPVKIGEGMLADFVSQTSPMIPSIVVHCVNEIEQRGLTETGLYRISGCDRTVKELKEKFLRVKTVPLLSKVDDIHAICSLLKDFLRNLKEPLLTFRLNRAFMEAAEITDEDNSIAAMYQAVGELPQANRDTLAFLMIHLQRVAQSPHTKMDVANLAKVFGPTIVAHAVPNPDPVTMLQDIKRQPKVVERLLSLPLEYWSQFMMVEQENIDPLHVIENSNAFSTPQTPDIKVSLLGPVTTPEHQLLKTPSSSSLSQRVRSTLTKNTPRFGSKSKSATNLGRQGNFFASPMLK

SEQ ID NO: 1542 - protein, 287 aa, Homo sapiens
MAEHFKQIIRCPVCLKDLEEAVQLKCGYACCLQCLNSLQKEPDGEGLLCRFCSVVSQKDDIKPKYKLRALVSIIKELEPKLKSVLTMNPRMRKFQVDMTFDVDTANNYLIISEDLRSFRSGDLSQNRKEQAERFDTALCVLGTPRFTSGRHYWEVDVGTSQVWDVGVCKESVNRQGKIELSSEHGFLTVGCREGKVFAASTVPMTPLWVSPQLHRVGIFLDVGMRSIAFYNVSDGCHINTFIEIPVCEPWRPFFAHKRGSQDDQSILSICSVINPSTASAPVSSEGK

SEQ ID NO: 1543 - protein, 1283 aa, Homo sapiens [sequence omitted]

SEQ ID NO: 1544 - protein, 649 aa, Homo sapiens
MSLMVSAGRGLGAVWSPTHVQVTVLQARGLRAKGPGGTSDAYAVIQVGKEKYATSVSERSLGAPVWREEATFELPSLLSSGPAAAATLQLTVLHRALLGLDKFLGRAEVDLRDLHRDQGRRKTQWYKLKSKPGKKDKERGEIEVDIQFMRNNMTASMFDLSMKDKSRNPFGKLKDKIKGKNKDSGSDTASAIIPSTTPSVDSDDESVVKDKKKKSKIKTLLSKSNLQKTPLSQSMSVLPTSKPEKVLLRPGDFQSQWDEDDNEDESSSASDVMSHKRTASTDLKQLNQVNFTLPKKEGLSFLGGLRSKNDVLSRSNVCINGNHVYLEQPEAKGEIKDSSPSSSPSPKGFRKKHLFSSTENLAAGSWKEPAEGGGLSSDRQLSESSTKDSLKSMTLPSYRPAPLVSGDLRENMAPANSEATKEAKESKKPESRRSSLLSLMTGKKDVAKGSEGENPLTVPGREKEGMLMGVKPGEDASGPAEDLVRRSEKDTAAVVSRQGSSLNLFEDVQITEPEAEPESKSEPRPPISSPRAPQTRAVKPRLHPVKPMNAMATKVANCSLGTATIISENLNNEVMMKKYSPSDPAFAYAQLTHDELIQLVLKQKETISKKEFQVRELEDYIDNLLVRVMEETPNILRIPTQVGKKAGKM

SEQ ID NO: 1545 - protein, 612 aa, Homo sapiens
MGRTRETGTEKNTSSLELEESLPEQPETGRQEEELPRFPCKKQDYSPSSGEAQEVPFALSLSSDGAVSPVGELAAGGDRDLESQAGSLVESKARDAAEEVAPPLPMGASVPSIDSMMRKLEEMGLNLRKDQKKTKKRVSFSEQLFTEEAVAGAALLVEGHSSCPQELNPAWSVAGNASDGEPPESPHAEDSERESVTTPGPATCGAPASPADHLLLPSQEESFSEVPMSEASSAKDTPLFRMEGEDALVTQYQSKASDHEGLLSDPLSDLQLVSDFKSPIMADLNLSLPSIPEVASDDERIDQVEDDGDQVEDDGETAKSSTLDIGALSLGLVVPCPERGKGPSGEADRLVLGEGLCDFRLQAPQASVTAPSEQTTEFGIHKPHLGKSSSLDKQLPGPSGGEEEKPMGNGSPSPPPGTSLDNPVPSPSPSEIFPVTHSFPSSAHSDTHHTSTAESQKKATAEGSAGRVENFGKRKPLLQAWVSPSETHPVSAQPGAGTGSAKHRLHPVKPMNAMATKVANCSLGTATIISENLNNEVMMKKYSPSDPAFAYAQLTHDELIQLVLKQKETISKKEFQVRELEDYIDNLLVRVMEETPNILRIPTQVGKKAGKM

SEQ ID NO: 1546 - protein, 439 aa, Homo sapiens
MRNNMTASMFDLSMKDKSRNPFGKLKDKIKGKNKDSGSDTASAIIPSTTPSVDSDDESVVKDKKKKSKIKTLLSKSNLQKTPLSQSMSVLPTSKPEKVLLRPGDFQSQWDEDDNEDESSSASDVMSHKRTASTDLKQLNQVNFTLPKKEGLSFLGGLRSKNDVLSRSNVCINGNHVYLEQPEAKGEIKDSSPSSSPSPKGFRKKHLFSSTENLAAGSWKEPAEGGGLSSDRQLSESSTKDSLKSMTLPSYRPAPLVSGDLRENMAPANSEATKEAKESKKPESRRSSLLSLMTGKKDVAKGSEGENPLTVPGREKEGMLMGVKPGEDASGPAEDLVRRSEKDTAAVVSRQGSSLNLFEDVQITEPEAEPESKSEPRPPISSPRAPQTRAVKPRLHPVKPMNAMATKVANCSLGTATIISENLNNEVMMKVCPLRSWCVR

SEQ ID NO: 1547 - protein, 142 aa, Homo sapiens
MSLMVSAGRGLGAVWSPTHVQVTVLQARGLRAKGPGGTSDAYAVIQVGKEKYATSVSERSLGAPVWREEATFELPSLLSSGPAAAATLQLTVLHRALLGLDKFLGRAEVDLRDLHSSLGKSFFKTLKKRAWAIFLRLCLKKN

SEQ ID NO: 1548 - protein, 1272 aa, Homo sapiens
MPAERKKPASMEEKDSLPNNKEKDCSERRTVSSKERPKDDIKLTAKKEVSKAPEDKKKRLEDDKRKKEDKERKKKDEEKVKAEEESKKKEEEEKKKHQEEERKKQEEQAKRQQEEEAAAQMKEKEESIQLHQEAWERHHLRKELRSKNQNAPDSRPEENFFSRLDSSLKKNTAFVKKLKTITEQQRDSLSHDFNGLNLSKYIAEAVASIVEAKLKISDVNCAVHLCSLFHQRYADFAPSLLQVWKKHFEARKEEKTPNITKLRTDLRFIAELTIVGIFTDKEGLSLIYEQLKNIINADRESHTHVSVVISFCRHCGDDIAGLVPRKVKSAAEKFNLSFPPSEIISPEKQQPFQNLLKEYFTSLTKHLKRDHRELQNTERQNRRILHSKGELSEDRHKQYEEFAMSYQKLLANSQSLADLLDENMPDLPQDKPTPEEHGPGIDIFTPGKPGEYDLEGGIWEDEDARNFYENLIDLKAFVPAILFKDNEKSCQNKESNKDDTKEAKESKENKEVSSPDDLELELENLEINDDTLELEGGDEAEDLTKKLLDEQEQEDEEASTGSHLKLIVDAFLQQLPNCVNRDLIDKAAMDFCMNMNTKANRKKLVRALFIVPRQRLDLLPFYARLVATLHPCMSDVAEDLCSMLRGDFRFHVRKKDQINIETKNKTVRFIGELTKFKMFTKNDTLHCLKMLLSDFSHHHIEMACTLLETCGRFLFRSPESHLRTSVLLEQMMRKKQAMHLDARYVTMVENAYYYCNPPPAEKTVKKKRPPLQEYVRKLLYKDLSKVTTEKVLRQMRKLPWQDQEVKDYVICCMINIWNVKYNSIHCVANLLAGLVLYQEDVGIHVVDGVLEDIRLGMEVNQPKFNQRRISSAKFLGELYNYRMVESAVIFRTLYSFTSFGVNPDGSPSSLDPPEHLFRIRLVCTILDTCGQYFDRGSSKRKLDCFLVYFQRYVWWKKSLEVWTKDHPFPIDIDYMISDTLELLRPKIKLCNSLEESIRQVQDLEREFLIKLGLVNDKDSKDSMTEGENLEEDEEEEEGGAETEEQSGNESEVNEPEEEEGSDNDDDEGEEEEEENTDYLTDSNKENETDEENTEVMIKGGGLKHVPCVEDEDFIQALDKMMLENLQQRSGESVKVHQLDVAIPLHLKSQLRKGPPLGGGEGEAESADTMPFVMLTRKGNKQQFKILNVPMSSQLAANHWNQQQAEQEERMRMKKLTLDINERQEQEDYQEMLQSLAQRPAPANTNRERRPRYQHPKGAPNADLIFKTGGRRR

SEQ ID NO: 1549 - protein, 653 aa, Homo sapiens
MALVRGAEPAAGPSRWLPTHVQVTVLRARGLRGKSSGAGSTSDAYTVIQVGREKYSTSVVEKTHGCPEWREECSFELPPGALDGLLRAQEADAGPAPWAASSAAACELVLTTMHRSLIGVDKFLGQATVALDEVFGAGRAQHTQWYKLHSKPGKKEKERGEIEVTIQFTRNNLSASMFDLSMKDKPRSPFSKIRDKMKGKKKYDLESASAILPSSAIEDPDLGSLGKMGKAKGFFLRNKLRKSSLTQSNTSLGSDSTLSSASGSLAYQGPGAELLTRSPSRSSWLSTEGGRDSAQSPKLFTHKRTYSDEANQMRVAPPRALLDLQGHLDAASRSSLCVNGSHIYNEEPQGPVRHRSSISGSLPSSGSLQAVSSRFSEEGPRSTDDTWPRGSRSNSSSEAVLGQEELSAQAKVLAPGASHPGEEEGARLPEGKPVQVATPIVASSEAVAEKEGARKEERKPRMGLFHHHHQGLSRSELGRRSSLGEKGGPILGASPHHSSSGEEKAKSSWFGLREAKDPTQKPSPHPVKPLSAAPVEGSPDRKQSRSSLSIALSSGLEKLKTVTSGSIQPVTQAPQAGQMVDTKRLKDSAVLDQSAKYYHLTHDELISLLLQRERELSQRDEHVQELESYIDRLLVRIMETSPTLLQIPPGPPK

SEQ ID NO: 1550 - protein, 107 aa, Homo sapiens
MQTDTSNLSARSCRFCVMSPLRTLLRSSEMRRKLLAVSASKVISTVKRKTSCSASGQKPTPCLSSTSKAQISPDFSFFNSVSSSKIKTFHEETSLFQIFIGMLCGNT

SEQ ID NO: 1551 - protein, 637 aa, Homo sapiens
MAGGAGWSGAPAALLRSVRRLREVFEVCGRDPDGFLRVERVAALGLRFGQGEEVEKLVKYLDPNDLGRINFKDFCRGVFAMKGCEELLKDVLSVESAGTLPCAPEIPDCVEQGSEVTGPTFADGELIPREPGFFPEDEEEAMTLAPPEGPQELYTDSPMESTQSLEGSVGSPAEKDGGLGGLFLPEDKSLVHTPSMTTSDLSTHSTTSLISNEEQFEDYGEGDDVDCAPSSPCPDDETRTNVYSDLGSSVSSSAGQTPRKMRHVYNSELLDVYCSQCCKKINLLNDLEARLKNLKANSPNRKISSTAFGRQLMHSSNFSSSNGSTEDLFRDSIDSCDNDITEKVSFLEKKVTELENDSLTNGDLKSKLKQENTQLVHRVHELEEMVKDQETTAEQALEEEARRHREAYGKLEREKATEVELLNARVQQLEEENTELRTTVTRLKSQTEKLDEERQRMSDRLEDTSLRLKDEMDLYKRMMDKLRQNRLEFQKEREATQELIEDLRKELEHLQMYKLDCERPGRGRSASSGLGEFNARAREVELEHEVKRLKQENYKLRDQNDDLNGQILSLSLYEAKNLFAAQTKAQSLAAEIDTASRDELMEALKEQEEINFRLRQYMDKIILAILDHNPSILEIKH

SEQ ID NO: 1552 - protein, 535 aa, Homo sapiens
MRTPPALGSQGSEVTGPTFADGELIPREPGFFPEDEEEAMTLAPPEGPQELYTDSPMESTQSLEGSVGSPAEKDGGLGGLFLPEDKSLVHTPSMTTSDLSTHSTTSLISNEEQFEDYGEGDDVDCAPSSPCPDDETRTNVYSDLGSSVSSSAGQTPRKMRHVYNSELLDVYCSQCCKKINLLNDLEARLKNLKANSPNRKISSTAFGRQLMHSSNFSSSNGSTEDLFRDSIDSCDNDITEKVSFLEKKVTELENDSLTNGDLKSKLKQENTQLVHRVHELEEMVKDQETTAEQALEEEARRHREAYGKLEREKATEVELLNARVQQLEEENTELRTTVTRLKSQTEKLDEERQRMSDRLEDTSLRLKDEMDLYKRMMDKLRQNRLEFQKEREATQELIEDLRKELEHLQMYKLDCERPGRGRSASSGLGEFNARAREVELEHEVKRLKQENYKLRDQNDDLNGQILSLSLYEAKNLFAAQTKAQSLAAEIDTASRDELMEALKEQEEINFRLRQYMDKIILAILDHNPSILEIKH

SEQ ID NO: 1553 - protein, 710 aa, Homo sapiens
MERTAGKELALAPLQDWGEETEDGAVYSVSLRRQRSQRRSPAEGPGGSQAPSPIANTFLHYRTSKVRVLRAARLERLVGELVFGDREQDPSFMPAFLATYRTFVPTACLLGFLLPPMPPPPPPGVEIKKTAVQDLSFNKNLRAVVSVLGSWLQDHPQDFRDPPAHSDLGSVRTFLGWAAPGSAEAQKAEKLLEDFLEEAEREQEEEPPQVWTGPPRVAQTSDPDSSEACAEEEEGLMPQGPQLLDFSVDEVAEQLTLIDLELFSKVRLYECLGSVWSQRDRPGAAGASPTVRATVAQFNTVTGCVLGSVLGAPGLAAPQRAQRLEKWIRIAQRCRELRNFSSLRAILSALQSNPIYRLKRSWGAVSREPLSTFRKLSQIFSDENNHLSSREILFQEEATEGSQEEDNTPGSLPSKPPPGPVPYLGTFLTDLVMLDTALPDMLEGDLINFEKRRKEWEILARIQQLQRRCQSYTLSPHPPILAALHAQNQLTEEQSYRLSRVIEPPAASCPSSPRIRRRISLTKRLSAKLAREKSSSPSGSPGDPSSPTSSVSPGSPPSSPRSRDAPAGSPPASPGPQGPSTKLPLSLDLPSPRPFALPLGSPRIPLPAQQSSEARVIRVSIDNDHGNLYRSILLTSQDKAPSVVRRALQKHNVPQPWACDYQLFQVLPGDRVLLIPDNANVFYAMSPVAPRDFMLRRKEGTRNTLSVSPS

SEQ ID NO: 1554 - protein, 716 aa, Homo sapiens
MERTAGKELALAPLQDWGEETEDGAVYSVSLRRQRSQRRSPAEGPGGSQAPSPIANTFLHYRTSKVRVLRAARLERLVGELVFGDREQDPSFMPAFLATYRTFVPTACLLGFLLPPMPPPPPPGVEIKKTAVQDLSFNKNLRAVVSVLGSWLQDHPQDFRDPPAHSDLGSVRTFLGWAAPGSAEAQKAEKLLEDFLEEAEREQEEEPPQVWTGPPRVAQTSDPDSSEACAEEEEGLMPQGPQLLDFSVDEVAEQLTLIDLELFSKVRLYECLGSVWSQRDRPGAAGASPTVRATVAQFNTVTGCVLGSVLGAPGLAAPQRAQRLEKWIRIAQRCRELRNFSSLRAILSALQSNPIYRLKRSWGAVSREPLSTFRKLSQIFSDENNHLSSREILFQEEATEGSQEEDNTPGSLPSKPPPGPVPYLGTFLTDLVMLDTALPDMLEGDLINFEKRRKEWEILARIQQLQRRCQSYTLSPHPPILAALHAQNQLTEEQSYRLSRVIEPPAASCPSSPRIRRRISLTKRLSAKLAREKSSSPSGSPGDPSSPTSSLCISPSVSPGSPPSSPRSRDAPAGSPPASPGPQGPSTKLPLSLDLPSPRPFALPLGSPRIPLPAQQSSEARVIRVSIDNDHGNLYRSILLTSQDKAPSVVRRALQKHNVPQPWACDYQLFQVLPGDRVLLIPDNANVFYAMSPVAPRDFMLRRKEGTRNTLSVSPS

SEQ ID NO: 1555 - protein, 475 aa, Homo sapiens
MSIRTPPRLLELAGRSLLRDEALAISTLEELPTELFPPLFMEAFSRRHCEALKLMVQAWPFLRLPLGSLMKRPCPETFQAVLDGLDALLTHRVRLRRWKLQVLDLQDVSENFWMVWSEAMARRCLPNAMMNRKPLQDCPRMRGQQPLTVFIDLCLKNRTLDEYFTCLFLWVKQREGLVHLCCKKLKMLGMLFHNIRNILKTVNLDCIQEVEVNCNWTLPVLAEFTPYLGQMRNLRKLVLSDIDSRYISPEQKKEFVTQFTTQFLKLRCLQKLYMNSVSFLEGHLDQMLSCLKTSLNILAITNCVLLESDLKHLSKYPSIGQLKTLDLSGTRLANFSLVPLQVLLEKVAATLEYLDLDDCGIVDSQVNAILPALSRCFELTTFSFRGNPISTATLENLLCHTIRLNNLCLELYPAPRESYDVRGIVCRSRFAQLGAELMGRVRALREPERILFCTDYCPQCGNRSLYDLEVDRCCC

SEQ ID NO: 1556 - protein, 390 aa, Homo sapiens
MQNEPLTPGYHGFPARDSQGNQEPTTTPDAMVQPFTTIPFPPPPQNGIPTEYGVPHTQDYAGQTGEHNLTLYGSTQAHGEQSSNSPSTQNGSLTTEGGAQTDGQQSQTQSSENSESKSTPKRLHVSNIPFRFRDPDLRQMFGQFGKILDVEIIFNERGSKGFGFVTFENSADADRAREKLHGTVVEGRKIEVNNATARVMTNKKMVTPYANGWKLSPVVGAVYGPELYAASSFQADVSLGNDAAVPLSGRGGINTYIPLISLPLVPGFPYPTAATTAAAFRGAHLRGRGRTVYGAVRAVPPTAIPAYPGVVYQDGFYGADLYGGYAAYRYAQPATATAATAAAAAAAAYSDGYGRVYTADPYHALAPAASYGVGAVASLYRGGYSRFAPY

SEQ ID NO: 1557 - protein, 381 aa, Homo sapiens
MEKKKMVTQGNQEPTTTPDAMVQPFTTIPFPPPPQNGIPTEYGVPHTQDYAGQTGEHNLTLYGSTQAHGEQSSNSPSTQNGSLTQTEGGAQTDGQQSQTQSSENSESKSTPKRLHVSNIPFRFRDPDLRQMFGQFGKILDVEIIFNERGSKGFGFVTFENSADADRAREKLHGTVVEGRKIEVNNATARVMTNKKMVTPYANGWKLSPVVGAVYGPELYAASSFQADVSLGNDAAVPLSGRGGINTYIPLISLPLVPGFPYPTAATTAAAFRGAHLRGRGRTVYGAVRAVPPTAIPAYPGVVYQDGFYGADLYGGYAAYRYAQPATATAATAAAAAAAAYSDGYGRVYTADPYHALAPAASYGVGAVASLYRGGYSRFAPY

SEQ ID NO: 1558 - protein, 358 aa, Homo sapiens
MEKKKMVTQGNQEPTTTPDAMVQPFTTIPFPPPPQNGIPTEYGVPHTQDYAGQTGEHNLTLYGSTQAHGEQSSNSPSTQNGSLTTEGGAQTDGQQSQTQSSENSESKSTPKRLHVSNIPFRFRDPDLRQMFGGFGFVTFENSADADRAREKLHGTVVEGRKIEVNNATARVMTNKKMVTPYANGWKLSPVVGAVYGPELYAASSFQADVSLGNDAAVPLSGRGGINTYIPLIIPGFPYPTAATTAAAFRGAHLRGRGRTVYGAVRAVPPTAIPAYPGVVYQDGFYGADLYGGYAAYRYAQPATATAATAAAAAAAAYSDGYGRVYTADPYHALAPAASYGVGAVASLYRGGYSRFAPY

SEQ ID NO: 1559 - protein, 370 aa, Homo sapiens
MEKKKMVTQGNQEPTTTPDAMVQPFTTIPFPPPPQNGIPTEYGVPHTQDYAGQTGEHNLTLYGSTQAHGEQSSNSPSTQNGSLTTEGGAQTDGQQSQTQSSENSESKSTPKRLHVSNIPFRFRDPDLRQMFGQFGKILDVEIIFNERGSKGFGFVTFENSADADRAREKLHGTVVEGRKIEVNNATARVMTNKKMVTPYANGWKLSPVVGAVYGPELYAASSFQADVSLGNDAAVPLSGRGGINTYIPLISLPLVPGFPYPTAATTAAAFRGAHLRGRGRTVYGAVRAVPPTAIPAYPGVDMQPTDMHSLLLQPQPPLLQPLQPLTVTVMAGCTQPTPTMPLPLPLAMELALWRVYTEVATADLPPTEVT

SEQ ID NO: 1560 - protein, 376 aa, Homo sapiens
MEKKKMVTQGNQEPTTTPDAMVQPFTTIPFPPPPQNGIPTEYGVPHTQDYAGQTGEHNLTLYGSTQAHGEQSSNSPSTQNGSLTTEGGAQTDGQQSQTQSSENSESKSTPKRLHVSNIPFRFRDPDLRQMFGQFGKILDVEIIFNERGSKGFGFVTFENSADADRAREKLHGTVVEGRKIEVNNATARVMTNKKMVTPYANGWKLSPVVGAVYGPELYAASSFQADVSLGNDAAVPLSGRGGINTYIPLIIPGFPYPTAATTAAAFRGAHLRGRGRTVYGAVRAVPPTAIPAYPGVVYQDGFYGADLYGGYAAYRYAQPATATAATAAAAAAAAYSDGYGRVYTADPYHALAPAASYGVGAVASLYRGGYSRFAPY

SEQ ID NO: 1561 - protein, 450 aa, Homo sapiens
MAEGAQPHQPPQLGPGAAARGMKRESELELPVPGAGGDGADPGLSKRPRTEEAAADGGGGMQNEPLTPGYHGFPARDSQGNQEPTTTPDAMVQPFTTIPFPPPPQNGIPTEYGVPHTQDYAGQTGEHNLTLYGSTQAHGEQSSNSPSTQNGSLTTEGGAQTDGQQSQTQSSENSESKSTPKRLHVSNIPFRFRDPDLRQMFGQFGKILDVEIIFNERGSKGFGFVTFENSADADRAREKLHGTVVEGRKIEVNNATARVMTNKKMVTPYANGWKLSPVVGAVYGPELYAASSFQADVSLGNDAAVPLSGRGGINTYIPLISLPLVPGFPYPTAATTAAAFRGAHLRGRGRTVYGAVRAVPPTAIPAYPGVVYQDGFYGADLYGGYAAYRYAQPATATAATAAAAAAAAYSDGYGRVYTADPYHALAPAASYGVGAVASLYRGGYSRFAPY

SEQ ID NO: 1562 - protein, 400 aa, Homo sapiens
MQNEPLTPGYHGFPARDSQGNQEPTTTPDAMVQPFTTIPFPPPPQNGIPTEYGVPHTQDYAGQTGEHNLTLYGSTQAHGEQSSNSPSTQNGSLTTEGGAQTDGQQSQTQSSENSESKSTPKRLHVSNIPFRFRDPDLRQMFGQFGKILDVEIIFNERGSKGFGFVTFENSADADRAREKLHGTVVEGRKIEVNNATARVMTNKKMVTPYANGWKLSPVVGAVYGPELYAASSFQADVSLGNDAAVPLSGRGGINTYIPLIIPGFPYPTAATTAAAFRGAHLRGRGRTVYGAVRAVPPTAIPAYPGVVYQDGFYGADLYIESANCFRSNRVDMQPTDMHSLLLQPQPPLLQPLQPLTVTVMAGCTQPTPTMPLPLPLAMELALWRVYTEVATADLPPTEVT

SEQ ID NO: 1563 - protein, 451 aa, Homo sapiens
MAEGAQPHQPPQLGPGAAARGMKRESELELPVPGAGGDGADPGLSKRPRTEEAAADGGGGMQNEPLTPGYHGFPARDSQGNQEPTTTPDAMVQPFTTIPFPPPPQNGIPTEYGVPHTQDYAGQTGEHNLTLYGSTQAHGEQSSNSPSTQNGSLTQTEGGAQTDGQQSQTQSSENSESKSTPKRLHVSNIPFRFRDPDLRQMFGQFGKILDVEIIFNERGSKGFGFVTFENSADADRAREKLHGTVVEGRKIEVNNATARVMTNKKMVTPYANGWKLSPVVGAVYGPELYAASSFQADVSLGNDAAVPLSGRGGINTYIPLISLPLVPGFPYPTAATTAAAFRGAHLRGRGRTVYGAVRAVPPTAIPAYPGVVYQDGFYGADLYGGYAAYRYAQPATATAATAAAAAAAAYSDGYGRVYTADPYHALAPAASYGVGAVASLYRGGYSRFAPY

SEQ ID NO: 1564 - protein, 367 aa, Homo sapiens
MEKKKMVTQGNQEPTTTPDAMVQPFTTIPFPPPPQNGIPTEYGVPHTQDYAGQTGEHNLTLYGSTQAHGEQSSNSPSTQNGSLTQTEGGAQTDGQQSQTQSSENSESKSTPKRLHVSNIPFRFRDPDLRQMFGQFGKILDVEIIFNERGSKGFGFVTFENSADADRAREKLHGTVVEGRKIEVNNATARVMTNKKMVTPYANGWKLSPVVGAVYGPELYAASSFQADVSLGNDAAVPLSGRGGINTYIPLIIPGFPYPTAATTAAAFRGAHLRGRGRTVYGAVRAVPPTAIPAYPGVDMQPTDMHSLLLQPQPPLLQPLQPLTVTVMAGCTQPTPTMPLPLPLAMELALWRVYTEVATADLPPTEVT

SEQ ID NO: 1565 - protein, 380 aa, Homo sapiens
MEKKKMVTQGNQEPTTTPDAMVQPFTTIPFPPPPQNGIPTEYGVPHTQDYAGQTGEHNLTLYGSTQAHGEQSSNSPSTQNGSLTTEGGAQTDGQQSQTQSSENSESKSTPKRLHVSNIPFRFRDPDLRQMFGQFGKILDVEIIFNERGSKGFGFVTFENSADADRAREKLHGTVVEGRKIEVNNATARVMTNKKMVTPYANGWKLSPVVGAVYGPELYAASSFQADVSLGNDAAVPLSGRGGINTYIPLISLPLVPGFPYPTAATTAAAFRGAHLRGRGRTVYGAVRAVPPTAIPAYPGVVYQDGFYGADLYGGYAAYRYAQPATATAATAAAAAAAAYSDGYGRVYTADPYHALAPAASYGVGAVASLYRGGYSRFAPY

SEQ ID NO: 1566 - protein, 798 aa, Homo sapiens
MAWDMCNQDSESVWSDIECAALVGEDQPLCPDLPELDLSELDVNDLDTDSFLGGLKWCSDQSEIISNQYNNEPSNIFEKIDEENEANLLAVLTETLDSLPVDEDGLPSFDALTDGDVTTDNEASPSSMPDGTPPPQEAEEPSLLKKLLLAPANTQLSYNECSGLSTQNHANHNHRIRTNPAIVKTENSWSNKAKSICQQQKPQRRPCSELLKYLTTNDDPPHTKPTENRNSSRDKCTSKKKSHTQSQSQHLQAKPTTLSLPLTPESPNDPKGSPFENKTIERTLSVELSGTAGLTPPTTPPHKANQDNPFRASPKLKSSCKTVVPPPSKKPRYSESSGTQGNNSTKKGPEQSELYAQLSKSSVLTGGHEERKTKRPSLRLFGDHDYCQSINSKTEILINISQELQDSRQLENKDVSSDWQGQICSSTDSDQCYLRETLEASKQVSPCSTRKQLQDQEIRAELNKHFGHPSQAVFDDEADKTGELRDSDFSNEQFSKLPMFINSGLAMDGLFDDSEDESDKLSYPWDGTQSYSLFNVSPSCSSFNSPCRDSVSPPKSLFSQRPQRMRSRSRSFSRHRSCSRSPYSRSRSRSPGSRSSSRSCYYYESSHYRHRTHRNSPLYVRSRSRSPYSRRPRYDSYEEYQHERLKREEYRREYEKRESERAKQRERQRQKAIEERRVIYVGKIRPDTTRTELRDRFEVFGEIEECTVNLRDDGDSYGFITYRYTCDAFAALENGYTLRRSNETDFELYFCGRKQFFKSNYADLDSNSDDFDPASTKSKYDSLDFDSLLKEAQRSLRR

SEQ ID NO: 1567 - protein, 271 aa, Homo sapiens
MAWDMCNQDSESVWSDIECAALVGEDQPLCPDLPELDLSELDVNDLDTDSFLGGLKWCSDQSEIISNQYNNEPSNIFEKIDEENEANLLAVLTETLDSLPVDEDGLPSFDALTDGDVTTDNEASPSSMPDGTPPPQEAEEPSLLKKLLLAPANTQLSYNECSGLSTQNHANHNHRIRTNPAIVKTENSWSNKAKSICQQQKPQRRPCSELLKYLTTNDDPPHTKPTENRNSSRDKCTSKKKSHTQSQSQHLQAKPTTLSLPLTPESPNLFL

SEQ ID NO: 1568 - protein, 803 aa, Homo sapiens
MDETSPRLEEDWKKVLQREAGWQCAALVGEDQPLCPDLPELDLSELDVNDLDTDSFLGGLKWCSDQSEIISNQYNNEPSNIFEKIDEENEANLLAVLTETLDSLPVDEDGLPSFDALTDGDVTTDNEASPSSMPDGTPPPQEAEEPSLLKKLLLAPANTQLSYNECSGLSTQNHANHNHRIRTNPAIVKTENSWSNKAKSICQQQKPQRRPCSELLKYLTTNDDPPHTKPTENRNSSRDKCTSKKKSHTQSQSQHLQAKPTTLSLPLTPESPNDPKGSPFENKTIERTLSVELSGTAGLTPPTTPPHKANQDNPFRASPKLKSSCKTVVPPPSKKPRYSESSGTQGNNSTKKGPEQSELYAQLSKSSVLTGGHEERKTKRPSLRLFGDHDYCQSINSKTEILINISQELQDSRQLENKDVSSDWQGQICSSTDSDQCYLRETLEASKQVSPCSTRKQLQDQEIRAELNKHFGHPSQAVFDDEADKTGELRDSDFSNEQFSKLPMFINSGLAMDGLFDDSEDESDKLSYPWDGTQSYSLFNVSPSCSSFNSPCRDSVSPPKSLFSQRPQRMRSRSRSFSRHRSCSRSPYSRSRSRSPGSRSSSRSCYYYESSHYRHRTHRNSPLYVRSRSRSPYSRRPRYDSYEEYQHERLKREEYRREYEKRESERAKQRERQRQKAIEERRVIYVGKIRPDTTRTELRDRFEVFGEIEECTVNLRDDGDSYGFITYRYTCDAFAALENGYTLRRSNETDFELYFCGRKQFFKSNYADLDSNSDDFDPASTKSKYDSLDFDSLLKEAQRSLRR

SEQ ID NO: 1569 - protein, 786 aa, Homo sapiens
MDEGYFCAALVGEDQPLCPDLPELDLSELDVNDLDTDSFLGGLKWCSDQSEIISNQYNNEPSNIFEKIDEENEANLLAVLTETLDSLPVDEDGLPSFDALTDGDVTTDNEASPSSMPDGTPPPQEAEEPSLLKKLLLAPANTQLSYNECSGLSTQNHANHNHRIRTNPAIVKTENSWSNKAKSICQQQKPQRRPCSELLKYLTTNDDPPHTKPTENRNSSRDKCTSKKKSHTQSQSQHLQAKPTTLSLPLTPESPNDPKGSPFENKTIERTLSVELSGTAGLTPPTTPPHKANQDNPFRASPKLKSSCKTVVPPPSKKPRYSESSGTQGNNSTKKGPEQSELYAQLSKSSVLTGGHEERKTKRPSLRLFGDHDYCQSINSKTEILINISQELQDSRQLENKDVSSDWQGQICSSTDSDQCYLRETLEASKQVSPCSTRKQLQDQEIRAELNKHFGHPSQAVFDDEADKTGELRDSDFSNEQFSKLPMFINSGLAMDGLFDDSEDESDKLSYPWDGTQSYSLFNVSPSCSSFNSPCRDSVSPPKSLFSQRPQRMRSRSRSFSRHRSCSRSPYSRSRSRSPGSRSSSRSCYYYESSHYRHRTHRNSPLYVRSRSRSPYSRRPRYDSYEEYQHERLKREEYRREYEKRESERAKQRERQRQKAIEERRVIYVGKIRPDTTRTELRDRFEVFGEIEECTVNLRDDGDSYGFITYRYTCDAFAALENGYTLRRSNETDFELYFCGRKQFFKSNYADLDSNSDDFDPASTKSKYDSLDFDSLLKEAQRSLRR

SEQ ID NO: 1570 - protein, 289 aa, Homo sapiens
MDEGYFCAALVGEDQPLCPDLPELDLSELDVNDLDTDSFLGGLKWCSDQSEIISNQYNNEPSNIFEKIDEENEANLLAVLTETLDSLPVDEDGLPSFDALTDGDVTTDNEASPSSMPDGTPPPQEAEEPSLLKKLLLAPANTQLSYNECSGLSTQNHANHNHRIRTNPAIVKTENSWSNKAKSICQQQKPQRRPCSELLKYLTTNDDPPHTKPTENRNSSRDKCTSKKKSHTQSQSQHLQAKPTTLSLPLTPESPNDPKGSPFENKTIERTLSVELSGTAGVKTNLISK

SEQ ID NO: 1571 - protein, 276 aa, Homo sapiens
MDETSPRLEEDWKKVLQREAGWQCAALVGEDQPLCPDLPELDLSELDVNDLDTDSFLGGLKWCSDQSEIISNQYNNEPSNIFEKIDEENEANLLAVLTETLDSLPVDEDGLPSFDALTDGDVTTDNEASPSSMPDGTPPPQEAEEPSLLKKLLLAPANTQLSYNECSGLSTQNHANHNHRIRTNPAIVKTENSWSNKAKSICQQQKPQRRPCSELLKYLTTNDDPPHTKPTENRNSSRDKCTSKKKSHTQSQSQHLQAKPTTLSLPLTPESPNLFL

SEQ ID NO: 1572 - protein, 138 aa, Homo sapiens
MDEGYFCAALVGEDQPLCPDLPELDLSELDVNDLDTDSFLGGLKWCSDQSEIISNQYNNEPSNIFEKIDEENEANLLAVLTETLDSLPVDEDGLPSFDALTDGDVTTDNEASPSSMPDGTPPPQEAEEPSLVRTLPTV

SEQ ID NO: 1573 - protein, 301 aa, Homo sapiens
MAWDMCNQDSESVWSDIECAALVGEDQPLCPDLPELDLSELDVNDLDTDSFLGGLKWCSDQSEIISNQYNNEPSNIFEKIDEENEANLLAVLTETLDSLPVDEDGLPSFDALTDGDVTTDNEASPSSMPDGTPPPQEAEEPSLLKKLLLAPANTQLSYNECSGLSTQNHANHNHRIRTNPAIVKTENSWSNKAKSICQQQKPQRRPCSELLKYLTTNDDPPHTKPTENRNSSRDKCTSKKKSHTQSQSQHLQAKPTTLSLPLTPESPNDPKGSPFENKTIERTLSVELSGTAGVKTNLISK

SEQ ID NO: 1574 - protein, 671 aa, Homo sapiens
MPDGTPPPQEAEEPSLLKKLLLAPANTQLSYNECSGLSTQNHANHNHRIRTNPAIVKTENSWSNKAKSICQQQKPQRRPCSELLKYLTTNDDPPHTKPTENRNSSRDKCTSKKKSHTQSQSQHLQAKPTTLSLPLTPESPNDPKGSPFENKTIERTLSVELSGTAGLTPPTTPPHKANQDNPFRASPKLKSSCKTVVPPPSKKPRYSESSGTQGNNSTKKGPEQSELYAQLSKSSVLTGGHEERKTKRPSLRLFGDHDYCQSINSKTEILINISQELQDSRQLENKDVSSDWQGQICSSTDSDQCYLRETLEASKQVSPCSTRKQLQDQEIRAELNKHFGHPSQAVFDDEADKTGELRDSDFSNEQFSKLPMFINSGLAMDGLFDDSEDESDKLSYPWDGTQSYSLFNVSPSCSSFNSPCRDSVSPPKSLFSQRPQRMRSRSRSFSRHRSCSRSPYSRSRSRSPGSRSSSRSCYYYESSHYRHRTHRNSPLYVRSRSRSPYSRRPRYDSYEEYQHERLKREEYRREYEKRESERAKQRERQRQKAIEERRVIYVGKIRPDTTRTELRDRFEVFGEIEECTVNLRDDGDSYGFITYRYTCDAFAALENGYTLRRSNETDFELYFCGRKQFFKSNYADLDSNSDDFDPASTKSKYDSLDFDSLLKEAQRSLRR

SEQ ID NO: 1575 - protein, 478 aa, Homo sapiens
MKMSIRTPPRLLELAGRSLLRDQALAMSTLEELPTELFPPLFMEAFSRRRCEALKLMVQAWPFRRLPLRPLIKMPCLEAFQAVLDGLDALLTQGVRPRRWKLQVLDLQDVCENFWMVWSEAMAHGCFLNAKRNKKPVQDCPRMRGRQPLTVFVELWLKNRTLDEYLTYLLLWVKQRKDLLHLCCKKLKILGMPFRNIRSILKMVNLDCIQEVEVNCKWVLPILTQFTPYLGHMRNLQKLVLSHMDVSRYVSPEQKKEIVTQFTTQFLKLRCLQKLYMNSVSFLEGHLDQLLSCLKTSLKVLTITNCVLLESDLKHLSQCPSISQLKTLDLSGIRLTNYSLVPLQILLEKVAATLEYLDLDDCGIIDSQVNAILPALSRCFELNTFSFCGNPICMATLENLLSHTIILKNLCVELYPAPRESYGADGTLCWSRFAQIRAELMNRVRDLRHPKRILFCTDYCPDCGNRSFYDLEADQYCC

SEQ ID NO: 1576 - protein, 474 aa, Homo sapiens
MSIQAPPRLLELAGQSLLRDQALSISAMEELPRVLYLPLFREAFSRRHFQTLTVMVQAWPFTCLPLVSLMKTLHLEPLKALLEGLHMLLTQKDRPRRWKLQVLDLRDVDENFWARWPGAWALSCFPEAMSKRQTAEDCPRTGEHQPLKVFIDICLKEIPQDECLRYLFQWVYQRRGLVHLCCSKLVNYLTPIKYLRKSLKIIYINSIGELEIHNTCWPHLIRKLYCYLKEMKTLCKLVFSRCHHYTSDNELEGWLVTRFTSVFLRLEHLQLLKIKLITFFSGHLEQLIRCLQNPLENLELTCGNLLEEDLKCLSQFPSLGYLKHLNLSYVLLFRISLEPLGALLEKIAASLETLVLEGCQIHYSQLSAILPGLSCCSQLTTFYFGSNCMSIDALKDLLRHTSGLSKLSLETYPAPEESLNSLVRVNWEIFTPLRAELMCTLREFRQPKRIFIGPTPCPSCGSSPSEELELHLCC

SEQ ID NO: 1577 - protein, 509 aa, Homo sapiens
MERRRLWGSIQSRYISMSVWTSPRRLVELAGQSLLKDEALAIAALELLPRELFPPLFMAAFDGRHSQTLKAMVQAWPFTCLPLGVLMKGQHLHLETFKAVLDGLDVLLAQEVRPRRWKLQVLDLRKNSHQDFWTVWSGNRASLYSFPEPEAAQPMTKKRKVDGLSTEAEQPFIPVEVLVDLFLKEGACDELFSYLIEKVKRKKNVLRLCCKKLKIFAMPMQDIKMILKMVQLDSIEDLEVTCTWKLPTLAKFSPYLGQMINLRRLLLSHIHASSYISPEKEEQYIAQFTSQFLSLQCLQALYVDSLFFLRGRLDQLLRHVMNPLETLSITNCRLSEGDVMHLSQSPSVSQLSVLSLSGVMLTDVSPEPLQALLERASATLQDLVFDECGITDDQLLALLPSLSHCSQLTTLSFYGNSISISALQSLLQHLIGLSNLTHVLYPVPLESYEDIHGTLHLERLAYLHARLRELLCELGRPSMVWLSANPCPHCGDRTFYDPEPILCPCFMPN

SEQ ID NO: 1578 - protein, 476 aa, Homo sapiens
MSIRTPPRLLELAGRSLLRDQALAMSTLEELPTELFPPLFMEAFSRRRCEALKLMVQAWPFRRLPLRPLIKMPCLEAFQAVLDGLDALLTQGVHPRRWKLQVLDLQDVCENFWMVWSEAMAHGCFLNAKRNKKPVQDCPRMRGQQPLTVFVELWLKNRTLDEYLTCLLLWVKQRKDLLHLCCKKLKILGMPFRNIRSILKMVNLDCIQEVEVNCKWVLPILTQFTPYLGHMRNLQKLVLSHMDVSRYVSPEQKKEIVTQFTTQFLKLCCLQKLSMNSVSFLEGHLDQLLSCLKTSLKVLTITNCVLLESDLKHLSQCPSISQLKTLDLSGIRLTNYSLVPLQILLEKVAATLEYLDLDDCGIIDSQVNAILPALSRCFELNTFSFCGNPISMATLENLLSHTIILKNLCVELYPAPRESYDADGTLCWSRFPQIRAELMKRVRDLRHPKRILFCTDCCPDCGNRSFYDLEADQCCC

SEQ ID NO: 1579 - protein, 2157 aa, Homo sapiens
MSDRSGPTAKGKDGKKYSSLNLFDTYKGKSLEIQKPAVAPRHGLQSLGKVAIARRMPPPANLPSLKAENKGNDPNVSLVPKDGTGWASKQEQSDPKSSDASTAQPPESQPLPASQTPASNQPKRPPAAPENTPLVPSGVKSWAQASVTHGAHGDGGRASSLLSRFSREEFPTLQAAGDQDKAAKERESAEQSSGPGPSLRPQNSTTWRDGGGRGPDELEGPDSKLHHGHDPRGGLQPSGPPQFPPYRGMMPPFMYPPYLPFPPPYGPQGPYRYPTPDGPSRFPRVAGPRGSGPPMRLVEPVGRPSILKEDNLKEFDQLDQENDDGWAGAHEEVDYTEKLKFSDEEDGRDSDEEGAEGHRDSQSASGEERPPEADGKKGNSPNSEPPTPKTAWAETSRPPETEPGPPAPKPPLPPPHRGPAGNWGPPGDYPDRGGPPCKPPAPEDEDEAWRQRRKQSSSEISLAVERARRRREEEERRMQEERRAACAEKLKRLDEKFGAPDKRLKAEPAAPPAAPSTPAPPPAVPKELPAPPAPPPASAPTPETEPEEPAQAPPAQSTPTPGVAAAPTLVSGGGSTSSTSSGSFEASPVEPQLPSKEGPEPPEEVPPPTTPPVPKVEPKGDGIGPTRQPPSQGLGYPKYQKSLPPRFQRQQQEQLLKQQQQHQWQQHQQGSAPPTPVPPSPPQPVTLGAVPAPQAPPPPPKALYPGALGRPPPMPPMNFDPRWMMIPPYVDPRLLQGRPPLDFYPPGVHPSGLVPRERSDSGGSSSEPFDRHAPAMLRERGTPPVDPKLAWVGDVFTATPAEPRPLTSPLRQAADEDDKGMRSETPPVPPPPPYLASYPGFPENGAPGPPISRFPLEEPGPRPLPWPPGSDEVAKIQTPPPKKEPPKEETAQLTGPEAGRKPARGVGSGGQGPPPPRRESRTETRWGPRPGSSRRGIPPEEPGAPPRRAGPIKKPPPPTKVEELPPKPLEQGDETPKPPKPDPLKITKGKLGGPKETPPNGNLSPAPRLRRDYSYERVGPTSCRGRGRGEYFARGRGFRGTYGGRGRGARSREFRSYREFRGDDGRGGGTGGPNHPPAPRGRTASETRSEGSEYEEIPKRRRQRGSETGSETHESDLAPSDKEAPTPKEGTLTQVPLAPPPPGAPPSPAPARFTARGGRVFTPRGVPSRRGRGGGRPPPQVCPGWSPPAKSLAPKKPPTGPLPPSKEPLKEKLIPGPLSPVARGGSNGGSNVGMEDGERPRRRRHGRAQQQDKPPRFRRLKQERENAARGSEGKPSLTLPASAPGPEEALTTVTVAPAPRRAAAKSPDLSNQNSDQANEEWETASESSDFTSERRGDKEAPPPVLLTPKAVGTPGGGGGGAVPGISAMSRGDLSQRAKDLSKRSFSSQRPGMERQNRRPGPGGKAGSSGSSSGGGGGGPGGRTGPGRGDKRSWPSPKNRSRPPEERPPGLPLPPPPPSSSAVFRLDQVIHSNPAGIQQALAQLSSRQGSVTAPGGHPRHKPGLPQAPQGPSPRPPTRYEPQRVNSGLSSDPHFEEPGPMVRGVGGTPRDSAGVSPFPPKRRERPPRKPELLQEESLPPPHSSGFLGSKPEGPGPQAESRDTGTEALTPHIWNRLHTATSRKSYRPSSMEPWMEPLSPFEDVAGTEMSQSDSGVDLSGDSQVSSGPCSQRSSPDGGLKGAAEGPPKRPGGSSPLNAVPCEGPPGSEPPRRPPPAPHDGDRKELPREQPLPPGPIGTERSQRTDRGTEPGPIRPSHRPGPPVQFGTSDKDSDLRLVVGDSLKAEKELTASVTEAIPVSRDWELLPSAAASAEPQSKNLDSGHCVPEPSSSGQRLYPEVFYGSAGPSSSQISGGAMDSQLHPNSGGFRPGTPSLHPYRSQPLYLPPGPAPPSALLSGLALKGQFLDFSTMQATELGKLPAGGVLYPPPSFLYSPAFCPSPLPDTSLLQVRQDLPSPSDFYSTPLQPGGQSGFLPSGAPAQQMLLPMVDSQLPVVNFGSLPPAPPPAPPPLSLLPVGPALQPPSLAVRPPPAPATRVLPSPARPFPASLGRAELHPVELKPFQDYQKLSSNLGGPGSSRTPPTGRSFSGLNSRLKATPSTYSGVFRTQRVDLYQQASPPDALRWIPKPWERTGPPPREGPSRRAEEPGSRGDKEPGLPPPR

SEQ ID NO: 1580 - protein, 2144 aa, Homo sapiens
MSDRSGPTAKGKDGKKYSSLNLFDTYKGKSLEIQKPAVAPRHGLQSLGKVAIARRMPPPANLPSLKAENKGNDPNVSLVPKDGTGWASKQEQSDPKSSDASTAQPPESQPLPASQTPASNQPKRPPAAPENTPLVPSGVKSWAQASVTHGAHGDGGRASSLLSRFSREEFPTLQAAGDQDKAAKERESAEQSSGPGPSLRPQNSTTWRDGGGRGPDELEGPDSKLHHGHDPRGGLQPSGPPQFPPYRGMMPPFMYPPYLPFPPPYGPQGPYRYPTPDGPSRFPRVAGPRGSGPPMRLVEPVGRPSILKEDNLKEFDQLDQENDDGWAGAHEEVDYTEKLKFSDEEDGRDSDEEGAEGHRDSQSASGEERPPEADGKKGNSPNSEPPTPKTAWAETSRPPETEPGPPAPKPPLPPGDYPDRGGPPCKPPAPEDEDEAWRQRRKQSSSEISLAVERARRRREEEERRMQEERRAACAEKLKRLDEKFGAPDKRLKAEPAAPPAAPSTPAPPPAVPKELPAPPAPPPASAPTPETEPEEPAQAPPAQSTPTPGVAAAPTLVSGGGSTSSTSSGSFEASPVEPQLPSKEGPEPPEEVPPPTTPPVPKVEPKGDGIGPTRQPPSQGLGYPKYQKSLPPRFQRQQQEQLLKQQQQHQWQQHQQGSAPPTPVPPSPPQPVTLGAVPAPQAPPPPPKALYPGALGRPPPMPPMNFDPRWMMIPPYVDPRLLQGRPPLDFYPPGVHPSGLVPRERSDSGGSSSEPFDRHAPAMLRERGTPPVDPKLAWVGDVFTATPAEPRPLTSPLRQAADEDDKGMRSETPPVPPPPPYLASYPGFPENGAPGPPISRFPLEEPGPRPLPWPPGSDEVAKIQTPPPKKEPPKEETAQLTGPEAGRKPARGVGSGGQGPPPPRRESRTETRWGPRPGSSRRGIPPEEPGAPPRRAGPIKKPPPPTKVEELPPKPLEQGDETPKPPKPDPLKITKGKLGGPKETPPNGNLSPAPRLRRDYSYERVGPTSCRGRGRGEYFARGRGFRGTYGGRGRGAQANSAVTESFEEMMGVEVGQGDQTTLLLPEAAMPARHGARVQSMRKSPSGAGSGAQKQAARPMRVIWLLQTRRLPHPRREHSPRSSRSPTTRSPTLHRAPARFTCPGVGESSLPEGAISPGPRRREAPPQVCPGWSPPAKSLAPKKPPTGPLPPSKEPLKEKLIPGPLSPVARGGSNGGSNVGMEDGERPRRRRHGRAQQQDKPPRFRRLKQERENAARGSEGKPSLTLPASAPGPEEALTTVTVAPAPRRAAAKSPDLSNQNSDQANEEWETASESSDFTSERRGDKEAPPPVLLTPKAVGTPGGGGGGAVPGISAMSRGDLSQRAKDLSKRSFSSQRPGMERQNRRPGPGGKAGSSGSSSGGGGGGPGGRTGPGRGDKRSWPSPKNRSRPPEERPPGLPLPPPPPSSSAVFRLDQVIHSNPAGIQQALAQLSSRQGSVTAPGGHPRHKPGLPQAPQGPSPRPPTRYEPQRVNSGLSSDPHFEEPGPMVRGVGGTPRDSAGVSPFPPKRRERPPRKPELLQEESLPPPHSSGFLGSKPEGPGPQAESRDTGTEALTPHIWNRLHTATSRKSYRPSSMEPWMEPLSPFEDVAGTEMSQSDSGVDLSGDSQVSSGPCSQRSSPDGGLKGAAEGPPKRPGGSSPLNAVPCEGPPGSEPPRRPPPAPHDGDRKELPREQPLPPGPIGTERSQRTDRGTEPGPIRPSHRPGPPVQFGTSDKDSDLRLVVGDSLKAEKELTASVTEAIPVSRDWELLPSAAASAEPQSKNLDSGHCVPEPSSSGQRLYPEVFYGSAGPSSSQISGGSHGLSITSKQWRLRPGTPSLHPYRSQPLYLPPGPAPPSALLSGLALKGQFLDFSTMQATELGKLPAGGVLYPPPSFLYSPAFCPSPLPDTSLLQVRQDLPSPSDFYSTPLQPGGQSGFLPSGAPAQQMLLPMVDSQLPVVNFGSLPPAPPPAPPPLSLLPVGPALQPPSLAVRPPPAPATRVLPSPARPFPASLGRAELHPVELKPFQDYQKLSSNLGGPGSSRTPPTGRSFSGLNSRLKATPSTYSGVFRTQRVDLYQQASPPDALRWIPKPWERTGPPPREGPSRRAEEPGSRGDKEPGLPPPR

SEQ ID NO: 1581 - protein, 2156 aa, Homo sapiens
MSDRSGPTAKGKDGKKYSSLNLFDTYKGKSLEIQKPAVAPRHGLQSLGKVAIARRMPPPANLPSLKAENKGNDPNVSLVPKDGTGWASKQEQSDPKSSDASTAQPPESQPLPASQTPASNQPKRPPAAPENTPLVPSGVKSWAQASVTHGAHGDGGRASSLLSRFSREEFPTLQAAGDQDKAAKERESAEQSSGPGPSLRPQNSTTWRDGGGRGPDELEGPDSKLHHGHDPRGGLQPSGPPQFPPYRGMMPPFMYPPYLPFPPPYGPQGPYRYPTPDGPSRFPRVAGPRGSGPPMRLVEPVGRPSILKEDNLKEFDQLDQENDDGWAGAHEEVDYTEKLKFSDEEDGRDSDEEGAEGHRDSQSASGEERPPEADGKKGNSPNSEPPTPKTAWAETSRPPETEPGPPAPKPPLPPPHRGPAGNWGPPGDYPDRGGPPCKPPAPEDEDEAWRQRRKQSSSEISLAVERARRRREEEERRMQEERRAACAEKLKRLDEKFGAPDKRLKAEPAAPPAAPSTPAPPPAVPKELPAPPAPPPASAPTPETEPEEPAQAPPAQSTPTPGVAAAPTLVSGGGSTSSTSSGSFEASPVEPQLPSKEGPEPPEEVPPPTTPPVPKVEPKGDGIGPTRQPPSQGLGYPKYQKSLPPRFQRQQQEQLLKQQQQHQWQQHQQGSAPPTPVPPSPPQPVTLGAVPAPQAPPPPPKALYPGALGRPPPMPPMNFDPRWMMIPPYVDPRLLQGRPPLDFYPPGVHPSGLVPRERSDSGGSSSEPFDRHAPAMLRERGTPPVDPKLAWVGDVFTATPAEPRPLTSPLRQAADEDDKGMRSETPPVPPPPPYLASYPGFPENGAPGPPISRFPLEEPGPRPLPWPPGSDEVAKIQTPPPKKEPPKEETAQLTGPEAGRKPARGVGSGGQGPPPPRRESRTETRWGPRPGSSRRGIPPEEPGAPPRRAGPIKKPPPPTKVEELPPKPLEQGDETPKPPKPDPLKITKGKLGGPKETPPNGNLSPAPRLRRDYSYERVGPTSCRGRGRGEYFARGRGFRGTYGGRGRGAQANSAVTESFEEMMGVEVGQGDQTTLLLPEAAMPARHGARVQSMRKSPSGAGSGAQKQAARPMRVIWLLQTRRLPHPRREHSPRSSRSPTTRSPTLHRAPARFTCPGVGESSLPEGAISPGPRRREAPPQVCPGWSPPAKSLAPKKPPTGPLPPSKEPLKEKLIPGPLSPVARGGSNGGSNVGMEDGERPRRRRHGRAQQQDKPPRFRRLKQERENAARGSEGKPSLTLPASAPGPEEALTTVTVAPAPRRAAAKSPDLSNQNSDQANEEWETASESSDFTSERRGDKEAPPPVLLTPKAVGTPGGGGGGAVPGISAMSRGDLSQRAKDLSKRSFSSQRPGMERQNRRPGPGGKAGSSGSSSGGGGGGPGGRTGPGRGDKRSWPSPKNRSRPPEERPPGLPLPPPPPSSSAVFRLDQVIHSNPAGIQQALAQLSSRQGSVTAPGGHPRHKPGLPQAPQGPSPRPPTRYEPQRVNSGLSSDPHFEEPGPMVRGVGGTPRDSAGVSPFPPKRRERPPRKPELLQEESLPPPHSSGFLGSKPEGPGPQAESRDTGTEALTPHIWNRLHTATSRKSYRPSSMEPWMEPLSPFEDVAGTEMSQSDSGVDLSGDSQVSSGPCSQRSSPDGGLKGAAEGPPKRPGGSSPLNAVPCEGPPGSEPPRRPPPAPHDGDRKELPREQPLPPGPIGTERSQRTDRGTEPGPIRPSHRPGPPVQFGTSDKDSDLRLVVGDSLKAEKELTASVTEAIPVSRDWELLPSAAASAEPQSKNLDSGHCVPEPSSSGQRLYPEVFYGSAGPSSSQISGGSHGLSITSKQWRLRPGTPSLHPYRSQPLYLPPGPAPPSALLSGLALKGQFLDFSTMQATELGKLPAGGVLYPPPSFLYSPAFCPSPLPDTSLLQVRQDLPSPSDFYSTPLQPGGQSGFLPSGAPAQQMLLPMVDSQLPVVNFGSLPPAPPPAPPPLSLLPVGPALQPPSLAVRPPPAPATRVLPSPARPFPASLGRAELHPVELKPFQDYQKLSSNLGGPGSSRTPPTGRSFSGLNSRLKATPSTYSGVFRTQRVDLYQQASPPDALRWIPKPWERTGPPPREGPSRRAEEPGSRGDKEPGLPPPR

SEQ ID NO: 1582 - protein, 1533 aa, Homo sapiens
MSDRSGPTAKGKDGKKYSSLNLFDTYKGKSLEIQKPAVAPRHGLQSLGKVAIARRMPPPANLPSLKAENKGNDPNVSLVPKDGTGWASKQEQSDPKSSDASTAQPPESQPLPASQTPASNQPKRPPAAPENTPLVPSGVKSWAQASVTHGAHGDGGRASSLLSRFSREEFPTLQAAGDQDKAAKERESAEQSSGPGPSLRPQNSTTWRDGGGRGPDELEGPDSKLHHGHDPRGGLQPSGPPQFPPYRGMMPPFMYPPYLPFPPPYGPQGPYRYPTPDGPSRFPRVAGPRGSGPPMRLVEPVGRPSILKEDNLKEFDQLDQENDDGWAGAHEEVDYTEKLKFSDEEDGRDSDEEGAEGHRDSQSASGEERPPEADGKKGNSPNSEPPTPKTAWAETSRPPETEPGPPAPKPPLPPPHRGPAGNWGPPGDYPDRGGPPCKPPAPEDEDEAWRQRRKQSSSEISLAVERARRRREEEERRMQEERRAACAEKLKRLDEKFGAPDKRLKAEPAAPPAAPSTPAPPPAVPKELPAPPAPPPASAPTPETEPEEPAQAPPAQSTPTPGVAAAPTLVSGGGSTSSTSSGSFEASPVEPQLPSKEGPEPPEEVPPPTTPPVPKVEPKGDGIGPTRQPPSQGLGYPKYQKSLPPRFQRQQQEQLLKQQQQHQWQQHQQGSAPPTPVPPSPPQPVTLGAVPAPQAPPPPPKALYPGALGRPPPMPPMNFDPRWMMIPPYVDPRLLQGRPPLDFYPPGVHPSGLVPRERSDSGGSSSEPFDRHAPAMLRERGTPPVDPKLAWVGDVFTATPAEPRPLTSPLRQAADEDDKGMRSETPPVPPPPPSSSAVFRLDQVIHSNPAGIQQALAQLSSRQGSVTAPGGHPRHKPGLPQAPQGPSPRPPTRYEPQRVNSGLSSDPHFEEPGPMVRGVGGTPRDSAGVSPFPPKRRERPPRKPELLQEESLPPPHSSGFLGSKPEGPGPQAESRDTGTEALTPHIWNRLHTATSRKSYRPSSMEPWMEPLSPFEDVAGTEMSQSDSGVDLSGDSQVSSGPCSQRSSPDGGLKGAAEGPPKRPGGSSPLNAVPCEGPPGSEPPRRPPPAPHDGDRKELPREQPLPPGPIGTERSQRTDRGTEPGPIRPSHRPGPPVQFGTSDKDSDLRLVVGDSLKAEKELTASVTEAIPVSRDWELLPSAAASAEPQSKNLDSGHCVPEPSSSGQRLYPEVFYGSAGPSSSQISGGAMDSQLHPNSGGFRPGTPSLHPYRSQPLYLPPGPAPPSALLSGLALKGQFLDFSTMQATELGKLPAGGVLYPPPSFLYSPAFCPSPLPDTSLLQVRQDLPSPSDFYSTPLQPGGQSGFLPSGAPAQQMLLPMVDSQLPVVNFGSLPPAPPPAPPPLSLLPVGPALQPPSLAVRPPPAPATRVLPSPARPFPASLGRAELHPVELKPFQDYQKLSSNLGGPGSSRTPPTGRSFSGLNSRLKATPSTYSGVFRTQRVDLYQQASPPDALRWIPKPWERTGPPPREGPSRRAEEPGSRGDKEPGLPPPR

SEQ ID NO: 1583 - protein, 1150 aa, Homo sapiens
MAPPLRPLARLRPPGMLLRALLLLLLLSPLPGVWCFSELSFVKEPQDVTVTRKDPVVLDCQAHGEVPIKVTWLKNGAKMSENKRIEVLSNGSLYISEVEGRRGEQSDEGFYQCLAMNKYGAILSQKAHLALSTISAFEVQPISTEVHEGGVARFACKISSHPPAVITWEFNRTTLPMTMDRITALPTGVLQIYDVSQRDSGNYRCIAATVAHRRKSMEASLTVIPAKESKSFHTPTIIAGPQNITTSLHQTVVLECMATGNPKPIISWSRLDHKSIDVFNTRVLGNGNLMISDVRLQHAGVYVCRATTPGTRNFTVAMATLTVLAPPSFVEWPESLTRPRAGTARFVCQAEGIPSPKMSWLKNGRKIHSNGRIKMYNSKLVINQIIPEDDAIYQCMAENSQGSILSRARLTVVMSEDRPSAPYNVHAETMSSSAILLAWERPLYNSDKVIAYSVHYMKAEGLNNEEYQVVIGNDTTHYIIDDLEPASNYTFYIVAYMPMGASQMSDHVTQNTLEDVPLRPPEISLTSRSPTDILISWLPIPAKYRRGQVVLYRLSFRLSTENSIQVLELPGTTHEYLLEGLKPDSVYLVRITAATRVGLGESSVWTSHRTPKATSVKAPKSPELHLEPLNCTTISVRWQQDVEDTAAIQGYKLYYKEEGQQENGPIFLDTKDLLYTLSGLDPRRKYHVRLLAYNNIDDGYQADQTVSTPGCVSVRDRMVPPPPPPHHLYAKANTSSSIFLHWRRPAFTAAQIINYTIRCNPVGLQNASLVLYLQTSETHMLVQGLEPNTKYEFAVRLHVDQLSSPWSPVVYHSTLPEAPAGPPVGVKVTLIEDDTALVSWKPPDGPETVVTRYTILYASRKAWIAGEWQVLHREGAITMALLENLVAGNVYIVKISASNEVGEGPFSNSVELAVLPKETSESNQRPKRLDSADAKVYSGYYHLDQKSMTGIAVGVGIALTCILICVLILIYRSKARKSSASKTAQNGTQQLPRTSASLASGNEVGKNLEGAVGNEESLMPMIMPNSFIDAKGGTDLIINSYGPIIKNNSKKKWFFFQDSKKIQVEQPQRRFTPAVCFYQPGTTVLISDEDSPSSPGQTTSFSRPFGVAADTEHSANSEGSHETGDSGRFSHESNDEIHLSSVISTTPPNL

SEQ ID NO: 1584 - protein, 420 aa, Homo sapiens
METFDPTELPELLKLYYRRLFPYSQYYRWLNYGGVIKNYFQHREFSFTLKDDIYIRYQSFNNQSDLEKEMQKMNPYKIDIGAVYSHRPNQHNTVKLGAFQAQEKELVFDIDMTDYDDVRRCCSSADICPKCWTLMTMAIRIIDRALKEDFGFKHRLWVYSGRRGVHCWVCDESVRKLSSAVRSGIVEYLSLVKGGQDVKKKVHLSEKIHPFIRKSINIIKKYFEEYALVNQDILENKESWDKILALVPETIHDELQQSFQKSHNSLQRWEHLKKVASRYQNNIKNDKYGPWLEWEIMLQYCFPRLDINVSKGINHLLKSPFSVHPKTGRISVPIDLQKVDQFDPFTVPTISFICRELDAISTNEEEKEENEAESDVKHRTRDYKKTSLAPYVKVFEHFLENLDKSRKGELLKKSDLQKDF

SEQ ID NO: 1585 - protein, 138 aa, Homo sapiens
MPASATAAWHCPPLCLPPLPASAPTSPPNPATRPAPGPGRRARCPQSAHPAPTRGALTFWAPGSWPRVLLVPRSPGPVLRAPRLPHPAARARRRAWHGARLPGSPARAGRTFQRGLVSNSWAHAIFLPRPPNVLELQV

SEQ ID NO: 1586 - protein, 871 aa, Homo sapiens
MMPPPFMPPPGIPPPFPPMGLPPMSQRPPAIPPMPPGILPPMLPPMGAPPPLTQIPGMVPPMMPGMLMPAVPVTAATAPGADTASSAVAGTGPPRALWSEHVAPDGRIYYYNADDKQSVWEKPSVLKSKAELLLSQCPWKEYKSDTGKPYYYNNQSKESRWTRPKDLDDLEVLVKQEAAGKQQQQLPQTLQPQPPQPQPDPPPVPPGPTPVPTGLLEPEPGGSEDCDVLEATQPLEQGFLQQLEEGPSSSGQHQPQQEEEESKPEPERSGLSWSNREKAKQAFKELLRDKAVPSNASWEQAMKMVVTDPRYSALPKLSEKKQAFNAYKAQREKEEKEEARLRAKEAKQTLQHFLEQHERMTSTTRYRRAEQTFGELEVWAVVPERDRKEVYDDVLFFLAKKEKEQAKQLRRRNIQALKSILDGMSSVNFQTTWSQAQQYLMDNPSFAQDHQLQNMDKEDALICFEEHIRALEREEEEERERARLRERRQQRKNREAFQTFLDELHETGQLHSMSTWMELYPAVSTDVRFANMLGQPGSTPLDLFKFYVEELKARFHDEKKIIKDILKDRGFCVEVNTAFEDFAHVISFDKRAAALDAGNIKLTFNSLLEKAEAREREREKEEARRMRRREAAFRSMLRQAVPALELGTAWEEVRERFVCDSAFEQITLESERIRLFREFLQVLEQTECQHLHTKGRKHGRKGKKHHHKRSHSPSGSESEEEELPPPSLRPPKRRRRNPSESGSEPSSSLDSVESGGAALGGRGSPSSHLLGADHGLRKAKKPKKKTKKRRHKSNSPESETDPEEKAGKESDEKEQEQDKDRELQQAELPNRSPGFGIKKEKTGWDTSESELSEGELERRRRTLLQQLDDHQ

SEQ ID NO: 1587 - protein, 858 aa, Homo sapiens
MPPPGIPPPFPPMGLPPMSQRPPAIPPMPPGILPPMLPPMGAPPPLTQIPGMVPPMMPGMLMPAVPVTAATAPGADTASSAVAGTGPPRALWSEHVAPDGRIYYYNADDKQSVWEKPSVLKSKAELLLSQCPWKEYKSDTGKPYYYNNQSKESRWTRPKDLDDLEVLVKQEAAGKQQQQLPQTLQPQPPQPQPDPPPVPPGPTPVPTGLLEPEPGGSEDCDVLEATQPLEQGFLQQLEEGPSSSGQHQPQQEEEESKPEPERSGLSWSNREKAKQAFKELLRDKAVPSNASWEQAMKMVVTDPRYSALPKLSEKKQAFNAYKAQREKEEKEEARLRAKEAKQTLQHFLEQHERMTSTTRYRRAEQTFGELEVWAVVPERDRKEVYDDVLFFLAKKEKEQAKQLRRRNIQALKSILDGMSSVNFQTTWSQAQQYLMDNPSFAQDHQLQNMDKEDALICFEEHIRALEREEEEERERARLRERRQQRKNREAFQTFLDELHETGQLHSMSTWMELYPAVSTDVRFANMLGQPGSTPLDLFKFYVEELKARFHDEKKIIKDILKVNTAFEDFAHVISFDKRAAALDAGNIKLTFNSLLEKAEAREREREKEEARRMRRREAAFRSMLRQAVPALELGTAWEEVRERFVCDSAFEQITLESERIRLFREFLQVLEQTECQHLHTKGRKHGRKGKKHHHKRSHSPSGSESEEEELPPPSLRPPKRRRRNPSESGSEPSSSLDSVESGGAALGGRGSPSSHLLGADHGLRKAKKPKKKTKKRRHKSNSPESETDPEEKAGKESDEKEQEQDKDRELQQAELPNRSPGFGIKKEKTGWDTSESELSEGELERRRRTLLQQLDDHQ

SEQ ID NO: 1588 - protein, 870 aa, Homo sapiens
MMPPPFMPPPGIPPPFPPMGLPPMSQRPPAIPPMPPGILPPMLPPMGAPPPLTQIPGMVPPMMPGMLMPAVPVTAATAPGADTASSAVAGTGPPRALWSEHVAPDGRIYYYNADDKQSVWEKPSVLKSKAELLLSQCPWKEYKSDTGKPYYYNNQSKESRWTRPKDLDDLEVLVKQEAAGKQQQQLPQTLQPQPPQPQPDPPPVPPGPTPVPTGLLEPEPGGSEDCDVLEATQPLEQGFLQQLEEGPSSSGQHQPQQEEEESKPEPERSGLSWSNREKAKQAFKELLRDKAVPSNASWEQAMKMVVTDPRYSALPKLSEKKQAFNAYKAQREKEEKEEARLRAKEAKQTLQHFLEQHERMTSTTRYRRAEQTFGELEVWAVVPERDRKEVYDDVLFFLAKKEKEQAKQLRRRNIQALKSILDGMSSVNFQTTWSQAQQYLMDNPSFAQDHQLQNMDKEDALICFEEHIRALEREEEEERERARLRERRQQRKNREAFQTFLDELHETGQLHSMSTWMELYPAVSTDVRFANMLGQPGSTPLDLFKFYVEELKARFHDEKKIIKDILKDRGFCVEVNTAFEDFAHVISFDKRAAALDAGNIKLTFNSLLEKAEAREREREKEEARRMRRREAAFRSMLRQAVPALELGTAWEEVRERFVCDSAFEQITLESERIRLFREFLQVLETECQHLHTKGRKHGRKGKKHHHKRSHSPSGSESEEEELPPPSLRPPKRRRRNPSESGSEPSSSLDSVESGGAALGGRGSPSSHLLGADHGLRKAKKPKKKTKKRRHKSNSPESETDPEEKAGKESDEKEQEQDKDRELQQAELPNRSPGFGIKKEKTGWDTSESELSEGELERRRRTLLQQLDDHQ

SEQ ID NO: 1589 - protein, 195 aa, Homo sapiens
MMPPPGIPPPFPPMGLPPMSQRPPAIPPMPPGILPPMLPPMGAPPPLTQIPGMVPPMMPGMLMPAVPVTAAVSTRGQQVAGSALQSRESDLECRTMTSILSLFSSHPPRSPAALPTLKSFSPAMYSALLVSHSSPKAYTFSCYSRALSSSLKEHTYPHRATHCGHMNIVLHILFVPRRVSSTWGSCCAFLCYRSV

SEQ ID NO: 1590 - protein, 395 aa, Homo sapiens
MVSAAGLSGDGKMRGVLLVLLGLLYSSTSCGVQKASVFYGPDPKEGLVSSMEFPWVVSLQDSQYTHLAFGCILSEFWVLSIASAIQNRKDIVVIVGISNMDPSKIAHTEYPVNTIIIHEDFDNNSMSNNIALLKTDTAMHFGNLVQSICFLGRMLHTPPVLQNCWVSGWNPTSATGNHMTMSVLRKIFVKDLDMCPLYKLQKTECGSHTKEETKTACLGDPGSPMMCQLQQFDLWVLRGVLNFGGETCPGLFLYTKVEDYSKWITSKAERAGPPLSSLHHWEKLISFSHHGPNATMTQKTYSDSELGHVGSYLQGQRRTITHSRLGNSSRDSLDVREKDVKESGRSPEASVQPLYYDYYGGEVGEGRIFAGQNRLYQPEEIILVSFVLVFFCSSI

SEQ ID NO: 1591 - protein, 428 aa, Homo sapiens
MITGVFSMRLWTPVGVLTSLAYCLHQRRVALAELQEADGQCPVDRSLLKLKMVQVVFRHGARSPLKPLPLEEQVEWNPQLLEVPPQTQFDYTVTNLAGGPKPYSPYDSQYHETTLKGGMFAGQLTKVGMQQMFALGERLRKNYVEDIPFLSPTFNPQEVFIRSTNIFRNLESTRCLLAGLFQCQKEGPIIIHTDEADSEVLYPNYQSCWSLRQRTRGRRQTASLQPGISEDLKKVKDRMGIDSSDKVDFFILLDNVAAEQAHNLPSCPMLKRFARMIEQRAVDTSLYILPKEDRESLQMAVGPFLHILESNLLKAMDSATAPDKIRKLYLYAAHDVTFIPLLMTLGIFDHKWPPFAVDLTMELYQHLESKEWFVQLYYHGKEQVPRGCPDGLCPLDMFLNAMSVYTLSPEKYHALCSQTQVMEVGNEE

SEQ ID NO: 1592 - protein, 271 aa, Homo sapiens
MITGVFSMRLWTPVGVLTSLAYCLHQRRVALAELQEADGQCPVDRSLLKLKMVQVVFRHGARSPLKPLPLEEQVEWNPQLLEVPPQTQFDYTVTNLAGGPKPYSPYDSQYHETTLKGGMFAGQLTKVGMQQMFALGERLRKNYVEDIPFLSPTFNPQEVFIRSTNIFRNLESTRCLLAGLFQCQKEGPIIIHTDEADSEVLYPNYQSCWSLRQRTRGRRQTASLQPGISEDLKKVKDRMGIDSSDKVDFFILLDNVAAEQEKMGSCRFHGS

SEQ ID NO: 1593 - protein, 177 aa, Homo sapiens
MAVANSSPVNPVVFFDVSIGGQEVGRMKIELFADVVPKTAENFRQFCTGEFRKDGVPIGYKGSTFHRVIKDFMIQGGDFVNGDGTGVASIYRGPFADENFKLRHSAPGLLSMANSGPSTNGCQFFITCSKCDWLDGKHVVFGKIIDGLLVMRKIENVPTGPNNKPKLPVVISQCGEM

SEQ ID NO: 1594 - protein, 134 aa, Homo sapiens
MIAGDSDRRKDGVPIGYKGSTFHRVIKDFMIQGGDFVNGDGTGVASIYRGPFADENFKLRHSAPGLLSMANSGPSTNGCQFFITCSKCDWLDGKHVVFGKIIDGLLVMRKIENVPTGPNNKPKLPVVISQCGEM

SEQ ID NO: 1595 - protein, 415 aa, Homo sapiens
MAEIPLYFVDLQDDLDDYGFEDYGTDCDNMRVTAFLDIPGQDNLPPLTRLEKYAFSENTFNRQIIARGLLDIFRDFGNNEEDFLTVMEIVVRLSEDAEPTVRTELMEQIPPIAIFLQENRSNFPVVLSEYLIPIVVRYLTDPNNQIICKMASMLSKSTVERLLLPRFCELCGDRKLFQVRKVCAANFGDICHAVGQEATEKFLIPKFFELCSDAVWGMRKACAECFTAVSHSSSPGVRRTQLFPLFIRLVSDPCRWVHQAAFQSLGPFTSTFANPSRAGLYLREDGALSIWPLTQDLDSGFASGSPAPSSGGNTSPASLTRSAKPVRSEPELPVEGTSAKTSDCPHSSSSSDGPAESPVESCVSAGAEWTRVSPETSACSKLSDMNDLPISSYPGSDSWACPGNTEDVFSHFLYW

SEQ ID NO: 1596 - protein, 272 aa, Homo sapiens
MQIICKMASMLSKSTVERLLLPRFCELCGDRKLFQVRKVCAANFGDICHAVGQEATEKFLIPKFFELCSDAVWGMRKACAECFTAVSHSSSPGVRRTQLFPLFIRLVSDPCRWVHQAAFQSLGPFTSTFANPSRAGLYLREDGALSIWPLTQDLDSGFASGSPAPSSGGNTSPASLTRSAKPVRSEPELPVEGTSAKTSDCPHSSSSSDGPAESPVESCVSAGAEWTRVSPETSACSKLSDMNDLPISSYPGSDSWACPGNTEDVFSHFLYW

SEQ ID NO: 1597 - protein, 201 aa, Homo sapiens
MAATALLEAGLARVLFYPTLLYTLFRGKVPGRAHRDWYHRIDPTVLLGALPLRSLTRQLVQDENVRGVITMNEEYETRFLCNSSQEWKRLGVEQLRLSTVDMTGIPTLDNLQKGVQFALKYQSLGQCVYVHCKAGRSRSATMVAAYLIQVHKWSPEEAVRAIAKIRSYIHIRPGQLDVLKEFHKQITARATKDGTFVISKT

SEQ ID NO: 1598 - protein, 137 aa, Homo sapiens
MAATALLEAGLARVLFYPTLLYTLFRGKVPGRAHRDWYHRIDPTVLLGALPLRSLTRQLVQDENVRGVITMNEEYETRFLCNSSQVHKWSPEEAVRAIAKIRSYIHIRPGQLDVLKEFHKQITARATKDGTFVISKT

SEQ ID NO: 1599 - protein, 151 aa, Homo sapiens
MAATALLEAGLARVLFYPTLLYTLFRGKVPGRAHRDWYHRIDPTVLLGALPLRSLTRQVSRAGEPGPLPRPRRSVPVGPLGSPPSLLSHLFASAAGTGRERARGDHHERGVRDEVPVQLFTGAQMESRGGCKSHRQDPVIHPHQAWPAGCS

SEQ ID NO: 1600 - protein, 1997 aa, Homo sapiens
MLSHGAGLALWITLSLLQTGLAEPERCNFTLAESKASSHSVSIQWRILGSPCNFSLIYSSDTLGAALCPTFRIDNTTYGCNLQDLQAGTIYNFRIISLDEERTVVLQTDPLPPARFGVSKEKTTSTSLHVWWTPSSGKVTSYEVQLFDENNQKIQGVQIQESTSWNEYTFFNLTAGSKYNIAITAVSGGKRSFSVYTNGSTVPSPVKDIGISTKANSLLISWSHGSGNVERYRLMLMDKGILVHGGVVDKHATSYAFHGLTPGYLYNLTVMTEAAGLQNYRWKLVRTAPMEVSNLKVTNDGSLTSLKVKWQRPPGNVDSYNITLSHKGTIKESRVLAPWITETHFKELVPGRLYQVTVSCVSGELSAQKMAVGRTFPDKVANLEANNNGRMRSLVVSWSPPAGDWEQYRILLFNDSVVLLNITVGKEETQYVMDDTGLVPGRQYEVEVIVESGNLKNSERCQGRTVPLAVLQLRVKHANETSLSIMWQTPVAEWEKYIISLADRDLLLIHKSLSKDAKEFTFTDLVPGRKYMATVTSISGDLKNSSSVKGRTVPAQVTDLHVANQGMTSSLFTNWTQAQGDVEFYQVLLIHENVVIKNESISSETSRYSFHSLKSGSLYSVVVTTVSGGISSRQVVVEGRTVPSSVSGVTVNNSGRNDYLSVSWLLAPGDVDNYEVTLSHDGKVVQSLVIAKSVRECSFSSLTPGRLYTVTITTRSGKYENHSFSQERTVPDKVQGVSVSNSARSDYLRVSWVHATGDFDHYEVTIKNKNNFIQTKSIPKSENECVFVQLVPGRLYSVTVTTKSGQYEANEQGNGRTIPEPVKDLTLRNRSTEDLHVTWSGANGDVDQYEIQLLFNDMKVFPPFHLVNTATEYRFTSLTPGRQYKILVLTISGDVQQSAFIEGFTVPSAVKNIHISPNGATDSLTVNWTPGGGDVDSYTVSAFRHSQKVDSQTIPKHVFEHTFHRLEAGEQYQIMIASVSGSLKNQINVVGRTVPASVQGVIADNAYSSYSLIVSWQKAAGVAERYDILLLTENGILLRNTSEPATTKQHKFEDLTPGKKYKIQILTVSGGLFSKEAQTEGRTVPAAVTDLRITENSTRHLSFRWTASEGELSWYNIFLYNPDGNLQERAQVDPLVQSFSFQNLLQGRMYKMVIVTHSGELSNESFIFGRTVPASVSHLRGSNRNTTDSLWFNWSPASGDFDFYELILYNPNGTKKENWKDKDLTEWRFQGLVPGRKYVLWVVTHSGDLSNKVTAESRTAPSPPSLMSFADIANTSLAITWKGPPDWTDYNDFELQWLPRDALTVFNPYNNRKSEGRIVYGLRPGRSYQFNVKTVSGDSWKTYSKPIFGSVRTKPDKIQNLHCRPQNSTAIACSWIPPDSDFDGYSIECRKMDTQEVEFSRKLEKEKSLLNIMMLVPHKRYLVSIKVQSAGMTSEVVEDSTITMIDRPPPPPPHIRVNEKDVLISKSSINFTVNCSWFSDTNGAVKYFTVVVREADGSDELKPEQQHPLPSYLEYRHNASIRVYQTNYFASKCAENPNSNSKSFNIKLGAEMESLGGKCDPTQQKFCDGPLKPHTAYRISIRAFTQLFDEDLKEFTKPLYSDTFFSLPITTESEPLFGAIEGVSAGLFLIGMLVAVVALLICRQKVSHGRERPSARLSIRRDRPLSVHLNLGQKGNRKTSCPIKINQFEGHFMKLQADSNYLLSKEYEELKDVGRNQSCDIALLPENRGKNRYNNILPYDATRVKLSNVDDDPCSDYINASYIPGNNFRREYIVTQGPLPGTKDDFWKMVWEQNVHNIVMVTQCVEKGRVKCDHYWPADQDSLYYGDLILQMLSESVLPEWTIREFKICGEEQLDAHRLIRHFHYTVWPDHGVPETTQSLIQFVRTVRDYINRSPGAGPTVVHCSAGVGRTGTFIALDRILQQLDSKDSVDIYGAVHDLRLHRVHMVQTECQYVYLHQCVRDVLRARKLRSEQENPLFPIYENVNPEYHRDPVYSRH

SEQ ID NO: 1601 - protein, 1907 aa, Homo sapiens
MLSHGAGLALWITLSLLQTGLAEPERCNFTLAESKASSHSVSIQWRILGSPCNFSLIYSSDTLGAALCPTFRIDNTTYGCNLQDLQAGTIYNFRIISLDEERTVVLQTDPLPPARFGVSKEKTTSTSLHVWWTPSSGKVTSYEVQLFDENNQKIQGVQIQESTSWNEYTFFNLTAGSKYNIAITAVSGGKRSFSVYTNGSTVPSPVKDIGISTKANSLLISWSHGSGNVERYRLMLMDKGILVHGGVVDKHATSYAFHGLTPGYLYNLTVMTEAAGLQNYRWKLVRTAPMEVSNLKVTNDGSLTSLKVKWQRPPGNVDSYNITLSHKGTIKESRVLAPWITETHFKELVPGRLYQVTVSCVSGELSAQKMAVGRTFPLAVLQLRVKHANETSLSIMWQTPVAEWEKYIISLADRDLLLIHKSLSKDAKEFTFTDLVPGRKYMATVTSISGDLKNSSSVKGRTVPAQVTDLHVANQGMTSSLFTNWTQAQGDVEFYQVLLIHENVVIKNESISSETSRYSFHSLKSGSLYSVVVTTVSGGISSRQVVVEGRTVPSSVSGVTVNNSGRNDYLSVSWLLAPGDVDNYEVTLSHDGKVVQSLVIAKSVRECSFSSLTPGRLYTVTITTRSGKYENHSFSQERTVPDKVQGVSVSNSARSDYLRVSWVHATGDFDHYEVTIKNKNNFIQTKSIPKSENECVFVQLVPGRLYSVTVTTKSGQYEANEQGNGRTIPEPVKDLTLRNRSTEDLHVTWSGANGDVDQYEIQLLFNDMKVFPPFHLVNTATEYRFTSLTPGRQYKILVLTISGDVQQSAFIEGFTVPSAVKNIHISPNGATDSLTVNWTPGGGDVDSYTVSAFRHSQKVDSQTIPKHVFEHTFHRLEAGEQYQIMIASVSGSLKNQINVVGRTVPASVQGVIADNAYSSYSLIVSWQKAAGVAERYDILLLTENGILLRNTSEPATTKQHKFEDLTPGKKYKIQILTVSGGLFSKEAQTEGRTVPAAVTDLRITENSTRHLSFRWTASEGELSWYNIFLYNPDGNLQERAQVDPLVQSFSFQNLLQGRMYKMVIVTHSGELSNESFIFGRTVPASVSHLRGSNRNTTDSLWFNWSPASGDFDFYELILYNPNGTKKENWKDKDLTEWRFQGLVPGRKYVLWVVTHSGDLSNKVTAESRTAPSPPSLMSFADIANTSLAITWKGPPDWTDYNDFELQWLPRDALTVFNPYNNRKSEGRIVYGLRPGRSYQFNVKTVSGDSWKTYSKPIFGSVRTKPDKIQNLHCRPQNSTAIACSWIPPDSDFDGYSIECRKMDTQEVEFSRKLEKEKSLLNIMMLVPHKRYLVSIKVQSAGMTSEVVEDSTITMIDRPPPPPPHIRVNEKDVLISKSSINFTVNCSWFSDTNGAVKYFTVVVREADGSDELKPEQQHPLPSYLEYRHNASIRVYQTNYFASKCAENPNSNSKSFNIKLGAEMESLGGKCDPTQQKFCDGPLKPHTAYRISIRAFTQLFDEDLKEFTKPLYSDTFFSLPITTESEPLFGAIEGVSAGLFLIGMLVAVVALLICRQKVSHGRERPSARLSIRRDRPLSVHLNLGQKGNRKTSCPIKINQFEGHFMKLQADSNYLLSKEYEELKDVGRNQSCDIALLPENRGKNRYNNILPYDATRVKLSNVDDDPCSDYINASYIPGNNFRREYIVTQGPLPGTKDDFWKMVWEQNVHNIVMVTQCVEKGRVKCDHYWPADQDSLYYGDLILQMLSESVLPEWTIREFKICGEEQLDAHRLIRHFHYTVWPDHGVPETTQSLIQFVRTVRDYINRSPGAGPTVVHCSAGVGRTGTFIALDRILQQLDSKDSVDIYGAVHDLRLHRVHMVQTECQYVYLHQCVRDVLRARKLRSEQENPLFPIYENVNPEYHRDPVYSRH

SEQ ID NO: 1602 - protein, 2215 aa, Homo sapiens
MEAEFYMVILTCLIFRNSEGFQIVHVQKQQCLFKNEKVVVGSCNRTIQNQQWMWTEDEKLLHVKSALCLAISNSSRGPSRSAILDRCSQAPRWTCYDQEGFLEVENASLFLQKQGSRVVVKKARKYLHSWMKIDVNKEGKLVNESLCLQKAGLGAEVSVRSTRNTAPPQILTTFNAVPDGLVFLIRNTTEAFIRNAAENYSQNSSERQHPNLHMTGITDTSWVLSTTQPFSSTTEETGLAEPERCNFTLAESKASSHSVSIQWRILGSPCNFSLIYSSDTLGAALCPTFRIDNTTYGCNLQDLQAGTIYNFRIISLDEERTVVLQTDPLPPARFGVSKEKTTSTSLHVWWTPSSGKVTSYEVQLFDENNQKIQGVQIQESTSWNEYTFFNLTAGSKYNIAITAVSGGKRSFSVYTNGSTVPSPVKDIGISTKANSLLISWSHGSGNVERYRLMLMDKGILVHGGVVDKHATSYAFHGLTPGYLYNLTVMTEAAGLQNYRWKLVRTAPMEVSNLKVTNDGSLTSLKVKWQRPPGNVDSYNITLSHKGTIKESRVLAPWITETHFKELVPGRLYQVTVSCVSGELSAQKMAVGRTFPDKVANLEANNNGRMRSLVVSWSPPAGDWEQYRILLFNDSVVLLNITVGKEETQYVMDDTGLVPGRQYEVEVIVESGNLKNSERCQGRTVPLAVLQLRVKHANETSLSIMWQTPVAEWEKYIISLADRDLLLIHKSLSKDAKEFTFTDLVPGRKYMATVTSISGDLKNSSSVKGRTVPAQVTDLHVANQGMTSSLFTNWTQAQGDVEFYQVLLIHENVVIKNESISSETSRYSFHSLKSGSLYSVVVTTVSGGISSRQVVVEGRTVPSSVSGVTVNNSGRNDYLSVSWLLAPGDVDNYEVTLSHDGKVVQSLVIAKSVRECSFSSLTPGRLYTVTITTRSGKYENHSFSQERTVPDKVQGVSVSNSARSDYLRVSWVHATGDFDHYEVTIKNKNNFIQTKSIPKSENECVFVQLVPGRLYSVTVTTKSGQYEANEQGNGRTIPEPVKDLTLRNRSTEDLHVTWSGANGDVDQYEIQLLFNDMKVFPPFHLVNTATEYRFTSLTPGRQYKILVLTISGDVQQSAFIEGFTVPSAVKNIHISPNGATDSLTVNWTPGGGDVDSYTVSAFRHSQKVDSQTIPKHVFEHTFHRLEAGEQYQIMIASVSGSLKNQINVVGRTVPASVQGVIADNAYSSYSLIVSWQKAAGVAERYDILLLTENGILLRNTSEPATTKQHKFEDLTPGKKYKIQILTVSGGLFSKEAQTEGRTVPAAVTDLRITENSTRHLSFRWTASEGELSWYNIFLYNPDGNLQERAQVDPLVQSFSFQNLLQGRMYKMVIVTHSGELSNESFIFGRTVPASVSHLRGSNRNTTDSLWFNWSPASGDFDFYELILYNPNGTKKENWKDKDLTEWRFQGLVPGRKYVLWVVTHSGDLSNKVTAESRTAPSPPSLMSFADIANTSLAITWKGPPDWTDYNDFELQWLPRDALTVFNPYNNRKSEGRIVYGLRPGRSYQFNVKTVSGDSWKTYSKPIFGSVRTKPDKIQNLHCRPQNSTAIACSWIPPDSDFDGYSIECRKMDTQEVEFSRKLEKEKSLLNIMMLVPHKRYLVSIKVQSAGMTSEVVEDSTITMIDRPPPPPPHIRVNEKDVLISKSSINFTVNCSWFSDTNGAVKYFTVVVREADGSDELKPEQQHPLPSYLEYRHNASIRVYQTNYFASKCAENPNSNSKSFNIKLGAEMESLGGKCDPTQQKFCDGPLKPHTAYRISIRAFTQLFDEDLKEFTKPLYSDTFFSLPITTESEPLFGAIEGVSAGLFLIGMLVAVVALLICRQKVSHGRERPSARLSIRRDRPLSVHLNLGQKGNRKTSCPIKINQFEGHFMKLQADSNYLLSKEYEELKDVGRNQSCDIALLPENRGKNRYNNILPYDATRVKLSNVDDDPCSDYINASYIPGNNFRREYIVTQGPLPGTKDDFWKMVWEQNVHNIVMVTQCVEKGRVKCDHYWPADQDSLYYGDLILQMLSESVLPEWTIREFKICGEEQLDAHRLIRHFHYTVWPDHGVPETTQSLIQFVRTVRDYINRSPGAGPTVVHCSAGVGRTGTFIALDRILQQLDSKDSVDIYGAVHDLRLHRVHMVQTECQYVYLHQCVRDVLRARKLRSEQENPLFPIYENVNPEYHRDPVYSRH

SEQ ID NO: 1603 - protein, 1907 aa, Homo sapiens
MLSHGAGLALWITLSLLQTGLAEPERCNFTLAESKASSHSVSIQWRILGSPCNFSLIYSSDTLGAALCPTFRIDNTTYGCNLQDLQAGTIYNFRIISLDEERTVVLQTDPLPPARFGVSKEKTTSTSLHVWWTPSSGKVTSYEVQLFDENNQKIQGVQIQESTSWNEYTFFNLTAGSKYNIAITAVSGGKRSFSVYTNGSTVPSPVKDIGISTKANSLLISWSHGSGNVERYRLMLMDKGILVHGGVVDKHATSYAFHGLTPGYLYNLTVMTEAAGLQNYRWKLVRTAPMEVSNLKVTNDGSLTSLKVKWQRPPGNVDSYNITLSHKGTIKESRVLAPWITETHFKELVPGRLYQVTVSCVSGELSAQKMAVGRTFPDKVANLEANNNGRMRSLVVSWSPPAGDWEQYRILLFNDSVVLLNITVGKEETQYVMDDTGLVPGRQYEVEVIVESGNLKNSERCQGRTVPLAVLQLRVKHANETSLSIMWQTPVAEWEKYIISLADRDLLLIHKSLSKDAKEFTFTDLVPGRKYMATVTSISGDLKNSSSVKGRTVPAQVTDLHVANQGMTSSLFTNWTQAQGDVEFYQVLLIHENVVIKNESISSETSRYSFHSLKSGSLYSVVVTTVSGGISSRQVVVEGRTVPSSVSGVTVNNSGRNDYLSVSWLLAPGDVDNYEVTLSHDGKVVQSLVIAKSVRECSFSSLTPGRLYTVTITTRSGKYENHSFSQERTVPDKVQGVSVSNSARSDYLRVSWVHATGDFDHYEVTIKNKNNFIQTKSIPKSENECVFVQLVPGRLYSVTVTTKSGQYEANEQGNGRTIPEPVKDLTLRNRSTEDLHVTWSGANGDVDQYEIQLLFNDMKVFPPFHLVNTATEYRFTSLTPGRQYKILVLTISGDVQQSAFIEGFTVPSAVKNIHISPNGATDSLTVNWTPGGGDVDSYTVSAFRHSQKVDSQTIPKHVFEHTFHRLEAGEQYQIMIASVSGSLKNQINVVGRTVPAAVTDLRITENSTRHLSFRWTASEGELSWYNIFLYNPDGNLQERAQVDPLVQSFSFQNLLQGRMYKMVIVTHSGELSNESFIFGRTVPASVSHLRGSNRNTTDSLWFNWSPASGDFDFYELILYNPNGTKKENWKDKDLTEWRFQGLVPGRKYVLWVVTHSGDLSNKVTAESRTAPSPPSLMSFADIANTSLAITWKGPPDWTDYNDFELQWLPRDALTVFNPYNNRKSEGRIVYGLRPGRSYQFNVKTVSGDSWKTYSKPIFGSVRTKPDKIQNLHCRPQNSTAIACSWIPPDSDFDGYSIECRKMDTQEVEFSRKLEKEKSLLNIMMLVPHKRYLVSIKVQSAGMTSEVVEDSTITMIDRPPPPPPHIRVNEKDVLISKSSINFTVNCSWFSDTNGAVKYFTVVVREADGSDELKPEQQHPLPSYLEYRHNASIRVYQTNYFASKCAENPNSNSKSFNIKLGAEMESLGGKCDPTQQKFCDGPLKPHTAYRISIRAFTQLFDEDLKEFTKPLYSDTFFSLPITTESEPLFGAIEGVSAGLFLIGMLVAVVALLICRQKVSHGRERPSARLSIRRDRPLSVHLNLGQKGNRKTSCPIKINQFEGHFMKLQADSNYLLSKEYEELKDVGRNQSCDIALLPENRGKNRYNNILPYDATRVKLSNVDDDPCSDYINASYIPGNNFRREYIVTQGPLPGTKDDFWKMVWEQNVHNIVMVTQCVEKGRVKCDHYWPADQDSLYYGDLILQMLSESVLPEWTIREFKICGEEQLDAHRLIRHFHYTVWPDHGVPETTQSLIQFVRTVRDYINRSPGAGPTVVHCSAGVGRTGTFIALDRILQQLDSKDSVDIYGAVHDLRLHRVHMVQTECQYVYLHQCVRDVLRARKLRSEQENPLFPIYENVNPEYHRDPVYSRH

SEQ ID NO: 1604 - protein, 377 aa, Homo sapiens
MVLESTMVCVDNSEYMRNGDFLPTRLQAQQDAVNIVCHSKTRSNPENNVGLITLANDCEVLTTLTPDTGRILSKLHTVQPKGKITFCTGIRVAHLALKHRQGKNHKMRIIAFVGSPVEDNEKDLVKLAKRLKKEKVNVDIINFGEEEVNTEKLTAFVNTLNGKDGTGSHLVTVPPGPSLADALISSPILAGEGGAMLGLGASDFEFGVDPSADPELALALRVSMEEQRQRQEEEARRAAAASAAEAGIATTGTEDSDDALLKMTISQQEFGRTGLPDLSSMTEEEQIAYAMQMSLQGAEFGQAESADIDASSAMDTSEPAKEEDDYDVMQDPEFLQSVLENLPGVDPNNEAIRNAMGSLASQATKDGKKDKKEEDKK

SEQ ID NO: 1605 - protein, 268 aa, Homo sapiens
MVLESTMVCVDNSEYMRNGDFLPTRLQAQQDAVNIVCHSKTRSNPENNVGLITLANDCEVLTTLTPDTGRILSKLHTVQPKGKITFCTGIRVAHLALKHRQGKNHKMRIIAFVGSPVEDNEKDLVKLAKRLKKEKVNVDIINFGEEEVNTEKLTAFVNTLNGKDGTGSHLVTVPPGPSLADALISSPILAGEGGAMLGLGASDFEFGVDPSADPELALALRVSMEEQRQRQEEEARRAAAASAAEAGIATTGTEGERGGIRSPGTAGC

SEQ ID NO: 1606 - protein, 581 aa, Homo sapiens
MAASGRGLCKAVAASPFPAWRRDNTEARGGLKPEYDAVVIGAGHNGLVAAAYLQRLGVNTAVFERRHVIGGAAVTEEIIPGFKFSRASYLLSLLRPQIYTDLELKKHGLRLHLRNPYSFTPMLEEGAGSKVPRCLLLGTDMAENQKQIAQFSQKDAQVFPKYEEFMHRLALAIDPLLDAAPVDMAAFQHGSLLQRMRSLSTLKPLLKAGRILGAQLPRYYEVLTAPITKVLDQWFESEPLKATLATDAVIGAMTSPHTPGSGYVLLHHVMGGLEGMQGAWGYVQGGMGALSDAIASSATTHGASIFTEKTVAKVQVNSEGCVQGVVLEDGTEVRSKMVLSNTSPQITFLKLTPQEWLPEEFLERISQLDTRSPVTKINVAVDRLPSFLAAPNAPRGQPLPHHQCSIHLNCEDTLLLHQAFEDAMDGLPSHRPVIELCIPSSLDPTLAPPGCHVVSLFTQYMPYTLAGGKAWDEQERDAYADRVFDCIEVYAPGFKDSVVGRDILTPPDLERIFGLPGGNIFHCAMSLDQLYFARPVPLHSGYRCPLQGLYLCGSGAHPGGGVMGAAGRNAAHVAFRDLKSM

SEQ ID NO: 1607 - protein, 106 aa, Homo sapiens [sequence omitted]

SEQ ID NO: 1608 - protein, 664 aa, Homo sapiens
MKTGLFFLCLLGTAAAIPTNARLLSDHSKPTAETVAPDNTAIPSLRAEAEENEKETAVSTEDDSHHKAEKSSVLKSKEESHEQSAEQGKSSSQELGLKDQEDSDGHLSVNLEYAPTEGTLDIKEDMSEPQEKKLSENTDFLAPGVSSFTDSNQQESITKREENQEQPRNYSHHQLNRSSKHSQGLRDQGNQEQDPNISNGEEEEEKEPGEVGTHNDNQERKTELPREHANSKQEEDNTQSDDILEESDQPTQVSKMQEDEFDQGNQEQEDNSNAEMEEENASNVNKHIQETEWQSQEGKTGLEAISNHKETEEKTVSEALLMEPTDDGNTTPRNHGVDDDGDDDGDDGGTDGPRHSASDDYFIPSQAFLEAERAQSIAYHLKIEEQREKVHENENIGTTEPGEHQEAKKAENSSNEEETSSEGNMRVHAVDSCMSFQCKRGHICKADQQGKPHCVCQDPVTCPPTKPLDQVCGTDNQTYASSCHLFATKCRLEGTKKGHQLQLDYFGACKSIPTCTDFEVIQFPLRMRDWLKNILMQLYEANSEHAGYLNEKQRNKVKKIYLDEKRLLAGDHPIDLLLRDFKKNYHMYVYPVHWQFSELDQHPMDRVLTHSELAPLRASLVPMEHCITRFFEECDPNKDKHITLKEWGHCFGIKEEDIDENLLF

SEQ ID NO: 1609 - protein, 539 aa, Homo sapiens
MSEPQEKKLSENTDFLAPGVSSFTDSNQQESITKREENQEQPRNYSHHQLNRSSKHSQGLRDQGNQEQDPNISNGEEEEEKEPGEVGTHNDNQERKTELPREHANSKQEEDNTQSDDILEESDQPTQVSKMQEDEFDQGNQEQEDNSNAEMEEENASNVNKHIQETEWQSQEGKTGLEAISNHKETEEKTVSEALLMEPTDDGNTTPRNHGVDDDGDDDGDDGGTDGPRHSASDDYFIPSQAFLEAERAQSIAYHLKIEEQREKVHENENIGTTEPGEHQEAKKAENSSNEEETSSEGNMRVHAVDSCMSFQCKRGHICKADQQGKPHCVCQDPVTCPPTKPLDQVCGTDNQTYASSCHLFATKCRLEGTKKGHQLQLDYFGACKSIPTCTDFEVIQFPLRMRDWLKNILMQLYEANSEHAGYLNEKQRNKVKKIYLDEKRLLAGDHPIDLLLRDFKKNYHMYVYPVHWQFSELDQHPMDRVLTHSELAPLRASLVPMEHCITRFFEECDPNKDKHITLKEWGHCFGIKEEDIDENLLF

SEQ ID NO: 1610 - protein, 147 aa, Homo sapiens
MALKRINKELSDLARDPPAQCSAGPVGDDMFHWQATIMGPNDSPYQGGVFFLTIHFPTDYPFKPPKVAFTTRIYHPNINSNGSICLDILRSQWSPALTISKVLLSICSLLCDPNPDDPLVPEIARIYKTDRDKYNRISREWTQKYAM

SEQ ID NO: 1611 - protein, 148 aa, Homo sapiens
MALKRINKELSDLARDPPAQCSAGPVGDDMFHWQATIMGPNDSPYQGGVFFLTIHFPTDYPFKPPKVAFTTRIYHPNINSNGSICLDILRSQWSPALTISKVLLSICSLLCDPNPDDPLVPEIARIYKTDRDKYNRLAREWTEKYAML

SEQ ID NO: 1612 - protein, 149 aa, Homo sapiens
MLSNRKCLSKELSDLARDPPAQCSAGPVGDDMFHWQATIMGPNDSPYQGGVFFLTIHFPTDYPFKPPKVAFTTRIYHPNINSNGSICLDILRSQWSPALTISKVLLSICSLLCDPNPDDPLVPEIARIYKTDRDKYNRISREWTQKYAM

SEQ ID NO: 1613 - protein, 242 aa, Homo sapiens
MAGKLKPLNVEAPEATEEAEGQAKSLKTEDLLAMVIKLQKEGSLEPQIEDLISRINDLQQAKKKSSEELRETHSLWEALHRELDSLNGEKVHLEEVLGKKQEALRILQMHCQEKESEAQRLDVRGQLEDLMGQHKDLWEFHMLEQRLAREIRALERSKEQLLSERRLVRAKLREVERRLHSPPEVEGAMAVNDGLKAELEIFGEQVRSAPEVGAGEGEAGPELPRARDEEDPEPPVAAPDAL

SEQ ID NO: 1614 - protein, 1001 aa, Homo sapiens
MPSTNRAGSLKDPEIAELFFKEDPEKLFTDLREIGHGSFGAVYFARDVRTNEVVAIKKMSYSGKQSTEKWQDIIKEVKFLQRIKHPNSIEYKGCYLREHTAWLVMEYCLGSASDLLEVHKKPLQEVEIAAITHGALQGLAYLHSHTMIHRDIKAGNILLTEPGQVKLADFGSASMASPANSFVGTPYWMAPEVILAMDEGQYDGKVDVWSLGITCIELAERKPPLFNMNAMSALYHIAQNESPTLQSNEWSDYFRNFVDSCLQKIPQDRPTSEELLKHIFVLRERPETVLIDLIQRTKDAVRELDNLQYRKMKKLLFQEAHNGPAVEAQEEEEEQDHGVGRTGTVNSVGSNQSIPSMSISASSQSSSVNSLPDVSDDKSELDMMEGDHTVMSNSSVIHLKPEEENYREEGDPRTRASDPQSPPQVSRHKSHYRNREHFATIRTASLVTRQMQEHEQDSELREQMSGYKRMRRQHQKQLMTLENKLKAEMDEHRLRLDKDLETQRNNFAAEMEKLIKKHQAAMEKEAKVMSNEEKKFQQHIQAQQKKELNSFLESQKREYKLRKEQLKEELNENQSTPKKEKQEWLSKQKENIQHFQAEEEANLLRRQRQYLELECRRFKRRMLLGRHNLEQDLVREELNKRQTQKDLEHAMLLRQHESMQELEFRHLNTIQKMRCELIRLQHQTELTNQLEYNKRRERELRRKHVMEVRQQPKSLKSKELQIKKQFQDTCKIQTRQYKALRNHLLETTPKSEHKAVLKRLKEEQTRKLAILAEQYDHSINEMLSTQALRLDEAQEAECQVLKMQLQQELELLNAYQSKIKMQAEAQHDRELRELEQRVSLRRALLEQKIEEEMLALQNERTERIRSLLERQAREIEAFDSESMRLGFSNMVLSNLSPEAFSHSYPGASGWSHNPTGGPGPHWGHPMGGPPQAWGHPMQGGPQPWGHPSGPMQGVPRGSSMGVRNSPQALRRTASGGRTEQGMSRSTSVTSQISNGSHMSYT

SEQ ID NO: 1615 - protein, 398 aa, Homo sapiens
MASPANSFVGTPYWMAPEVILAMDEGQYDGKVDVWSLGITCIELAERKPPLFNMNAMSALYHIAQNESPTLQSNEWSDYFRNFVDSCLQKIPQDRPTSEELLKHIFVLRERPETVLIDLIQRTKDAVRELDNLQYRKMKKLLFQEAHNGPAVEAQEEEEEQDHGVGRTGTVNSVGSNQSIPSMSISASSQSSSVNSLPDVSDDKSELDMMEGDHTVMSNSSVIHLKPEEENYREEGDPRTRASDPQSPPQVSRHKSHYRNREHFATIRTASLVTRQMQEHEQDSELREQMSGYKRMRRQHQKQLMTLENKLKAEMDEHRLRLDKDLETQRNNFAAEMEKLIKKHQAAMEKEAKVMSNEEKKFQQHIQAQQKKELNSFLESQKREYKLRKEQLKEVLMS

SEQ ID NO: 1616 - protein, 853 aa, Homo sapiens
MPSTNRAGSLKDPEIAELFFKEDPEKLFTDLREIGHGSFGAVYFARDVRTNEVVAIKKMSYSGKQSTEKWQDIIKEVKFLQRIKHPNSIEYKGCYLREHTAWLVMEYCLGSASDLLEVHKKPLQEVEIAAITHGALQGLAYLHSHTMIHRDIKAGNILLTEPGQVKLADFGSASMASPANSFVGTPYWMAPEVILAMDEGQYDGKVDVWSLGITCIELAERKPPLFNMNAMSALYHIAQNESPTLQSNEWSDYFRNFVDSCLQKIPQDRPTSEELLKHIFVLRERPETVLIDLIQRTKDAVRELDNLQYRKMKKLLFQEAHNGPAVEAQEEEEEQDHGVGRTGTVNSVGSNQSIPSMSISASSQSSSVNSLPDVSDDKSELDMMEGDHTVMSNSSVIHLKPEEENYREEGDPRTRASDPQSPPQVSRHKSHYRNREHFATIRTASLVTRQMQEHEQDSELREQMSGYKRMRRQHQKQLMTLENKLKAEMDEHRLRLDKDLETQRNNFAAEMEKLIKKHQAAMEKEAKVMSNEEKKFQQHIQAQQKKELNSFLESQKREYKLRKEQLKESKELQIKKQFQDTCKIQTRQYKALRNHLLETTPKSEHKAVLKRLKEEQTRKLAILAEQYDHSINEMLSTQALRLDEAQEAECQVLKMQLQQELELLNAYQSKIKMQAEAQHDRELRELEQRVSLRRALLEQKIEEEMLALQNERTERIRSLLERQAREIEAFDSESMRLGFSNMVLSNLSPEAFSHSYPGASGWSHNPTGGPGPHWGHPMGGPPQAWGHPMQGGPQPWGHPSGPMQGVPRGSSMGVRNSPQALRRTASGGRTEQGMSRSTSVTSQISNGSHMSYT

SEQ ID NO: 1617 - protein, 588 aa, Homo sapiens
MDLEEAEEFKERCTQCAAVSWGLTDEGKYYCTSCHNVTERYQEVTNTDLIPNTQIKALNRGLKKKNNTEKGWDWYVCEGFQYILYQQAEALKNLGVGPELKNDVLHNFWKRYLQKSKQAYCKNPVYTTGRKPTVLEDNLSHSDWASEPELLSDVSCPPFLESGAESQSDIHTRKPFPVSKASQSETSVCSGSLDGVEYSQRKEKGIVKMTMPQTLAFCYLSLLWQREAITLSDLLRFVEEDHIPYINAFQHFPEQMKLYGRDRGIFGIESWPDYEDIYKKTVEVGTFLDLPRFPDITEDCYLHPNILCMKYLMEVNLPDEMHSLTCHVVKMTGMGEVDFLTFDPIAKMAKTVKYDVQAVAIIVVVLKLLFLLDDSFEWSLSNLAEKHNEKNKKDKPWFDFRKWYQIMKKAFDEKKQKWEEARAKYLWKSEKPLYYSFVDKPVAYKKREMVVNLQKQFSTLVESTATAGKKSPSSFQFNWTEEDTDRTCFHGHSLQGVLKEKGQSLLTKNSLYWLSTQKFCRCYCTHVTTYEESNYSLSYQFILNLFSFLLRIKTSLLHEEVSLVEKKLFEKKYSVKRKKSRSKKVRRH

SEQ ID NO: 1618 - protein, 522 aa, Homo sapiens
MDLEEAEEFKERCTQCAAVSWGLTDEGKYYCTSCHNVTERYQEVTNTDLIPNTQIKALNRGLKKKNNTEKGWDWYVCEGFQYILYQQAEALKNLGVGPELKNDVLHNFWKRYLQKSKQAYCKNPVYTTGRKPTVLEDNLSHSDWASEPELLSDVSCPPFLESGAESQSDIHTRKPFPVSKASQSETSVCSGSLDGVEYSQRKEKGIVKMTMPQTLAFCYLSLLWQREAITLSDLLRFVEEDHIPYINAFQHFPEQMKLYGRDRGIFGIESWPDYEDIYKKTVEVGTFLDLPRFPDITEDCYLHPNILCMKYLMEVNLPDEMHSLTCHVVKMTGMGEVDFLTFDPIAKMAKTVKYDVQAVAIIVVVLKLLFLLDDSFEWSLSNLAEKHNEKNKKDKPWFDFRKWYQIMKKAFDEKKQKWEEARAKYLWKSEKPLYYSFVDKPVAYKKREMVVNLQKQFSTLVESTATAGKKSPSSFQFNWTEEDTDRTCFHGHSLQGVLKEKGQSLLTKNSLYWLSTQKFCRC

SEQ ID NO: 1619 - protein, 333 aa, Homo sapiens
MKLYGRDRGIFGIESWPDYEDIYKKTVEVGTFLDLPRFPDITEDCYLHPNILCMKYLMEVNLPDEMHSLTCHVVKMTGMGEVDFLTFDPIAKMAKTVKYDVQAVAIIVVVLKLLFLLDDSFEWSLSNLAEKHNEKNKKDKPWFDFRKWYQIMKKAFDEKKQKWEEARAKYLWKSEKPLYYSFVDKPVAYKKREMVVNLQKQFSTLVESTATAGKKSPSSFQFNWTEEDTDRTCFHGHSLQGVLKEKGQSLLTKNSLYWLSTQKFCRCYCTHVTTYEESNYSLSYQFILNLFSFLLRIKTSLLHEEVSLVEKKLFEKKYSVKRKKSRSKKVRRH

SEQ ID NO: 1620 - protein, 228 aa, Homo sapiens
MPTNCAAAGCATTYNKHINISFHRFPLDPKRRKEWVRLVRRKNFVPGKHTFLCSKHFEASCFDLTGQTRRLKMDAVPTIFDFCTHIKSMKLKSRNLLKKNNSCSPAGPSNLKSNISSQQVLLEHSYAFRNPMEAKKRIIKLEKEIASLRRKMKTCLQKERRATRRWIKATCLVKNLEANSVLPKGTSEHMLPTALSSLPLEDFKILEQDQQDKTLLSLNLKQTKSTFI

SEQ ID NO: 1621 - protein, 304 aa, Homo sapiens
MIYTMKKVHALWASVCLLLNLAPAPLNADSEEDEEHTIITDTELPPLKLMHSFCAFKADDGPCKAIMKRFFFNIFTRQCEEFIYGGCEGNQNRFESLEECKKMCTRDNANRIIKTTLQQEKPDFCFLEEDPGICRGYITRYFYNNQTKQCERFKYGGCLGNMNNFETLEECKNICEDGPNGFQVDNYGTQLNAVNNSLTPQSTKVPSLFEFHGPSWCLTPADRGLCRANENRFYYNSVIGKCRPFKYSGCGGNENNFTSKQECLRACKKGFIQRISKGGLIKTKRKRKKQRVKIAYEEIFVKNM

SEQ ID NO: 1622 - protein, 251 aa, Homo sapiens
MIYTMKKVHALWASVCLLLNLAPAPLNADSEEDEEHTIITDTELPPLKLMHSFCAFKADDGPCKAIMKRFFFNIFTRQCEEFIYGGCEGNQNRFESLEECKKMCTRDNANRIIKTTLQQEKPDFCFLEEDPGICRGYITRYFYNNQTKQCERFKYGGCLGNMNNFETLEECKNICEDGPNGFQVDNYGTQLNAVNNSLTPQSTKVPSLFVTKEGTNDGWKNAAHIYQVFLNAFCIHASMFFLGLDSISCLC

SEQ ID NO: 1623 - protein, 172 aa, Homo sapiens
MEEYAREPCPWRIVDDCGGAFTMGVIGGGVFQAIKGFRNAPVGIRHRLRGSANAVRIRAPQIGGSFAVWGGLFSTIDCGLVRLRGKEDPWNSITSGALTGAVLAARSGPLAMVGSAMMGGILLALIEGVGILLTRYTAQQFRNAPPFLEDPSQLPPKDGTPAPGYPSYQQYH

SEQ ID NO: 1624 - protein, 222 aa, Homo sapiens
MEEYAREPCPWRIVDDCGGAFTMGVIGGGVFQAIKGFRNAPVCRLLSEAPLFIYSCSRSVSPTVNVSSERAESRPTLFMAVSLHMAWCLAHIGIRHRLRGSANAVRIRAPQIGGSFAVWGGLFSTIDCGLVRLRGKEDPWNSITSGALTGAVLAARSGPLAMVGSAMMGGILLALIEGVGILLTRYTAQQFRNAPPFLEDPSQLPPKDGTPAPGYPSYQQYH

SEQ ID NO: 1625 - protein, 747 aa, Homo sapiens
MAEAVERTDELVREYLLFRGFTHTLRQLDAEIKADKEKGFRVDKIVDQLQQLMQVYDLAALRDYWSYLERRLFSRLEDIYRPTIHKLKTSLFRFYLVYTIQTNRNDKAQEFFAKQATELQNQAEWKDWFVLPFLPSPDTNPTFATYFSRQWADTFIVSLHNFLSVLFQCMPVPVILNFDAECQRTNQVQEENEVLRQKLFALQAEIHRLKKEEQQPEEEEALVQHKLPPYVSNMDRLGDSELAMVCSQRNASLSQSPRVGFLSSLLPQSKKSPSRLSPAQGPPQPQSSAKKESFGGQGTKGKDPTSGAKDGKSLLSGLATGESGWSQHRQRRLQDHGKERKELFSTTTSQCAEKKPEASGPEAEPCPELHTEPVEPLTRASSAGPEGGGVRPEQPFIVLGQEEYGEHHSSIMHCRVDCSGRRVASLDVDGVIKVWSFNPIMQTKASSISKSPLLSLEWATKRDRLLLLGSGVGTVRLYDTEAKKNLCEININDNMPRILSLACSPNGASFVCSAAAPSLTSQVDFSAPDIGSKGMNQVPGRLLLWDTKTMKQQLQFSLDPEPIAINCTAFNHNGNLLVTGAADGVIRLFDMQQHECAMSWRAHYGEVYSVEFSYDENTVYSIGEDGKFIQWNIHKSGLKVSEYSLPSDATGPFVLSGYSGYKQVQVPRGRLFAFDSEGNYMLTCSATGGVIYKLGGDEKVLESCLSLGGHRAPVVTVDWSTAMDCGTCLTASMDGKIKLTTLLAHKA

SEQ ID NO: 1626 - protein, 636 aa, Homo sapiens
MAEAVERTDELVREYLLFRGFTHTLRQLDAEIKADKEKGFRVDKIVDQLQQLMQVYDLAALRDYWSYLERRLFSRLEDIYRPTIHKLKTSLFRFYLVYTIQTNRNDKAQEFFAKQATELQNQAEWKDWFVLPFLPSPDTNPTFATYFSRQWADTFIVSLHNFLSVLFQCMPVPVILNFDAECQRTNQVQEENEVLRQKLFALQAEIHRLKKEEQQPEEEEALVQHKLPPYVSNMDRLGDSELAMVCSQRNASLSQSPRVGFLSSLLPQSKKSPSRLSPAQGPPQPQSSAKKESFGGQGTKGKDPTSGAKDGKSLLSGLATGESGWSQHRQRRLQDHGKERKELFSTTTSQCAEKKPEASGPEAEPCPELHTEPVEPLTRASSAGPEGGGVRPEQPFIVLGQEEYGEHHSSIMHCRVDCSGRRVASLDVDGVIKVWSFNPIMQTKASSISKSPLLSLEWATKRDRLLLLGSGVGTVRLYDTEAKKNLCEININDNMPRILSLACSPNGASFVCSAAAPSLTSQVDFSAPDIGSKGMNQVPGRLLLWDTKTMKQQLQFSLDPEPIAINCTAFNHNGNLLVTGAADGVIRLFVHPVEHPQEWPQGIRVQPPLRCHGPLCAVWIQRLQAGSSPQGPTLRF

SEQ ID NO: 1627 - protein, 365 aa, Homo sapiens
MAEAVERTDELVREYLLFRGFTHTLRQLDAEIKADKEKGFRVDKIVDQLQQLMQVYDLAALRDYWSYLERRLFSRLEDIYRPTIHKLKTSLFRFYLVYTIQTNRNDKAQEFFAKQATELQNQAEWKDWFVLPFLPSPDTNPTFATYFSRQWADTFIVSLHNFLSVLFQCMPVPVILNFDAECQRTNQVQEENEVLRQKLFALQAEIHRLKKEEQQPEEEEALVQHKLPPYVSNMDRLGDSELAMVCSQRNASLSQSPRVGFLSSLLPQSKKSPSRLSPAQGPPQPQSSAKKESFGGQGTKGKDPTSGAKDGKSLLSGLATGESGWSQHRQRRLQDHGKERKELFSTTTSQVWGCPEHPWGHSCSY

SEQ ID NO: 1628 - protein, 247 aa, Homo sapiens
MIRRCFQVAARLGHHRGLLEAPRILPRLNPASAFGSSTDSMFSRFLPEKTDLKDYALPNASWCSDMLSLYQEFLEKTKSSGWIKLPSFKSNRDHIRGLKLPSGLAVSSDKGDCRIFTRCIQVEGQGFEYVIFFQPTQKKSVCLFQPGSYLEGPPGFAHGGSLAAMMDETFSKTAFLAGEGLFTLSLNIRFKNLIPVDSLVVMDVELDKIEDQKLYMSCIAHSRDQQTVYAKSSGVFLQLQLEEESPQ

SEQ ID NO: 1629 - protein, 366 aa, Homo sapiens
MSWNISHPQLSDKLFGKNGVLEEQKSPGFKKRETEVYVGNLPLDISKEEILYLLKDFNPLDVHKIQNGCKCFAFVDLGSMQKVTLAIQELNGKLFHKRKLFVNTSKRPPKRTPDMIQQPRAPLVLEKASGEGFGKTAAIIQLAPKAPVDLCETEKLRAAFFAVPLEMRGSFLVLLLRECFRDLSWLALIHSVRGEAGLLVTSIVPKTPFFWAMHVTEALHQNMQALFSTLAQAEEQQPYLEGSTVMRGTRCLAEYHLGDYGHAWNRCWVLDRVDTWAVVMFIDFGQLATIPVQSLRSLDSDDFWTIPPLTQPFMLEKDILSSYEVVHRILKGKITGALNSAVTAPASNLAVVPPLLPLGCLQQAAA

SEQ ID NO: 1630 - protein, 351 aa, Homo sapiens
MSWNISHPQLSDKLFGKNGVLEEQKSPGFKKRETEVYVGNLPLDISKEEILYLLKDFNPLDVHKIQNGCKCFAFVDLGSMQKVTLAIQELNGKLFHKRKLFVNTSKRPPKRTPDMIQQPRAPLVLEKASGEGFGKTAAIIQLAPKAPVDLCETEKLRAAFFAVPLEMRGSFLVLLLRECFRDLSWLALIHSVRGEAGLLVTSIVPKTPFFWAMHVTEALHQNMQALFSTLAQAEEQQPYLEGSTVMRGTRCLAEYHLGDYGHAWNRCWVLDRVDTWAVVMFIDFGQLATIPVQSLRSLDSDDFWTIPPLTQPFMLEKDILSSYEVVHRILKGKITGALNSALHILKFEESK

SEQ ID NO: 1631 - protein, 1622 aa, Homo sapiens
MEAEVWEAEGYNLVLDSDLYDADGYDVPDPGLLTEKNELTFTEPSQVLPFLTSSQQWQSLTPRARARRLWLLLRTSLHEVVEKEKRAELRAARLTHGLEPLRRLEVAAGLRSVAQDPVGGRFVVLDGAGRLHLHKEDGWAQETLLAPVRLTGLVTVLGPLGAVGRFVGWGPAGLAILRPNLSLLWLSEQGVGRAPGWAPTCCLPVPDLRLLLVAEMNSSLALWQFRSGGRRLVLRGSALHPPPSPTGRLMRLAVAPVPPHHVLRCFAAYGSAVLTFDLHAWTLVDVRRDLHKTTISDLAYCEEVEAMVTASRDSTVKVWEADWQIRMVFVGHTGPVTAMTVLPNTTLVLSASQDGTLRTWDLQAAAQVGEVALGFWGQDKLSRRVGRLLAPVRPGWPVLSLCASSMQLWRVRELYSPLAQLPAKVLHVQVAPALPAPAHQSLPTRLVCACADGSVYLLSAATGRIVSSLLLEPEDCAAAVAYCLPREALWLLTRAGHLVRANAARCPMSVLHRVCPPPPPAPQPCCLHLYSHLTDLEGAFSSWEIVRQHWGELRCSSVACAWKNKNRYLPVVGHTDGTLSVLEWLSSKTVFQTEAHSPGPVVAIASTWNSIVSSGGDLTVKMWRVFPYAEESLSLLRTFSCCYPAVALCALGRRVTAGFEDPDSATYGLVQFGLGDSPRLDHRPQDDPTDHITGLCCCPTLKLYACSSLDCTVRIWTAENRLLRLLQLNGAPQALAFCSNSGDLVLALGSRLCLVSHRLYLPTSYLVKKMCRKAPDVVDDPPLPLMSQESLTSAQLQRLTNLHGAASLSEALSLIHRRRATSQHLVPKEDLDAIVARDRDLQQLRLGLVVPAAQPPPSWQQRQEGFDNYLRLIYGSGLLGMQSGRGSQQWSAGTLRVERETRDVCAVPQAAHCLARAEVSTAAQTVPTALSPQDLGALGQHFSQSPRVTVPIPPTHRRVHSKASQLLARSSLSHYLGISLDLQLQLEQLRGRTTMALDLPSSHLQCRIPLLPKRWDKEPLSSLRGFFPATVQPHKHCLRPICFPGYVPNSAVLQQMWLNAEPGASQDALWLWRPRPSQTQWQRKLLQWMGEKPGEEGEEDKKEEEEEKEDEELDWALASLSPHSNQQLDSWELEDQSAVDWTQEPRRRSCKVARTHPHPWHRHGSLLLDEHYGHLPKFLHFFIYQTWFKKLFPIFSLQAYPEAGTIEGLASLLVALLEKTTWVDRVHILQVLLRLLPNMSSDLQGQLQGLLVHLLNLDQPPSLQDQTQKKFVILALQLLLACSLESRDVVLELMSYFLYSPVHCRPELKKLLHGLGLQDPEGFLFKEMMTWVQGPDLDSKAGLRTCCHQKLEDMIQELQETPSQTSVVSGAPTRASVIPSGTSWSASGIFGRLSQVSEVPLMVVSPAEPHSLAPELQAQRMLAPKRSWGTPQLRLRVLSETLKSFCLEPEARLHPAGPAQLPGEPPPLEETDWSHSQLLDLGPIDALNFFCEQLRAQQRSSLQEKAAHPHPPEPYTVAPVPDMVVPPPREHWYHPILRLQEAKPQRSARSAMRLRGPMRSRLCAGRTLDGPIRTLKLPLPRVEPQPFPLDWPMPPRPLPPRLLQPALQRYFLPADADPDTYS

SEQ ID NO: 1632 - protein, 837 aa, Homo sapiens
MEAEVWEAEGYNLVLDSDLYDADGYDVPDPGLLTEKNELTFTEPSQVLPFLTSSQQWQSLTPRARARRLWLLLRTSLHEVVEKEKRAELRAARLTHGLEPLRRLEVAAGLRSVAQDPVGGRFVVLDGAGRLHLHKEDGWAQETLLAPVRLTGLVTVLGPLGAVGRFVGWGPAGLAILRPNLSLLWLSEQGVGRAPGWAPTCCLPVPDLRLLLVAEMNSSLALWQFRSGGRRLVLRGSALHPPPSPTGRLMRLAVAPVPPHHVLRCFAAYGSAVLTFDLHAWTLVDVRRDLHKTTISDLAYCEEVEAMVTASRDSTVKVWEADWQIRMVFVGHTGPVTAMTVLPNTTLVLSASQDGTLRTWDLQAAAQVGEVALGFWGQDKLSRRVGRLLAPVRPGWPVLSLCASSMQLWRVRELYSPLAQLPAKVLHVQVAPALPAPAHQSLPTRLVCACADGSVYLLSAATGRIVSSLLLEPEDCAAAVAYCLPREALWLLTRAGHLVRANAARCPMSVLHRVCPPPPPAPQPCCLHLYSHLTDLEGAFSSWEIVRQHWGELRCSSVACAWKNKNRYLPVVGHTDGTLSVLEWLSSKTVFQTEAHSPGPVVAIASTWNSIVSSGGDLTVKMWRVFPYAEESLSLLRTFSCCYPAVALCALGRRVTAGFEDPDSATYGLVQFGLGDSPRLDHRPQDDPTDHITGLCCCPTLKLYACSSLDCTVRIWTAENRLLRLLQLNGAPQALAFCSNSGDLVLALGSRLCLVSHRLYLPTSYLVKKMCRKAPDVVDDPPLPLMSQESLTSAQLQRLTNLHGAASLRSHGGLLSPPGGPPFPLWVGAWRCGALWS

SEQ ID NO: 1633 - protein, 397 aa, Homo sapiens
MALLRGVFVVAAKRTPFGAYGGLLKDFTATDLSEFAAKAALSAGKVSPETVDSVIMGNVLQSSSDAIYLARHVGLRVGIPKETPALTINRLCGSGFQSIVNGCQEICVKEAEVVLCGGTESMSQAPYCVRNVRFGTKLGSDIKLEDSLWVSLTDQHVQLPMAMTAENLAVKHKISREECDKYALQSQQRWKAANDAGYFNDEMAPIEVKTKKGKQTMQVDEHARPQTTLEQLQKLPPVFKKDGTVTAGNASGVADGAGAVIIASEDAVKKHNFTPLARIVGYFVSGCDPSIMGIGPVPAISGALKKAGLSLKDMDLVEVNEAFAPQYLAVERSLDLDISKTNVNGGAIALGHPLGGSGSRITAHLVHELRRRGGKYAVGSACIGGGQGIAVIIQSTA

SEQ ID NO: 1634 - protein, 513 aa, Homo sapiens
MTTQLPAYVAILLFYVSRASCQDTFTAAVYEHAAILPNATLTPVSREEALALMNRNLDILEGAITSAADQGAHIIVTPEDAIYGWNFNRDSLYPYLEDIPDPEVNWIPCNNRNRFGQTPVQERLSCLAKNNSIYVVANIGDKKPCDTSDPQCPPDGRYQYNTDVVFDSQGKLVARYHKQNLFMGENQFNVPKEPEIVTFNTTFGSFGIFTCFDILFHDPAVTLVKDFHVDTIVFPTAWMNVLPHLSAVEFHSAWAMGMRVNFLASNIHYPSKKMTGSGIYAPNSSRAFHYDMKTEEGKLLLSQLDSHPSHSAVVNWTSYASSIEALSSGNKEFKGTVFFDEFTFVKLTGVAGNYTVCQKDLCCHLSYKMSENIPNEVYALGAFDGLHTVEGRYYLQICTLLKCKTTNLNTCGDSAETASTRFEMFSLSGTFGTQYVFPEVLLSENQLAPGEFQVSTDGRLFSLKPTSGPVLTVTLFGRLYEKDWASNASSGLTAQARIIMLIVIAPIVCSLSW

SEQ ID NO: 1635 - protein, 641 aa, Homo sapiens
MALSLEEFVHSLDLRTLPRVLEIQAGIYLEGSIYEMFGNECCFSTGEVIKITGLKVKKIIAEICEQIEGCESLQPFELPMNFPGLFKIVADKTPYLTMEEITRTIHIGPSRLGHPCFYHQKDIKLENLIIKQGEQIMLNSVEEIDGEIMVSCAVARNHQTHSFNLPLSQEGEFYECEDERIYTLKEIVEWKIPKNRTRTVNLTDFSNKWDSTNPFPKDFYGTLILKPVYEIQGVMKFRKDIIRILPSLDVEVKDITDSYDANWFLQLLSTEDLFEMTSKEFPIVTEVIEAPEGNHLPQSILQPGKTIVIHKKYQASRILASEIRSNFPKRHFLIPTSYKGKFKRRPREFPTAYDLEIAKSEKEPLHVVATKAFHSPHDKLSSVSVGDQFLVHQSETTEVLCEGIKKVVNVLACEKILKKSYEAALLPLYMEGGFVEVIHDKKQYPISELCKQFRLPFNVKVSVRDLSIEEDVLAATPGLQLEEDITDSYLLISDFANPTECWEIPVGRLNMTVQLVSNFSRDAEPFLVRTLVEEITEEQYYMMRRYESSASHPPPRPPKHPSVEETKLTLLTLAEERTVDLPKSPKRHHVDITKKLHPNQAGLDSKVLIGSQNDLVDEEKERSNRGATAIAETFKNEKHQK

SEQ ID NO: 1636 - protein, 606 aa, Homo sapiens
MFGNECCFSTGEVIKITGLKVKKIIAEICEQIEGCESLQPFELPMNFPGLFKIVADKTPYLTMEEITRTIHIGPSRLGHPCFYHQKDIKLENLIIKQGEQIMLNSVEEIDGEIMVSCAVARNHQTHSFNLPLSQEGEFYECEDERIYTLKEIVEWKIPKNRTRTVNLTDFSNKWDSTNPFPKDFYGTLILKPVYEIQGVMKFRKDIIRILPSLDVEVKDITDSYDANWFLQLLSTEDLFEMTSKEFPIVTEVIEAPEGNHLPQSILQPGKTIVIHKKYQASRILASEIRSNFPKRHFLIPTSYKGKFKRRPREFPTAYDLEIAKSEKEPLHVVATKAFHSPHDKLSSVSVGDQFLVHQSETTEVLCEGIKKVVNVLACEKILKKSYEAALLPLYMEGGFVEVIHDKKQYPISELCKQFRLPFNVKVSVRDLSIEEDVLAATPGLQLEEDITDSYLLISDFANPTECWEIPVGRLNMTVQLVSNFSRDAEPFLVRTLVEEITEEQYYMMRRYESSASHPPPRPPKHPSVEETKLTLLTLAEERTVDLPKSPKRHHVDITKKLHPNQAGLDSKVLIGSQNDLVDEEKERSNRGATAIAETFKNEKHQK

SEQ ID NO: 1637 - protein, 544 aa, Homo sapiens
MEEITRTIHIGPSRLGHPCFYHQKDIKLENLIIKQGEQIMLNSVEEIDGEIMVSCAVARNHQTHSFNLPLSQEGEFYECEDERIYTLKEIVEWKIPKNRTRTVNLTDFSNKWDSTNPFPKDFYGTLILKPVYEIQGVMKFRKDIIRILPSLDVEVKDITDSYDANWFLQLLSTEDLFEMTSKEFPIVTEVIEAPEGNHLPQSILQPGKTIVIHKKYQASRILASEIRSNFPKRHFLIPTSYKGKFKRRPREFPTAYDLEIAKSEKEPLHVVATKAFHSPHDKLSSVSVGDQFLVHQSETTEVLCEGIKKVVNVLACEKILKKSYEAALLPLYMEGGFVEVIHDKKQYPISELCKQFRLPFNVKVSVRDLSIEEDVLAATPGLQLEEDITDSYLLISDFANPTECWEIPVGRLNMTVQLVSNFSRDAEPFLVRTLVEEITEEQYYMMRRYESSASHPPPRPPKHPSVEETKLTLLTLAEERTVDLPKSPKRHHVDITKKLHPNQAGLDSKVLIGSQNDLVDEEKERSNRGATAIAETFKNEKHQK

SEQ ID NO: 1638 - protein, 680 aa, Homo sapiens
MALSLEEFVHSLDLRTLPRVLEIQAGIYLEGSIYEMFGNECCFSTGEVIKITGLKVKKIIAEICEQIEGCESLQPFELPMNFPGLFKIVADKTPYLTMEEITRTIHIGPSRLGHPCFYHQKDIKLENLIIKQGEQIMLNSVEEIDGEIMVSCAVARNHQTHSFNLPLSQEGEFYECEDERIYTLKEIVEWKIPKNRTRTVNLTDFSNKWDSTNPFPKDFYGTLILKPVYEIQGVMKFRKDIIRILPSLDVEVKDITDSYDANWFLQLLSTEDLFEMTSKEFPIVTEVIEAPEGNHLPQSILQPGKTIVIHKKYQASRILASEIRSNFPKRHFLIPTSYKGKFKRRPREFPTAYDLEIAKSEKEPLHVVATKAFHSPHDKLSSVSVGDQFLVHQSETTEVLCEGIKKVVNVLACEKILKKSYEAALLPLYMEGGFVEVIHDKKQYPISELCKQFRLPFNVKVSVRDLSIEEDVLAATPGLQLEEDITDSYLLISDFANPTECWEIPVGRLNMTVQLVSNFSRDAEPFLVRTLVEEITEEQYYMMRRYESSASHPPPRPPKHPSVEETKLTLLTLAEERTVDLPKSPKAGVQWRDLGSLQPLPPGFKQFSASASHVAGITGTPHHVQRHHVDITKKLHPNQAGLDSKVLIGSQNDLVDEEKERSNRGATAIAETFKNEKHQK

SEQ ID NO: 1639 - protein, 244 aa, Homo sapiens
MEVTGVSAPTVTVFISSSLNTFRSEKRYSRSLTIAEFKCKLELLVGSPASCMELELYGVDDKFYSKLDQEDALLGSYPVDDGCRIHVIDHSGARLGEYEDVSRVEKYTISQEAYDQRQDTVRSFLKRSKLGRYNEEERAQQEAEAAQRLAEEKAQASSIPVGSRCEVRAAGQSPRRGTVMYVGLTDFKPGYWIGVRYDEPLGKNDGSVNGKRYFECQAKYGAFVKPAVVTVGDFPEEDYGLDEI

SEQ ID NO: 1640 - protein, 193 aa, Homo sapiens
MELELYGVDDKFYSKLDQEDALLGSYPVDDGCRIHVIDHSGARLGEYEDVSRVEKYTISQEAYDQRQDTVRSFLKRSKLGRYNEEERAQQEAEAAQRLAEEKAQASSIPVGSRCEVRAAGQSPRRGTVMYVGLTDFKPGYWIGVRYDEPLGKNDGSVNGKRYFECQAKYGAFVKPAVVTVGDFPEEDYGLDEI

SEQ ID NO: 1641 - protein, 208 aa, Homo sapiens
MDKFVIRTPRIQNSPQKKDSGGKVYKQATIESLKRVVVVEDIKRWKTMLELPDQTKENLVEALQELKKKIPSREVLKSTRIGHTVNKMRKHSDSEVASLAREVYTEWKTFTEKHSNRPSIEVRSDPKTESLRKNAQKLLSEALELKMDHLLVENIERETFHLCSRLINGPYRRTVRALVFTLKHRAEIRAQVKSGSLPVGTFVQTHKK

SEQ ID NO: 1642 - protein, 121 aa, Homo sapiens
MRKHSDSEVASLAREVYTEWKTFTEKHSNRPSIEVRSDPKTESLRKNAQKLLSEALELKMDHLLVENIERETFHLCSRLINGPYRRTVRALVFTLKHRAEIRAQVKSGSLPVGTFVQTHKK

SEQ ID NO: 1643 - protein, 261 aa, Homo sapiens
MNPEWGQAFVHVAVAGGLCAVAVFTGIFDSVSVQVGYEHYAEAPVAGLPAFLAMPFNSLVNMAYTLLGLSWLHRGGAMGLGPRYLKDVFAAMALLYGPVQWLRLWTQWRRAAVLDQWLTLPIFAWPVAWCLYLDRGWRPWLFLSLECVSLASYGLALLHPQGFEVALGAHVVAAVGQALRTHRHYGSTTSATYLALGVLSCLGFVVLKLCDHQLARWRLFQCLTGHFWSKVCDVLQFHFAFLFLTHFNTHPRFHPSGGKTR

SEQ ID NO: 1644 - protein, 1883 aa, Homo sapiens
MGKRAGGGATGATTAAVSTSAGAGLEPAAARSGGPRSAAAGLLGALHLVMTLVVAAARAEKEAFVQSESIIEVLRFDDGGLLQTETTLGLSSYQQKSISLYRGNCRPIRFEPPMLDFHEQPVGMPKMEKVYLHNPSSEETITLVSISATTSHFHASFFQNRKILPGGNTSFDVVFLARVVGNVENTLFINTSNHGVFTYQVFGVGVPNPYRLRPFLGARVPVNSSFSPIINIHNPHSEPLQVVEMYSSGGDLHLELPTGQQGGTRKLWEIPPYETKGVMRASFSSREADNHTAFIRIKTNASDSTEFIILPVEVEVTTAPGIYSSTEMLDFGTLRTQDLPKVLNLHLLNSGTKDVPITSVRPTPQNDAITVHFKPITLKASESKYTKVASISFDASKAKKPSQFSGKITVKAKEKSYSKLEIPYQAEVLDGYLGFDHAATLFHIRDSPADPVERPIYLTNTFSFAILIHDVLLPEEAKTMFKVHNFSKPVLILPNESGYIFTLLFMPSTSSMHIDNNILLITNASKFHLPVRVYTGFLDYFVLPPKIEERFIDFGVLSATEASNILFAIINSNPIELAIKSWHIIGDGLSIELVAVERGNRTTIISSLPEFEKSSLSDQSSVTLASGYFAVFRVKLTAKKLEGIHDGAIQITTDYEILTIPVKAVIAVGSLTCFPKHVVLPPSFPGKIVHQSLNIMNSFSQKVKIQQIRSLSEDVRFYYKRLRGNKEDLEPGKKSKIANIYFDPGLQCGDHCYVGLPFLSKSEPKVQPGVAMQEDMWDADWDLHQSLFKGWTGIKENSGHRLSAIFEVNTDLQKNIISKITAELSWPSILSSPRHLKFPLTNTNCSSEEEITLENPADVPVYVQFIPLALYSNPSVFVDKLVSRFNLSKVAKIDLRTLEFQVFRNSAHPLQSSTGFMEGLSRHLILNLILKPGEKKSVKVKFTPVHNRTVSSLIIVRNNLTVMDAVMVQGQGTTENLRVAGKLPGPGSSLRFKITEALLKDCTDSLKLREPNFTLKRTFKVENTGQLQIHIETIEISGYSCEGYGFKVVNCQEFTLSANASRDIIILFTPDFTASRVIRELKFITTSGSEFVFILNASLPYHMLATCAEALPRPNWELALYIIISGIMSALFLLVIGTAYLEAQGIWEPFRRRLSFEASNPPFDVGRPFDLRRIVGISSEGNLNTLSCDPGHSRGFCGAGGSSSRPSAGSHKQCGPSVHPHSSHSNRNSADVENVRAKNSSSTSSRTSAQAASSQSANKTSPLVLDSNTVTQGHTAGRKSKGAKQSQHGSQHHAHSPLEQHPQPPLPPPVPQPQEPQPERLSPAPLAHPSHPERASSARHSSEDSDITSLIEAMDKDFDHHDSPALEVFTEQPPSPLPKSKGKGKPLQRKVKPPKKQEEKEKKGKGKPQEDELKDSLADDDSSSTTTETSNPDTEPLLKEDTEKQKGKQAMPEKHESEMSQVKQKSKKLLNIKKEIPTDVKPSSLELPYTPPLESKQRRNLPSKIPLPTAMTSGSKSRNAQKTKGTSKLVDNRPPALAKFLPNSQELGNTSSSEGEKDSPPPEWDSVPVHKPGSSTDSLYKLSLQTLNADIFLKQRQTSPTPASPSPPAAPCPFVARGSYSSIVNSSSSSDPKIKQPNGSKHKLTKAASLPGKNGNPTFAAVTAGYDKSPGGNGFAKVSSNKTGFSSSLGISHAPVDSDGSDSSGLWSPVSNPSSPDFTPLNSFSAFGNSFNLTGEVFSKLGLSRSCNQASQRSWNEFNSGPSYLWESPATDPSPSWPASSGSPTHTATSVLGNTSGLWSTTPFSSSIWSSNLSSALPFTTPANTLASIGLMGTENSPAPHAPSTSSPADDLGQTYNPWRIWSPTIGRRSSDPWSNSHFPHEN

SEQ ID NO: 1645 - protein, 528 aa, Homo sapiens
MPTPDATTPQAKGFRRAVSELDAKQAEAIMVRGQGAPGPSLTGSPWPGTAAPAASYTPTPRSPRFIGRRQSLIEDARKEREAAVAAAAAAVPSEPGDPLEAVAFEEKEGKAVLNLLFSPRATKPSALSRAVKVFETFEAKIHHLETRPAQRPRAGGPHLEYFVRLEVRRGDLAALLSGVRQVSEDVRSPAGPKVPWFPRKVSELDKCHHLVTKFDPDLDLDHPGFSDQVYRQRRKLIAEIAFQYRHGDPIPRVEYTAEEIATWKEVYTTLKGLYATHACGEHLEAFALLERFSGYREDNIPQLEDVSRFLKERTGFQLRPVAGLLSARDFLASLAFRVFQCTQYIRHASSPMHSPEPDCCHELLGHVPMLADRTFAQFSQDIGLASLGASDEEIEKLSTLYWFTVEFGLCKQNGEVKAYGAGLLSSYGELLHCLSEEPEIRAFDPEAAAVQPYQDQTYQSVYFVSESFSDAKDKLRSYASRIQRPFSVKFDPYTLAIDVLDSPQAVRRSLEGVQDELDTLAHALSAIG

SEQ ID NO: 1646 - protein, 524 aa, Homo sapiens
MPTPDATTPQAKGFRRAVSELDAKQAEAIMGAPGPSLTGSPWPGTAAPAASYTPTPRSPRFIGRRQSLIEDARKEREAAVAAAAAAVPSEPGDPLEAVAFEEKEGKAVLNLLFSPRATKPSALSRAVKVFETFEAKIHHLETRPAQRPRAGGPHLEYFVRLEVRRGDLAALLSGVRQVSEDVRSPAGPKVPWFPRKVSELDKCHHLVTKFDPDLDLDHPGFSDQVYRQRRKLIAEIAFQYRHGDPIPRVEYTAEEIATWKEVYTTLKGLYATHACGEHLEAFALLERFSGYREDNIPQLEDVSRFLKERTGFQLRPVAGLLSARDFLASLAFRVFQCTQYIRHASSPMHSPEPDCCHELLGHVPMLADRTFAQFSQDIGLASLGASDEEIEKLSTLYWFTVEFGLCKQNGEVKAYGAGLLSSYGELLHCLSEEPEIRAFDPEAAAVQPYQDQTYQSVYFVSESFSDAKDKLRSYASRIQRPFSVKFDPYTLAIDVLDSPQAVRRSLEGVQDELDTLAHALSAIG

SEQ ID NO: 1647 - protein, 497 aa, Homo sapiens
MPTPDATTPQAKGFRRAVSELDAKQAEAIMSPRFIGRRQSLIEDARKEREAAVAAAAAAVPSEPGDPLEAVAFEEKEGKAVLNLLFSPRATKPSALSRAVKVFETFEAKIHHLETRPAQRPRAGGPHLEYFVRLEVRRGDLAALLSGVRQVSEDVRSPAGPKVPWFPRKVSELDKCHHLVTKFDPDLDLDHPGFSDQVYRQRRKLIAEIAFQYRHGDPIPRVEYTAEEIATWKEVYTTLKGLYATHACGEHLEAFALLERFSGYREDNIPQLEDVSRFLKERTGFQLRPVAGLLSARDFLASLAFRVFQCTQYIRHASSPMHSPEPDCCHELLGHVPMLADRTFAQFSQDIGLASLGASDEEIEKLSTLYWFTVEFGLCKQNGEVKAYGAGLLSSYGELLHCLSEEPEIRAFDPEAAAVQPYQDQTYQSVYFVSESFSDAKDKLRSYASRIQRPFSVKFDPYTLAIDVLDSPQAVRRSLEGVQDELDTLAHALSAIG

SEQ ID NO: 1648 - protein, 501 aa, Homo sapiens
MPTPDATTPQAKGFRRAVSELDAKQAEAIMVRGQSPRFIGRRQSLIEDARKEREAAVAAAAAAVPSEPGDPLEAVAFEEKEGKAVLNLLFSPRATKPSALSRAVKVFETFEAKIHHLETRPAQRPRAGGPHLEYFVRLEVRRGDLAALLSGVRQVSEDVRSPAGPKVPWFPRKVSELDKCHHLVTKFDPDLDLDHPGFSDQVYRQRRKLIAEIAFQYRHGDPIPRVEYTAEEIATWKEVYTTLKGLYATHACGEHLEAFALLERFSGYREDNIPQLEDVSRFLKERTGFQLRPVAGLLSARDFLASLAFRVFQCTQYIRHASSPMHSPEPDCCHELLGHVPMLADRTFAQFSQDIGLASLGASDEEIEKLSTLYWFTVEFGLCKQNGEVKAYGAGLLSSYGELLHCLSEEPEIRAFDPEAAAVQPYQDQTYQSVYFVSESFSDAKDKLRSYASRIQRPFSVKFDPYTLAIDVLDSPQAVRRSLEGVQDELDTLAHALSAIG

SEQ ID NO: 1649 - protein, 407 aa, Homo sapiens
MPTPDATTPQAKGFRRAVSELDAKQAEAIMVRGQSPRFIGRRQSLIEDARKEREAAVAAAAAAVPSEPGDPLEAVAFEEKEGKAVLNLLFSPRATKPSALSRAVKVFETFEAKIHHLETRPAQRPRAGGPHLEYFVRLEVRRGDLAALLSGVRQVSEDVRSPAGPKVPWFPRKVSELDKCHHLVTKFDPDLDLDHPGFSDQVYRQRRKLIAEIAFQYRHGDPIPRVEYTAEEIATWDCCHELLGHVPMLADRTFAQFSQDIGLASLGASDEEIEKLSTLYWFTVEFGLCKQNGEVKAYGAGLLSSYGELLHCLSEEPEIRAFDPEAAAVQPYQDQTYQSVYFVSESFSDAKDKLRSYASRIQRPFSVKFDPYTLAIDVLDSPQAVRRSLEGVQDELDTLAHALSAIG

SEQ ID NO: 1650 - protein, 403 aa, Homo sapiens
MPTPDATTPQAKGFRRAVSELDAKQAEAIMSPRFIGRRQSLIEDARKEREAAVAAAAAAVPSEPGDPLEAVAFEEKEGKAVLNLLFSPRATKPSALSRAVKVFETFEAKIHHLETRPAQRPRAGGPHLEYFVRLEVRRGDLAALLSGVRQVSEDVRSPAGPKVPWFPRKVSELDKCHHLVTKFDPDLDLDHPGFSDQVYRQRRKLIAEIAFQYRHGDPIPRVEYTAEEIATWDCCHELLGHVPMLADRTFAQFSQDIGLASLGASDEEIEKLSTLYWFTVEFGLCKQNGEVKAYGAGLLSSYGELLHCLSEEPEIRAFDPEAAAVQPYQDQTYQSVYFVSESFSDAKDKLRSYASRIQRPFSVKFDPYTLAIDVLDSPQAVRRSLEGVQDELDTLAHALSAIG

SEQ ID NO: 1651 - protein, 680 aa, Homo sapiens
MPSVSKAAAAALSGSPPQTEKPTHYRYLKEFRTEQCPLFSQHKCAQHRPFTCFHWHFLNQRRRRPLRRRDGTFNYSPDVYCSKYNEATGVCPDGDECPYLHRTTGDTERKYHLRYYKTGTCIHETDARGHCVKNGLHCAFAHGPLDLRPPVCDVRELQAQEALQNGQLGGGEGVPDLQPGVLASQAMIEKILSEDPRWQDANFVLGSYKTEQCPKPPRLCRQGYACPHYHNSRDRRRNPRRFQYRSTPCPSVKHGDEWGEPSRCDGGDGCQYCHSRTEQQFHPESTKCNDMRQTGYCPRGPFCAFAHVEKSLGMVNEWGCHDLHLTSPSSTGSGQPGNAKRRDSPAEGGPRGSEQDSKQNHLAVFAAVHPPAPSVSSSVASSLASSAGSGSSSPTALPAPPARALPLGPASSTVEAVLGSALDLHLSNVNIASLEKDLEEQDGHDLGAAGPRSLAGSAPVAIPGSLPRAPSLHSPSSASTSPLGSLSQPLPGPVGSSAMTPPQQPPPLRSEPGTLGSAASSYSPLGLNGVPGSIWDFVSGSFSPSPSPILSAGPPSSSSASPNGAELARVRRQLDEAKRKIRQWEESWQQVKQVCDAWQREAQEAKERARVADSDRQLALQKKEEVEAQVIFQLRAKQCVACRERAHGAVLRPCQHHILCEPCAATAPECPYCKGQPLQW

SEQ ID NO: 1652 - protein, 232 aa, Homo sapiens
MTPPQQPPPLRSEPGTLGSAASSYSPLGLNGVPGSIWDFVSGSFSPSPSPILSAGPPSSSSASPNGAELARVRRQLDEAKRKIRQWEESWQQVKQVCDAWQREAQEAKERARVADSDRQLALQKKEEVEAQVKQLQEELEGLGVASTLPGLRGCGDIGTIPLPKLHSLQSQLRLDLEAVDGVIFQLRAKQCVACRERAHGAVLRPCQHHILCEPCAATAPECPYCKGQPLQW

SEQ ID NO: 1653 - protein, 182 aa, Homo sapiens
MTPPQQPPPLRSEPGTLGSAASSYSPLGLNGVPGSIWDFVSGSFSPSPSPILSAGPPSSSSASPNGAELARVRRQLDEAKRKIRQWEESWQQVKQVCDAWQREAQEAKERARVADSDRQLALQKKEEVEAQVIFQLRAKQCVACRERAHGAVLRPCQHHILCEPCAATAPECPYCKGQPLQW

SEQ ID NO: 1654 - protein, 229 aa, Homo sapiens
MTCCSQVPPRRRPSLALSPRLDCNGLNGVPGSIWDFVSGSFSPSPSPILSAGPPSSSSASPNGAELARVRRQLDEAKRKIRQWEESWQQVKQVCDAWQREAQEAKERARVADSDRQLALQKKEEVEAQVKQLQEELEGLGVASTLPGLRGCGDIGTIPLPKLHSLQSQLRLDLEAVDGVIFQLRAKQCVACRERAHGAVLRPCQHHILCEPCAATAPECPYCKGQPLQW

SEQ ID NO: 1655 - protein, 277 aa, Homo sapiens
MPSVSKAAAAALSGSPPQTEKPTHYRYLKEFRTEQCPLFSQHKCAQHRPFTCFHWHFLNQRRRRPLRRRDGTFNYSPDVYCSKYNEATGVCPDGDECPYLHRTTGDTERKYHLRYYKTGTCIHETDARGHCVKNGLHCAFAHGPLDLRPPVCDVRELQAQEALQNGQLGGGEGVPDLQPGVLASQAMIEKILSEDPRWQDANFVLGSYKTEQCPKPPRLCRQGYACPHYHNSRDRRRNPRRFQYSWQLGRRVLRLSPRANNPRVALPRVHTGPSSTA

SEQ ID NO: 1656 - protein, 756 aa, Homo sapiens
MPSVSKAAAAALSGSPPQTEKPTHYRYLKEFRTEQCPLFSQHKCAQHRPFTCFHWHFLNQRRRRPLRRRDGTFNYSPDVYCSKYNEATGVCPDGDESLLGVLYPLWAPPPVPAPVGAPTVHPFLARWFSHVPWEPAGSADPRASSTPAGGTTWATGLLGDFDACGSQSRECVKGVWWTLLGFRCPYLHRTTGDTERKYHLRYYKTGTCIHETDARGHCVKNGLHCAFAHGPLDLRPPVCDVRELQAQEALQNGQLGGGEGVPDLQPGVLASQAMIEKILSEDPRWQALLPVALLRHRVAHFSDANFVLGSYKTEQCPKPPRLCRQGYACPHYHNSRDRRRNPRRFQYRSTPCPSVKHGDEWGEPSRCDGGDGCQYCHSRTEQQFHPEGPVGSPVSGAFSVFSHAGLVADPSLWYPAEWSWHHVGHSRTINPEGDKPSRLGPAPENIKRGNDFACDGRADAAGMAPHVCVFPIYKSTKCNDMRQTGYCPRGPFCAFAHVEKSLGMVNEWGCHDLHLTSPSSTGSGQPGNAKRRDSPAEGGPRGSEQDSKQGVRAHGVYVFEQNHLAVFAAVHPPAPSVSSSVASSLASSAGSGSSSPTALPAPPARALPLGPASSTVEAVLALEPTPSSPTSSAVQGVAGELGMGSGGQGCWSHVVGALAAVPAWTHSGDLEWDPSTIRTRVNVGGGPAARPAMTLAREPQLLVVGGCPTRNCSGPAASPQQLLDDAGQGGRGERDSSQRPLRPQTTHRQDTRPVPS

SEQ ID NO: 1657 - protein, 1050 aa, Homo sapiens
MEPGRGGTETVGKFEFSRKDLIGHGAFAVVFKGRHREKHDLEVAVKCINKKNLAKSQTLLGKEIKILKELKHENIVALYDFQEMANSVYLVMEYCNGGDLADYLHAMRTLSEDTIRLFLQQIAGAMRLLHSKGIIHRDLKPQNILLSNPAGRRANPNSIRVKIADFGFARYLQSNMMAATLCGSPMYMAPEVIMSQHYDGKADLWSIGTIVYQCLTGKAPFQASSPQDLRLFYEKNKTLVPTIPRETSAPLRQLLLALLQRNHKDRMDFDEFFHHPFLDASPSVRKSPPVPVPSYPSSGSGSSSSSSSTSHLASPPSLGEMQQLQKTLASPADTAGFLHSSRDSGGSKDSSCDTDDFVMVPAQFPGDLVAEAPSAKPPPDSLMCSGSSLVASAGLESHGRTPSPSPPCSSSPSPSGRAGPFSSSRCGASVPIPVPTQVQNYQRIERNLQSPTQFQTPRSSAIRRSGSTSPLGFARASPSPPAHAEHGGVLARKMSLGGGRPYTPSPQVGTIPERPGWSGTPSPQGAEMRGGRSPRPGSSAPEHSPRTSGLGCRLHSAPNLSDLHVVRPKLPKPPTDPLGAVFSPPQASPPQPSHGLQSCRNLRGSPKLPDFLQRNPLPPILGSPTKAVPSFDFPKTPSSQNLLALLARQGVVMTPPRNRTLPDLSEVGPFHGQPLGPGLRPGEDPKGPFGRSFSTSRLTDLLLKAAFGTQAPDPGSTESLQEKPMEIAPSAGFGGSLHPGARAGGTSSPSPVVFTVGSPPSGSTPPQGPRTRMFSAGPTGSASSSARHLVPGPCSEAPAPELPAPGHGCSFADPITANLEGAVTFEAPDLPEETLMEQEHTEILRGLRFTLLFVQHVLEIAALKGSASEAAGGPEYQLQESVVADQISLLSREWGFAEQLVLYLKVAELLSSGLQSAIDQIRAGKLCLSSTVKQVVRRLNELYKASVVSCQGLSLRLQRFFLDKQRLLDRIHSITAERLIFSHAVQMVQSAALDEMFQHREGCVPRYHKALLLLEGLQHMLSDQADIENVTKCKLCIERRLSALLTGICA

SEQ ID NO: 1658 - protein, 230 aa, Homo sapiens
MEGQRWLPLEANPEVTNQFLKQLGLHPNWQFVDVYGMDPELLSMVPRPVCAVLLLFPITEKYEVFRTEEEEKIKSQGQDVTSSVYFMKQTISNACGTIGLIHAIANNKDKMHFESGSTLKKFLEESVSMSPEERARYLENYDAIRVTHETSAHEGQTEAPSIDEKVDLHFIALVHVDGHLYELDGRKPFPINHGETSDETLLEDAIEVCKKFMERDPDELRFNAIALSAA

SEQ ID NO: 1659 - protein, 2620 aa, Homo sapiens
MESEEEQHMTTLLCMGFSDPATIRKALRLAKNDINEAVALLTNERPGLDYGGYEPMDSGGGPSPGPGGGPRGDGGGDGGGGGPSRGGSTGGGGGFDPPPAYHEVVDAEKNDENGNCSGEGIEFPTTNLYELESRVLTDHWSIPYKREESLGKCLLASTYLARLGLSESDENCRRFMDRCMPEAFKKLLTSSAVHKWGTEIHEGIYNMLMLLIELVAERIKQDPIPTGLLGVLTMAFNPDNEYHFKNRMKVSQRNWAEVFGEGNMFAVSPVSTFQKEPHGWVVDLVNKFGELGGFAAIQAKLHSEDIELGAVSALIQPLGVCAEYLNSSVVQPMLDPVILTTIQDVRSVEEKDLKDKRLVSIPELLSAVKLLCMRFQPDLVTIVDDLRLDILLRMLKSPHFSAKMNSLKEVTKLIEDSTLSKSVKNAIDTDRLLDWLVENSVLSIALEGNIDQAQYCDRIKGIIELLGSKLSLDELTKIWKIQSGQSSTVIENIHTIIAAAAVKFNSDQLNHLFVLIQKSWETESDRVRQKLLSLIGRIGREARFETTSGKVLDVLWELAHLPTLPSSLIQQALEEHLTILSDAYAVKEAIKRSYIIKCIEDIKRPGEWSGLEKNKKDGFKSSQLNNPQFVWVVPALRQLHEITRSFIKQTYQKQDKSIIQDLKKNFEIVKLVTGSLIACHRLAAAVAGPGGLSGSTLVDGRYTYREYLEAHLKFLAFFLQEATLYLGWNRAKEIWECLVTGQDVCELDREMCFEWFTKGQHDLESDVQQQLFKEKILKLESYEITMNGFNLFKTFFENVNLCDHRLKRQGAQLYVEKLELIGMDFIWKIAMESPDEEIANEAIQLIINYSYINLNPRLKKDSVSLHKKFIADCYTRLEAASSALGGPTLTHAVTRATKMLTATAMPTVATSVQSPYRSTKLVIIERLLLLAERYVITIEDFYSVPRTILPHGASFHGHLLTLNVTYESTKDTFTVEAHSNETIGSVRWKIAKQLCSPVDNIQIFTNDSLLTVNKDQKLLHQLGFSDEQILTVKTSGSGTPSGSSADSSTSSSSSSSGVFSSSYAMEQEKSLPGVVMALVCNVFDMLYQLANLEEPRITLRVRKLLLLIPTDPAIQEALDQLDSLGRKKTLLSESSSQSSKSPSLSSKQQHQPSASSILESLFRSFAPGMSTFRVLYNLEVLSSKLMPTADDDMARSCAKSFCENFLKAGGLSLVVNVMQRDSIPSEVDYETRQGVYSICLQLARFLLVGQTMPTLLDEDLTKDGIEALSSRPFRNVSRQTSRQMSLCGTPEKSSYRQLSVSDRSSIRVEEIIPAARVAIQTMEVSDFTSTVACFMRLSWAAAAGRLDLVGSSQPIKESNSLCPAGIRNRLSSSGSNCSSGSEGEPVALHAGICVRQQSVSTKDSLIAGEALSLLVTCLQLRSQQLASFYNLPCVADFIIDILLGSPSAEIRRVACDQLYTLSQTDTSAHPDVQKPNQFLLGVILTAQLPLWSPTSIMRGVNQRLLSQCMEYFDLRCQLLDDLTTSEMEQLRISPATMLEDEITWLDNFEPNRTAECETSEADNILLAGHLRLIKTLLSLCGAEKEMLGSSLIKPLLDDFLFRASRIILNSHSPAGSAAISQQDFHPKCSTANSRLAAYEVLVMLADSSPSNLQIIIKELLSMHHQPDPALTKEFDYLPPVDSRSSSGFVGLRNGGATCYMNAVFQQLYMQPGLPESLLSVDDDTDNPDDSVFYQVQSLFGHLMESKLQYYVPENFWKIFKMWNKELYVREQQDAYEFFTSLIDQMDEYLKKMGRDQIFKNTFQGIYSDQKICKDCPHRYEREEAFMALNLGVTSCQSLEISLDQFVRGEVLEGSNAYYCEKCKEKRITVKRTCIKSLPSVLVIHLMRFGFDWESGRSIKYDEQIRFPWMLNMEPYTVSGMARQDSSSEVGENGRSVDQGGGGSPRKKVALTENYELVGVIVHSGQAHAGHYYSFIKDRRGCGKGKWYKFNDTVIEEFDLNDETLEYECFGGEYRPKVYDQTNPYTDVRRRYWNAYMLFYQRVSDQNSPVLPKKSRVSVVRQEAEDLSLSAPSSPEISPQSSPRPHRPNNDRLSILTKLVKKGEKKGLFVEKMPARIYQMVRDENLKFMKNRDVYSSDYFSFVLSLASLNATKLKHPYYPCMAKVSLQLAIQFLFQTYLRTKKKLRVDTEEWIATIEALLSKSFDACQWLVEYFISSEGRELIKIFLLECNVREVRVAVATILEKTLDSALFYQDKLKSLHQLLEVLLALLDKDVPENCKNCAQYFFLFNTFVQKQGIRAGDLLLRHSALRHMISFLLGASRQNNQIRRWSSAQAREFGNLHNTVALLVLHSDVSSQRNVAPGIFKQRPPISIAPSSPLLPLHEEVEALLFMSEGKPYLLEVMFALRELTGSLLALIEMVVYCCFCNEHFSFTMLHFIKNQLETAPPHELKNTFQLLHEILVIEDPIQVERVKFVFETENGLLALMHHSNHVDSSRCYQCVKFLVTLAQKCPAAKEYFKENSHHWSWAVQWLQKKMSEHYWTPQSNVSNETSTGKTFQRTISAQDTLAYATALLNEKEQSGSSNGSESSPANENGDRHLQQGSESPMMIGELRSDLDDVDP

SEQ ID NO: 1660 - protein, 112 aa, Homo sapiens
MTRCALLLLMVLMLGRVLVVPVTPIPTFQLRPQNSPQTTPRPAASESPSAAPTWPWAAQSHCSPTRHPGSRIVLSLDVPIGLLQILLEQARARAAREQATTNARILARVGHC

SEQ ID NO: 1661 - protein, 858 aa, Homo sapiens
MAELSEEALLSVLPTIRVPKAGDRVHKDECAFSFDTPESEGGLYICMNTFLGFGKQYVERHFNKTGQRVYLHLRRTRRPKEEDPATGTGDPPRKKPTRLAIGVEGGFDLSEEKFELDEDVKIVILPDYLEIARDGLGGLPDIVRDRVTSAVEALLSADSASRKQEVQAWDGEVRQVSKHAFSLKQLDNPARIPPCGWKCSKCDMRENLWLNLTDGSILCGRRYFDGSGGNNHAVEHYRETGYPLAVKLGTITPDGADVYSYDEDDMVLDPSLAEHLSHFGIDMLKMQKTDKTMTELEIDMNQRIGEWELIQESGVPLKPLFGPGYTGIRNLGNSCYLNSVVQVLFSIPDFQRKYVDKLEKIFQNAPTDPTQDFSTQVAKLGHGLLSGEYSKPVPESGDGERVPEQKEVQDGIAPRMFKALIGKGHPEFSTNRQQDAQEFFLHLINMVERNCRSSENPNEVFRFLVEEKIKCLATEKVKYTQRVDYIMQLPVPMDAALNKEELLEYEEKKRQAEEEKMALPELVRAQVPFSSCLEAYGAPEQVDDFWSTALQAKSVAVKTTRFASFPDYLVIQIKKFTFGLDWVPKKLDVSIEMPEELDISQLRGTGLQPGEEELPDIAPPLVTPDEPKGSLGFYGNEDEDSFCSPHFSSPTSPMLDESVIIQLVEMGFPMDACRKAVYYTGNSGAEAAMNWVMSHMDDPDFANPLILPGSSGPGSTSAAADPPPEDCVTTIVSMGFSRDQALKALRATNNSLERAVDWIFSHIDDLDAEAAMDISEGRSAADSISESVPVGPKVRDGPGKYQLFAFISHMGTSTMCGHYVCHIKKEGRWVIYNDQKVCASEKPPKDLGYIYFYQRVAS

SEQ ID NO: 1662 - protein, 835 aa, Homo sapiens
MAELSEEALLSVLPTIRVPKAGDRVHKDECAFSFDTPESEGGLYICMNTFLGFGKQYVERHFNKTGQRVYLHLRRTRRPKEEDPATGTGDPPRKKPTRLAIGVEGGFDLSEEKFELDEDVKIVILPDYLEIARDGLGGLPDIVRDRVTSAVEALLSADSASRKQEVQAWDGEVRQVSKHAFSLKQLDNPARIPPCGWKCSKCDMRENLWLNLTDGSILCGRRYFDGSGGNNHAVEHYRETGYPLAVKLGTITPDGADVYSYDEDDMVLDPSLAEHLSHFGIDMLKMQKTDKTMTELEIDMNQRIGEWELIQESGVPLKPLFGPGYTGIRNLGNSCYLNSVVQVLFSIPDFQRKYVDKLEKIFQNAPTDPTQDFSTQVAKLGHGLLSGEYSKPVPESGDGERVPEQKEVQDGIAPRMFKALIGKGHPEFSTNRQQDAQEFFLHLINMVERNCRSSENPNEVFRFLVEEKIKCLATEKVKYTQRVDYIMQLPVPMDAALNKEELLEYEEKKRQAEEEKMALPELVRAQVPFSSCLEAYGAPEQVDDFWSTALQAKSVAVKTTRFASFPDYLVIQIKKFTFGLDWVPKKLDVSIEMPEELDISQLRGTGLQPGEEELPDIAPPLVTPDEPKAPMLDESVIIQLVEMGFPMDACRKAVYYTGNSGAEAAMNWVMSHMDDPDFANPLILPGSSGPGSTSAAADPPPEDCVTTIVSMGFSRDQALKALRATNNSLERAVDWIFSHIDDLDAEAAMDISEGRSAADSISESVPVGPKVRDGPGKYQLFAFISHMGTSTMCGHYVCHIKKEGRWVIYNDQKVCASEKPPKDLGYIYFYQRVAS

SEQ ID NO: 1663 - protein, 1118 aa, Homo sapiens
MPAVASVPKELYLSSSLKDLNKKTEVKPEKISTKSYVHSALKIFKTAEECRLDRDEERAYVLYMKYVTVYNLIKKRPDFKQQQDYFHSILGPGNIKKAVEEAERLSESLKLRYEEAEVRKKLEEKDRQEEAQRLQQKRQETGREDGGTLAKGSLENVLDSKDKTQKSNGEKNEKCETKEKGAITAKELYTMMTDKNISLIIMDARRMQDYQDSCILHSLSVPEEAISPGVTASWIEAHLPDDSKDTWKKRGNVEYVVLLDWFSSAKDLQIGTTLRSLKDALFKWESKTVLRNEPLVLEGGYENWLLCYPQYTTNAKVTPPPRRQNEEVSISLDFTYPSLEESIPSKPAAQTPPASIEVDENIELISGQNERMGPLNISTPVEPVAASKSDVSPIIQPVPSIKNVPQIDRTKKPAVKLPEEHRIKSESTNHEQQSPQSGKVIPDRSTKPVVFSPTLMLTDEEKARIHAETALLMEKNKQEKELRERQQEEQKEKLRKEEQEQKAKKKQEAEENEITEKQQKAKEEMEKKESEQAKKEDKETSAKRGKEITGVKRQSKSEHETSDAKKSVEDRGKRCPTPEIQKKSTGDVPHTSVTGDSGSGKPFKIKGQPESGILRTGTFREDTDDTERNKAQREPLTRARSEEMGRIVPGLPSGWAKFLDPITGTFRYYHSPTNTVHMYPPEMAPSSAPPSTPPTHKAKPQIPAERDREPSKLKRSYSSPDITQAIQEEEKRKPTVTPTVNRENKPTCYPKAEISRLSASQIRNLNPVFGGSGPALTGLRNLGNTCYMNSILQCLCNAPHLADYFNRNCYQDDINRSNLLGHKGEVAEEFGIIMKALWTGQYRYISPKDFKITIGKINDQFAGYSQQDSQELLLFLMDGLHEDLNKADNRKRYKEENNDHLDDFKAAEHAWQKHKQLNESIIVALFQGQFKSTVQCLTCHKKSRTFEAFMYLSLPLASTSKCTLQDCLRLFSKEEKLTDNNRFYCSHCRARRDSLKKIEIWKLPPVLLVHLKRFSYDGRWKQKLQTSVDFPLENLDLSQYVIGPKNNLKKYNLFSVSNHYGGLDGGHYTAYCKNAARQRWFKFDDHEVSDISVSSVKSSAAYILFYTSLGPRVTDVAT

SEQ ID NO: 1664 - protein, 1012 aa, Homo sapiens
MPAVASVPKELYLSSSLKDLNKKTEVKPEKISTKRYEEAEVRKKLEEKDRQEEAQRLQQKRQETGREDGGTLAKGSLENVLDSKDKTQKSNGEKNEKCETKEKGAITAKELYTMMTDKNISLIIMDARRMQDYQDSCILHSLSVPEEAISPGVTASWIEAHLPDDSKDTWKKRGNVEYVVLLDWFSSAKDLQIGTTLRSLKDALFKWESKTVLRNEPLVLEGGYENWLLCYPQYTTNAKVTPPPRRQNEEVSISLDFTYPSLEESIPSKPAAQTPPASIEVDENIELISGQNERMGPLNISTPVEPVAASKSDVSPIIQPVPSIKNVPQIDRTKKPAVKLPEEHRIKSESTNHEQQSPQSGKVIPDRSTKPVVFSPTLMLTDEEKARIHAETALLMEKNKQEKELRERQQEEQKEKLRKEEQEQKAKKKQEAEENEITEKQQKAKEEMEKKESEQAKKEDKETSAKRGKEITGVKRQSKSEHETSDAKKSVEDRGKRCPTPEIQKKSTGDVPHTSVTGDSGSGKAQREPLTRARSEEMGRIVPGLPSGWAKFLDPITGTFRYYHSPTNTVHMYPPEMAPSSAPPSTPPTHKAKPQIPAERDREPSKLKRSYSSPDITQAIQEEEKRKPTVTPTVNRENKPTCYPKAEISRLSASQIRNLNPVFGGSGPALTGLRNLGNTCYMNSILQCLCNAPHLADYFNRNCYQDDINRSNLLGHKGEVAEEFGIIMKALWTGQYRYISPKDFKITIGKINDQFAGYSQQDSQELLLFLMDGLHEDLNKADNRKRYKEENNDHLDDFKAAEHAWQKHKQLNESIIVALFQGQFKSTVQCLTCHKKSRTFEAFMYLSLPLASTSKCTLQDCLRLFSKEEKLTDNNRFYCSHCRARRDSLKKIEIWKLPPVLLVHLKRFSYDGRWKQKLQTSVDFPLENLDLSQYVIGPKNNLKKYNLFSVSNHYGGLDGGHYTAYCKNAARQRWFKFDDHEVSDISVSSVKSSAAYILFYTSLGPRVTDVAT

SEQ ID NO: 1665 - protein, 527 aa, Homo sapiens
MRSDKSALVFLLLQLFCVGCGFCGKVLVWPCDMSHWLNVKVILEELIVRGHEVTVLTHSKPSLIDYRKPSALKFEVVHMPQDRTEENEIFVDLALNVLPGLSTWQSVIKLNDFFVEIRGTLKMMCESFIYNQTLMKKLQETNYDVMLIDPVIPCGDLMAELLAVPFVLTLRISVGGNMERSCGKLPAPLSYVPVPMTGLTDRMTFLERVKNSMLSVLFHFWIQDYDYHFWEEFYSKALGRPTTLCETVGKAEIWLIRTYWDFEFPQPYQPNFEFVGGLHCKPAKALPKEMENFVQSSGEDGIVVFSLGSLFQNVTEEKANIIASALAQIPQKVLWRYKGKKPSTLGANTRLYDWIPQNDLLGHPKTKAFITHGGMNGIYEAIYHGVPMVGVPIFGDQLDNIAHMKAKGAAVEINFKTMTSEDLLRALRTVITDSSYKENAMRLSRIHHDQPVKPLDRAVFWIEFVMRHKGAKHLRSAAHDLTWFQHYSIDVIGFLLACVATAIFLFTKCFLFSCQKFNKTRKIEKRE

SEQ ID NO: 1666 - protein, 1035 aa, Homo sapiens
MAPRLQLEKAAWRWAETVRPEEVSQEHIETAYRIWLEPCIRGVCRRNCKGNPNCLVGIGEHIWLGEIDENSFHNIDDPNCERRKKNSFVGLTNLGATCYVNTFLQVWFLNLELRQALYLCPSTCSDYMLGDGIQEEKDYEPQTICEHLQYLFALLQNSNRRYIDPSGFVKALGLDTGQQQDAQEFSKLFMSLLEDTLSKQKNPDVRNIVQQQFCGEYAYVTVCNQCGRESKLLSKFYELELNIQGHKQLTDCISEFLKEEKLEGDNRYFCENCQSKQNATRKIRLLSLPCTLNLQLMRFVFDRQTGHKKKLNTYIGFSEILDMEPYVEHKGGSYVYELSAVLIHRGVSAYSGHYIAHVKDPQSGEWYKFNDEDIEKMEGKKLQLGIEEDLAEPSKSQTRKPKCGKGTHCSRNAYMLVYRLQTQEKPNTTVQVPAFLQELVDRDNSKFEEWCIEMAEMRKQSVDKGKAKHEEVKELYQRLPAGAEPYEFVSLEWLQKWLDESTPTKPIDNHACLCSHDKLHPDKISIMKRISEYAADIFYSRYGGGPRLTVKALCKECVVERCRILRLKNQLNEDYKTVNNLLKAAVKGSDGFWVGKSSLRSWRQLALEQLDEQDGDAEQSNGKMNGSTLNKDESKEERKEEEELNFNEDILCPHGELCISENERRLVSKEAWSKLQQYFPKAPEFPSYKECCSQCKILEREGEENEALHKMIANEQKTSLPNLFQDKNRPCLSNWPEDTDVLYIVSQFFVEEWRKFVRKPTRCSPVSSVGNSALLCPHGGLMFTFASMTKEDSKLIALIWPSEWQMIQKLFVVDHVIKITRIEVGDVNPSETQYISEPKLCPECREGLLCQQQRDLREYTQATIYVHKVVDNKKVMKDSAPELNVSSSETEEDKEEAKPDGEKDPDFNQSNGGTKRQKISHQNYIAYQKQVIRRSMRHRKVRGEKALLVSANQTLKELKIQIMHAFSVAPFDQNLSIDGKILSDDCATLGTLGVIPESVILLKADEPIADYAAMDDVMQVCMPEEGFKGTGLLGH

SEQ ID NO: 1667 - protein, 983 aa, Homo sapiens
MAPRLQLEKAAWRWAETVRPEEVSQEHIETAYRIWLEPCIRGVCRRNCKGNPNCLVGIGEHIWLGEIDENSFHNIDDPNCERRKKNSFVGLTNLGATCYVNTFLQVWFLNLELRQALYLCPSTCSDYMLGDGIQEEKDYEPQTICEHLQYLFALLQNSNRRYIDPSGFVKALGLDTGQQQDAQEFSKLFMSLLEDTLSKQKNPDVRNIVQQQFCGEYAYVTVCNQCGRESKLLSKFYELELNIQGHKQLTDCISEFLKEEKLEGDNRYFCENCQSKQNATRKIRLLSLPCTLNLQLMRFVFDRQTGHKKKLNTYIGFSEILDMEPYVEHKGGSYVYELSAVLIHRGVSAYSGHYIAHVKDPQSGEWYKFNDEDIEKMEGKKLQLGIEEDLAEPSKSQTRKPKCGKGTHCSRNAYMLVYRLQTQEKPNTTVQVPAFLQELVDRDNSKFEEWCIEMAEMRKQSVDKGKAKHEEVKELYQRLPAGAEPYEFVSLEWLQKWLDESTPTKPIDNHACLCSHDKLHPDKISIMKRISEYAADIFYSRYGGGPRLTVKALCKECVVERCRILRLKNQLNEDYKTVNNLLKAAVKGSDGFWVGKSSLRSWRQLALEQLDEQDGDAEQSNGKMNGSTLNKDESKEERKEEEELNFNEDILCPHGELCISENERRLVSKEAWSKLQQYFPKAPEFPSYKECCSQCKILEREGEENEALHKMIANEQKTSLPNLFQDKNRPCLSNWPEDTDVLYIVSQFFVEEWRKFVRKPTRCSPVSSVGNSALLCPHGGLMFTFASMTKEDSKLIALIWPSEWQMIQKLFVVDHVIKITRIEVGDVNPSETQYISEPKLCPECREGLLCQQQRDLREYTQATIYVHKVVDNKKVMKDSAPELNVSSSETEEDKEEAKPDGEKDPDFNQIMHAFSVAPFDQNLSIDGKILSDDCATLGTLGVIPESVILLKADEPIADYAAMDDVMQVCMPEEGFKGTGLLGH

SEQ ID NO: 1668 - protein, 703 aa, Homo sapiens
MAPRLQLEKAAWRWAETVRPEEVSQEHIETAYRIWLEPCIRGVCRRNCKGNPNCLVGIGEHIWLGEIDENSFHNIDDPNCERRKKNSFVGLTNLGATCYVNTFLQVWFLNLELRQALYLCPSTCSDYMLGDGIQEEKDYEPQTICEHLQYLFALLQNSNRRYIDPSGFVKALGLDTGQQQDAQEFSKLFMSLLEDTLSKQKNPDVRNIVQQQFCGEYAYVTVCNQCGRESKLLSKFYELELNIQGHKQLTDCISEFLKEEKLEGDNRYFCENCQSKQNATRKIRLLSLPCTLNLQLMRFVFDRQTGHKKKLNTYIGFSEILDMEPYVEHKGGSYVYELSAVLIHRGVSAYSGHYIAHVKDPQSGEWYKFNDEDIEKMEGKKLQLGIEEDLAEPSKSQTRKPKCGKGTHCSRNAYMLVYRLQTQEKPNTTVQVPAFLQELVDRDNSKFEEWCIEMAEMRKQSVDKGKAKHEEVKELYQRLPAGAEPYEFVSLEWLQKWLDESTPTKPIDNHACLCSHDKLHPDKISIMKRISEYAADIFYSRYGGGPRLTVKALCKECVVERCRILRLKNQLNEDYKTVNNLLKAAVKGSDGFWVGKSSLRSWRQLALEQLDEQDGDAEQSNGKMNGSTLNKDESKEERKEEEELNFNEDILCPHGELCISENERRLVSKEAWSKLQQYFPKAPEFPSYKECCSQCKILEREGE

SEQ ID NO: 1669 - protein, 392 aa, Homo sapiens
MAPRLQLEKAAWRWAETVRPEEVSQEHIETAYRIWLEPCIRGVCRRNCKGNPNCLVGIGEHIWLGEIDENSFHNIDDPNCERRKKNSFVGLTNLGATCYVNTFLQVWFLNLELRQALYLCPSTCSDYMLGDGIQEEKDYEPQTICEHLQYLFALLQNSNRRYIDPSGFVKALGLDTGQQQDAQEFSKLFMSLLEDTLSKQKNPDVRNIVQQQFCGEYAYVTVCNQCGRESKLLSKFYELELNIQGHKQLTDCISEFLKEEKLEGDNRYFCENCQSKQNATRKIRLLSLPCTLNLQLMRFVFDRQTGHKKKLNTYIGFSEILDMEPYVEHKGGSYVYELSAVLIHRGVSAYSGHYIAHVKDPQSGEWYKLILNTNYHLPPSPKPIKIKNYNKP

SEQ ID NO: 1670 - protein, 521 aa, Homo sapiens
MNLSLSQKTVKIHRLFPMLAFSEPYEFVSLEWLQKWLDESTPTKPIDNHACLCSHDKLHPDKISIMKRISEYAADIFYSRYGGGPRLTVKALCKECVVERCRILRLKNQLNEDYKTVNNLLKAAVKGDGFWVGKSSLRSWRQLALEQLDEQDGDAEQSNGKMNGSTLNKDESKEERKEEEELNFNEDILCPHGELCISENERRLVSKEAWSKLQQYFPKAPEFPSYKECCSQCKILEREGEENEALHKMIANEQKTSLPNLFQDKNRPCLSNWPEDTDVLYIVSQFFVEEWRKFVRKPTRCSPVSSVGNSALLCPHGGLMFTFASMTKEDSKLIALIWPSEWQMIQKLFVVDHVIKITRIEVGDVNPSETQYISEPKLCPECREGLLCQQQRDLREYTQATIYVHKVVDNKKVMKDSAPELNVSSSETEEDKEEAKPDGEKDPDFNQIMHAFSVAPFDQNLSIDGKILSDDCATLGTLGVIPESVILLKADEPIADYAAMDDVMQVCMPEEGFKGTGLLGH

SEQ ID NO: 1671 - protein, 154 aa, Homo sapiens
MKDSAPELNVSSSETEEDKEEAKPDGEKDPDFNQSNGGTKRQKISHQNYIAYQKQVIRRSMRHRKVRGEKALLVSANQTLKELKIQIMHAFSVAPFDQNLSIDGKILSDDCATLGTLGVIPESVILLKADEPIADYAAMDDVMQGKDEFVLGIC

SEQ ID NO: 1672 - protein, 485 aa, Homo sapiens
MAPRLQLEKAAWRWAETVRPEEVSQEHIETAYRIWLEPCIRGVCRRNCKGNPNCLVGIGEHIWLGEIDENSFHNIDDPNCERRKKNSFVGLTNLGATCYVNTFLQVWFLNLELRQALYLCPSTCSDYMLGDGIQEEKDYEPQTICEHLQYLFALLQNSNRRYIDPSGFVKALGLDTGQQQDAQEFSKLFMSLLEDTLSKQKNPDVRNIVQQQFCGEYAYVTVCNQCGRESKLLSKFYELELNIQGHKQLTDCISEFLKEEKLEGDNRYFCENCQSKQNATRKIRLLSLPCTLNLQLMRFVFDRQTGHKKKLNTYIGFSEILDMEPYVEHKGGSYVYELSAVLIHRGVSAYSGHYIAHVKDPQSGEWYKFNDEDIEKMEGKKLQLGIEEDLAEPSKSQTRKPKCGKGTHCSRNAYMLVYRLQTQEKPNTTVQVPAFLQELVDRDNSKFEEWCIEMAEMRKQSVDKGKAKHEEVKELYQRLPAGAGL

SEQ ID NO: 1673 - protein, 1047 aa, Homo sapiens
MAPRLQLEKAAWRWAETVRPEEVSQEHIETAYRIWLEPCIRGVCRRNCKGNPNCLVGIGEHIWLGEIDENSFHNIDDPNCERRKKNSFVGLTNLGATCYVNTFLQVWFLNLELRQALYLCPSTCSDYMLGDGIQEEKDYEPQTICEHLQYLFALLQNSNRRYIDPSGFVKALGLDTGQQQDAQEFSKLFMSLLEDTLSKQKNPDVRNIVQQQFCGEYAYVTVCNQCGRESKLLSKFYELELNIQGHKQLTDCISEFLKEEKLEGDNRYFCENCQSKQNATRKIRLLSLPCTLNLQLMRFVFDRQTGHKKKLNTYIGFSEILDMEPYVEHKGGSYVYELSAVLIHRGVSAYSGHYIAHVKDPQSGEWYKFNDEDIEKMEGKKLQLGIEEDLEPSKSQTRKPKCGKGTHCSRNAYMLVYRLQTQEKPNTTVQVPAFLQELVDRDNSKFEEWCIEMAEMRKQSVDKGKAKHEEVKELYQRLPAGAEPYEFVSLEWLQKWLDESTPTKPIDNHACLCSHDKLHPDKISIMKRISEYAADIFYSRYGGGPRLTVKALCKECVVERCRILRLKNQLNEDYKTVNNLLKAAVKGSDGFWVGKSSLRSWRQLALEQLDEQDGDAEQSNGKMNGSTLNKDESKEERKEEEELNFNEDILCPHAVFFFSKYIFLNSGELCISENERRLVSKEAWSKLQQYFPKAPEFPSYKECCSQCKILEREGEENEALHKMIANEQKTSLPNLFQDKNRPCLSNWPEDTDVLYIVSQFFVEEWRKFVRKPTRCSPVSSVGNSALLCPHGGLMFTFASMTKEDSKLIALIWPSEWQMIQKLFVVDHVIKITRIEVGDVNPSETQYISEPKLCPECREGLLCQQQRDLREYTQATIYVHKVVDNKKVMKDSAPELNVSSSETEEDKEEAKPDGEKDPDFNQSNGGTKRQKISHQNYIAYQKQVIRRSMRHRKVRGEKALLVSANQTLKELKIQIMHAFSVAPFDQNLSIDGKILSDDCATLGTLGVIPESVILLKADEPIADYAAMDDVMQVCMPEEGFKGTGLLGH

SEQ ID NO: 1674 - protein, 164 aa, Homo sapiens
MSVNMDELRHQVMINQFVLAAGCAADQAKQLLQAAHWQFETALSTFFQETNIPNSHHHHQMMCTPSNTPATPPNFPDALAMFSKLRASEGLQSSNSPMTAAACSPPANFSPFWASSPPSHQAPWIPPSSPTTFHHLHRPQPTWPPGAQQGGAQQKAMAAMDGQR

SEQ ID NO: 1675 - protein, 448 aa, Homo sapiens
MLTFMASDSEEEVCDERTSLMSAESPTPRSCQEGRQGPEDGENTAQWRSQENEEDGEEDPDRYVCSGVPGRPPGLEEELTLKYGAKHVIMLFVPVTLCMIVVVATIKSVRFYTEKNGQLIYTPFTEDTPSVGQRLLNSVLNTLIMISVIVVMTIFLVVLYKYRCYKFIHGWLIMSSLMLLFLFTYIYLGEVLKTYNVAMDYPTLLLTVWNFGAVGMVCIHWKGPLVLQQAYLIMISALMALVFIKYLPEWSAWVILGAISVYDLVAVLCPKGPLRMLVETAQERNEPIFPALIYSSAMVWTVGMAKLDPSSQGALQLPYDPEMEEDSYDSFGEPSYPEVFEPPLTGYPGEELEEEEERGVKLGLGDFIFYSVLVGKAAATGSGDWNTTLACFVAILIGLCLTLLLLAVFKKALPALPISITFGLIFYFSTDNLVRPFMDTLASHQLYI

SEQ ID NO: 1676 - protein, 414 aa, Homo sapiens
MLTFMASDSEEEVCDERTSLMSAESPTPRSCQEGRQGPEDGENTAQWRSQENEEDGEEDPDRYVCSGVPGRPPGLEEELTLKYGAKHVIMLFVPVTLCMIVVVATIKSVRFYTEKNGQLIYTPFTEDTPSVGQRLLNSVLNTLIMISVIVVMTIFLVVLYKYRCYKFIHGWLIMSSLMLLFLFTYIYLGEVLKTYNVAMDYPTLLLTVWNFGAVGMVCIHWKGPLVLQQAYLIMISALMALVFIKYLPEWSAWVILGAISVYAMVWTVGMAKLDPSSQGALQLPYDPEMEEDSYDSFGEPSYPEVFEPPLTGYPGEELEEEEERGVKLGLGDFIFYSVLVGKAAATGSGDWNTTLACFVAILIGLCLTLLLLAVFKKALPALPISITFGLIFYFSTDNLVRPFMDTLASHQLYI

SEQ ID NO: 1677 - protein, 447 aa, Homo sapiens
MLTFMASDSEEEVCDERTSLMSAESPTPRSCQEGRQGPEDGENTAQWRSQENEEDGEEDPDRYVCSGVPGRPPGLEEELTLKYGAKHVIMLFVPVTLCMIVVVATIKSVRFYTEKNGQLIYTPFTEDTPSVGQRLLNSVLNTLIMISVIVVMTIFLVVLYKYRCYKFIHGWLIMSSLMLLFLFTYIYLGEVLKTYNVAMDYPTLLLTVWNFGAVGMVCIHWKGPLVLQQAYLIMISALMALVFIKYLPEWSAWVILGAISVYDLVAVLCPKGPLRMLVETAQERNEPIFPALIYSSAMVWTVGMAKLDPSSQGALQLPYDPEMEDSYDSFGEPSYPEVFEPPLTGYPGEELEEEEERGVKLGLGDFIFYSVLVGKAAATGSGDWNTTLACFVAILIGLCLTLLLLAVFKKALPALPISITFGLIFYFSTDNLVRPFMDTLASHQLYI

SEQ ID NO: 1678 - protein, 504 aa, Homo sapiens
MAAQALALLREVARLEAPLEELRALHSVLQAVPLNELRQQAAELRLGPLFSLLNENHREKTTLCVSILERLLQAMEPVHVARNLRVDLQRGLIHPDDSVKILTLSQIGRIVENSDAVTEILNNAELLKQIVYCIGGENLSVAKAAIKSLSRISLTQAGLEALFESNLLDDLKSVMKTNDIVRYRVYELIIEISSVSPESLNYCTTSGLVTQLLRELTGEDVLVRATCIEMVTSLAYTHHGRQYLAQEGVIDQISNIIVGADSDPFSSFYLPGFVKFFGNLAVMDSPQQICERYPIFVEKVFEMIESQDPTMIGVAVDTVGILGSNVEGKQVLQKTGTRFERLLMRIGHQSKNAPVELKIRCLDAISSLLYLPPEQQTDDLLRMTESWFSSLSRDPLELFRGISSQPFPELHCAALKVFTAIANQPWAQKLMFNSPGFVEYVVDRSVEHDKASKDAKYELVKALANSKTIAEIFGNPNYLRLRTYLSEGPYYVKPVSTTAVEGAE

SEQ ID NO: 1679 - protein, 461 aa, Homo sapiens
MAAQALALLREVARLEAPLEELRALHSVLQAVPLNELRQQAAELRLGPLFSLLNENHREKTTLCVSILERLLQAMEPVHVARNLRVDLQRGLIHPDDSVKILTLSQIGRIVENSDAVTEILNNAELLKQIVYCIGGENLSVAKALIIEISSVSPESLNYCTTSGLVTQLLRELTGEDVLVRATCIEMVTSLAYTHHGRQYLAQEGVIDQISNIIVGADSDPFSSFYLPGFVKFFGNLAVMDSPQQICERYPIFVEKVFEMIESQDPTMIGVAVDTVGILGSNVEGKQVLQKTGTRFERLLMRIGHQSKNAPVELKIRCLDAISSLLYLPPEQQTDDLLRMTESWFSSLSRDPLELFRGISSQPFPELHCAALKVFTAIANQPWAQKLMFNSPGFVEYVVDRSVEHDKASKDAKYELVKALANSKTIAEIFGNPNYLRLRTYLSEGPYYVKPVSTTAVEGAE

SEQ ID NO: 1680 - protein, 105 aa, Homo sapiens
MNPSEMQRKAPPRRRRHRNRAPLTHKMNKMVTSEEQMKLPSTKKAEPPTWAQLKKLTQLATKYLENTKVTQTPESMLLAALMIVSMVSYGVPNSSEETATIENGP

SEQ ID NO: 1681 - protein, 329 aa, Homo sapiens
MATGQKLMRAVRVFEFGGPEVLKLRSDIAVPIPKDHQVLIKVHACGVNPVETYIRSGTYSRKPLLPYTPGSDVAGVIEAVGDNASAFKKGDRVFTSSTISGGYAEYALAADHTVYKLPEKLDFKQGAAIGIPYFTAYRALIHSACVKAGESVLVHGASGGVGLAACQIARAYGLKILGTAGTEEGQKIVLQNGAHEVFNHREVNYIDKIKKYVGEKGIDIIIEMLANVNLSKDLSLLSHGGRVIVVGSRGTIEINPRDTMAKESSIIGVTLFSSTKEEFQQYAAALQAGMEIGWLKPVIGSQYPLEKVAEAHENIIHGSGATGKMILLL

SEQ ID NO: 1682 - protein, 192 aa, Homo sapiens
MHLLSSACVKAGESVLVHGASGGVGLAACQIARAYGLKILGTAGTEEGQKIVLQNGAHEVFNHREVNYIDKIKKYVGEKGIDIIIEMLANVNLSKDLSLLSHGGRVIVVGSRGTIEINPRDTMAKESSIIGVTLFSSTKEEFQQYAAALQAGMEIGWLKPVIGSQYPLEKVAEAHENIIHGSGATGKMILLL

SEQ ID NO: 1683 - protein, 295 aa, Homo sapiens
MATGQKLMRAVRVFEFGGPEVLKLRSDIAVPIPKDHQVLIKVHACGVNPVETYIRSGTYSRKPLLPYTPGSDVAGVIEAVGDNASAFKKGDRVFTSSTISGGYAEYALAADHTVYKLPEKLDFKQGAAIGIPYFTAYRALIHSACVKAGESVLVHGASGGVGLAACQIARAYGLKILGTAGTEEGQKIVLQNGAHEVFNHREVNYIDKIKVVGSRGTIEINPRDTMAKESSIIGVTLFSSTKEEFQQYAAALQAGMEIGWLKPVIGSQYPLEKVAEAHENIIHGSGATGKMILLL

SEQ ID NO: 1684 - protein, 500 aa, Homo sapiens
MEAARPPPTAGKFVVVGGGIAGVTCAEQLATHFPSEDILLVTASPVIKAVTNFKQISKILEEFDVEEQSSTMLGKRFPNIKVIESGVKQLKSEEHCIVTEDGNQHVYKKLCLCAGAKPKLICEGNPYVLGIRDTDSAQEFQKQLTKAKRIMIIGNGGIALELVYEIEGCEVIWAIKDKAIGNTFFDAGAAEFLTSKLIAEKSEAKIAHKRTRYTTEGRKKEARSKSKADNVGSALGPDWHEGLNLKGTKEFSHKIHLETMCEVKKIYLQDEFRILKKKSFTFPRDHKSVTADTEMWPVYVELTNEKIYGCDFIVSATGVTPNVEPFLHGNSFDLGEDGGLKVDDHMHTSLPDIYAAGDICTTSWQLSPVWQQMRLWTQARQMGWYAAKCMAAASSGDSIDMDFSFELFAHVTKFFNYKVVLLGKYNAQGLGSDHELMLRCTKGREYIKVVMQNGRMMGAVLIGETDLEETFENLILNQMNLSSYGEDLLDPNIDIEDYFD

SEQ ID NO: 1685 - protein, 429 aa, Homo sapiens
MLGKRFPNIKVIESGVKQLKSEEHCIVTEDGNQHVYKKLCLCAGAKPKLICEGNPYVLGIRDTDSAQEFQKQLTKAKRIMIIGNGGIALELVYEIEGCEVIWAIKDKAIGNTFFDAGAAEFLTSKLIAEKSEAKIAHKRTRYTTEGRKKEARSKSKADNVGSALGPDWHEGLNLKGTKEFSHKIHLETMCEVKKIYLQDEFRILKKKSFTFPRDHKSVTADTEMWPVYVELTNEKIYGCDFIVSATGVTPNVEPFLHGNSFDLGEDGGLKVDDHMHTSLPDIYAAGDICTTSWQLSPVWQQMRLWTQARQMGWYAAKCMAAASSGDSIDMDFSFELFAHVTKFFNYKVVLLGKYNAQGLGSDHELMLRCTKGREYIKVVMQNGRMMGAVLIGETDLEETFENLILNQMNLSSYGEDLLDPNIDIEDYFD

SEQ ID NO: 1686 - protein, 105 aa, Homo sapiens
MNPSEMQRKAPPRRRRHRNRAPLTHKMNKMVTSEEQMKLPSTKKAEPPTWAQLKKLTQLATKYLENTKVTQTPESMLLAALMIVSMVSAGVPNSSEETATIENGP

SEQ ID NO: 1687 - protein, 1906 aa, Homo sapiens
MQSFRERCGFHGKQQNYQQTSQETSRLENYRQPSQAGLSCDRQRLLAKDYYNPQPYPSYEGGAGTPSGTAAAVAADKYHRGSKALPTQQGLQGRPAFPGYGVQDSSPYPGRYAGEESLQAWGAPQPPPPQPQPLPAGVAKYDENLMKKTAVPPSRQYAEQGAQVPFRTHSLHVQQPPPPQQPLAYPKLQRQKLQNDIASPLPFPQGTHFPQHSQSFPTSSTYSSSVQGGGQGAHSYKSCTAPTAQPHDRPLTASSSLAPGQRVQNLHAYQSGRLSYDQQQQQQQQQQQQQQALQSRHHAQETLHYQNLAKYQHYGQQGQGYCQPDAAVRTPEQYYQTFSPSSSHSPARSVGRSPSYSSTPSPLMPNLENFPYSQQPLSTGAFPAGITDHSHFMPLLNPSPTDATSSVDTQAGNCKPLQKDKLPENLLSDLSLQSLTALTSQVENISNTVQQLLLSKAAVPQKKGVKNLVSRTPEQHKSQHCSPEGSGYSAEPAGTPLSEPPSSTPQSTHAEPQEADYLSGSEDPLERSFLYCNQARGSPARVNSNSKAKPESVSTCSVTSPDDMSTKSDDSFQSLHGSLPLDSFSKFVAGERDCPRLLLSALAQEDLASEILGLQEAIGEKADKAWAEAPSLVKDSSKPPFSLENHSACLDSVAKSAWPRPGEPEALPDSLQLDKGGNAKDFSPGLFEDPSVAFATPDPKKTTGPLSFGTKPTLGVPAPDPTTAAFDCFPDTTAASSADSANPFAWPEENLGDACPRWGLHPGELTKGLEQGGKASDGISKGDTHEASACLGFQEEDPPGEKVASLPGDFKQEEVGGVKEEAGGLLQCPEVAKADRWLEDSRHCCSTADFGDLPLLPPTSRKEDLEAEEEYSSLCELLGSPEQRPGMQDPLSPKAPLICTKEEVEEVLDSKAGWGSPCHLSGESVILLGPTVGTESKVQSWFESSLSHMKPGEEGPDGERAPGDSTTSDASLAQKPNKPAVPEAPIAKKEPVPRGKSLRSRRVHRGLPEAEDSPCRAPVLPKDLLLPESCTGPPQGQMEGAGAPGRGASEGLPRMCTRSLTALSEPRTPGPPGLTTTPAPPDKLGGKQRAAFKSGKRVGKPSPKAASSPSNPAALPVASDSSPMGSKTKETDSPSTPGKDQRSMILRSRTKTQEIFHSKRRRPSEGRLPNCRATKKLLDNSHLPATFKVSSSPQKEGRVSQRARVPKPGAGSKLSDRPLHALKRKSAFMAPVPTKKRNLVLRSRSSSSSNASGNGGDGKEERPEGSPTLFKRMSSPKKAKPTKGNGEPATKLPPPETPDACLKLASRAAFQGAMKTKVLPPRKGRGLKLEAIVQKITSPSLKKFACKAPGASPGNPLSPSLSDKDRGLKGAGGSPVGVEEGLVNVGTGQKLPTSGADPLCRNPTNRSLKGKLMNSKKLSSTDCFKTEAFTSPEALQPGGTALAPKKRSRKGRAGAHGLSKGPLEKRPYLGPALLLTPRDRASGTQGASEDNSGGGGKKPKMEELGLASQPPEGRPCQPQTRAQKQPGHTNYSSYSKRKRLTRGRAKNTTSSPCKGRAKRRRQQQVLPLDPAEPEIRLKYISSCKRLRSDSRTPAFSPFVRVEKRDAFTTICTVVNSPGDAPKPHRKPSSSASSSSSSSSFSLDAAGASLATLPGGSILQPRPSLPLSSTMHLGPVVSKALSTSCLVCCLCQNPANFKDLGDLCGPYYPEHCLPKKKPKLKEKVRPEGTCEEASLPLERTLKGPECAAAATAGKPPRPDGPADPAKQGPLRTSARGLSRRLQSCYCCDGREDGGEEAAPADKGRKHECSKEAPAEPGGEAQEHWVHEACAVWTGGVYLVAGKLFGLQEAMKVAVDMMCSSCQEAGATIGCCHKGCLHTYHYPCASDAGCIFIEENFSLKCPKHKRLP

SEQ ID NO: 1688 - protein, 1862 aa, Homo sapiens
MQSFRERCGFHGKQQNYQQTSQETSRLENYRQPSQAGLSCDRQRLLAKDYYNPQPYPSYEGGAGTPSGTAAAVAADKYHRGSKALPTQQGLQGRPAFPGYGVQDSSPYPGRYAGEESLQAWGAPQPPPPQPQPLPAGVAKYDENLMKKTAVPPSRQYAEQGAQVPFRTHSLHVQQPPPPQQPLAYPKLQRQKLQNDIASPLPFPQGWWAGGHSYKSCTAPTAQPHDRPLTASSSLAPGQRVQNLHAYQSGRLSYDQQQQQQQQQQQQQQALQSRHHAQETLHYQNLAKYQHYGQQGQGYCQPDAAVRTPEQYYQTFSPSSSHSPARSVGRSPSYSSTPSPLMPNLENFPYSQQPLSTGAFPAGITDHSHFMPLLNPSPTDATSSPADLTALTSQVENISNTVQQLLLSKAAVPQKKGVKNLVSRTPEQHKSQHCSPEGSGYSAEPAGTPLSEPPSSTPQSTHAEPQEADYLSGSEDPLERSFLYCNQARGSPARVNSNSKAKPESVSTCSVTSPDDMSTKSDDSFQSLHGSLPLDSFSKFVAGERDCPRLLLSALAQEDLASEILGLQEAIGEKADKAWAEAPSLVKDSSKPPFSLENHSACLDSVAKSAWPRPGEPEALPDSLQLDKGGNAKDFSPGLFEDPSVAFATPDPKKTTGPLSFGTKPTLGVPAPDPTTAAFDCFPDTTAASSADSANPFAWPEENLGDACPRWGLHPGELTKGLEQGGKASDGISKGDTHEASACLGFQEEDPPGEKVASLPGDFKQEEVGGVKEEAGGLLQCPEVAKADRWLEDSRHCCSTADFGDLPLLPPTSRKEDLEAEEEYSSLCELLGSPEQRPGMQDPLSPKAPLICTKEEVEEVLDSKAGWGSPCHLSGESVILLGPTVGTESKVQSWFESSLSHMKPGEEGPDGERAPGDSTTSDASLAQKPNKPAVPEAPIAKKEPVPRGKSLRSRRVHRGLPEAEDSPCRAPVLPKDLLLPESCTGPPQGQMEGAGAPGRGASEGLPRMCTRSLTALSEPRTPGPPGLTTTPAPPDKLGGKQRAAFKSGKRVGKPSPKAASSPSNPAALPVASDSSPMGSKTKETDSPSTPGKDQRSMILRSRTKTQEIFHSKRRRPSEGRLPNCRATKKLLDNSHLPATFKVSSSPQKEGRVSQRARVPKPGAGSKLSDRPLHALKRKSAFMAPVPTKKRNLVLRSRSSSSSNASGNGGDGKEERPEGSPTLFKRMSSPKKAKPTKGNGEPATKLPPPETPDACLKLASRAAFQGAMKTKVLPPRKGRGLKLEAIVQKITSPSLKKFACKAPGASPGNPLSPSLSDKDRGLKGAGGSPVGVEEGLVNVGTGQKLPTSGADPLCRNPTNRSLKGKLMNRASGTQGASEDNSGGGGKKPKMEELGLASQPPEGRPCQPQTRAQKQPGHTNYSSYSKRKRLTRGRAKNTTSSPCKGRAKRRRQQQVLPLDPAEPEIRLKYISSCKRLRSDSRTPAFSPFVRVEKRDAFTTICTVVNSPGDAPKPHRKPSSSASSSSSSSSFSLDAAGASLATLPGGSILQPRPSLPLSSTMHLGPVVSKALSTSCLVCCLCQNPANFKDLGDLCGPYYPEHCLPKKKPKLKEKVRPEGTCEEASLPLERTLKGPECAAAATAGKPPRPDGPADPAKQGPLRTSARGLSRRLQSCYCCDGREDGGEEAAPADKGHWVHEACAVWTGGVYLVAGKLFGLQEAMKVAVDMHGGTVALAPGDFSLPGLRFASLFQGPSWCDCPVLATSTPSSWSRCVPAAKKPGPPLGAATKDASTPTTTRVPAMQVRARPGTGGHWSPSKQSRGTLPGHSSPNPGPISLFSFPPLLPQQFFYPSVCLDLCWAMPGTWK

SEQ ID NO: 1689 - protein, 1640 aa, Homo sapiens
MQSFRERCGFHGKQQNYQQTSQETSRLENYRQPSQAGLSCDRQRLLAKDYYNPQPYPSYEGGAGTPSGTAAAVAADKYHRGSKALPTQQGLQGRPAFPGYGVQDSSPYPGRYAGEESLQAWGAPQPPPPQPQPLPAGVAKYDENLMKKTAVPPSRQYAEQGAQVPFRTHSLHVQQPPPPQQPLAYPKLQRQKLQNDIASPLPFPQGTHFPQHSQSFPTSSTYSSSVQGGGQGAHSYKSCTAPTAQPHDRPLTASSSLAPGQRVQNLHAYQSGRLSYDQQQQQQQQQQQQQQALQSRHHAQETLHYQNLAKYQHYGQQGQGYCQPDAAVRTPEQYYQTFSPSSSHSPARSVGRSPSYSSTPSPLMPNLENFPYSQQPLSTGAFPAGITDHSHFMPLLNPSPTDATSSVDTQAGNCKPLQKDKLPENLLSDLSLQSLTALTSQVENISNTVQQLLLSKAAVPQKKGVKNLVSRTPEQHKSQHCSPEGSGYSAEPAGTPLSEPPSSTPQSTHAEPQEADYLSGSEDPLERSFLYCNQARGSPARVNSNSKAKPESVSTCSVTSPDDMSTKSDDSFQSLHGSLPLDSFSKFVAGERDCPRLLLSALAQEDLASEILGLQEAIGEKADKAWAEAPSLVKDSSKPPFSLENHSACLDSVAKSAWPRPGEPEALPDSLQLDKGGNAKDFSPGLFEDPSVAFATPDPKKTTGPLSFGTKPTLGVPAPDPTTAAFDCFPDTTAASSADSANPFAWPEENLGDACPRWGLHPGELTKGLEQGGKASDGISKGDTHEASACLGFQEEDPPGEKVASLPGDFKQEEVGGVKEEAGGLLQCPEVAKADRWLEDSRHCCSTADFGDLPLLPPTSRKEDLEAEEEYSSLCELLGSPEQRPGMQDPLSPKAPLICTKEEVEEVLDSKAGWGSPCHLSGESVILLGPTVGTESKVQSWFESSLSHMKPGEEGPDGERAPGDSTTSDASLAQKPNKPAVPEAPIAKKEPVPRGKSLRSRRVHRGLPEAEDSPCRAPVLPKDLLLPESCTGPPQGQMEGAGAPGRGASEGLPRMCTRSLTALSEPRTPGPPGLTTTPAPPDKLGGKQRAAFKSGKRVGKPSPKAASSPSNPAALPVASDSSPMGSKTKETDSPSTPGKDQRSMILRSRTKTQEIFHSKRRRPSEGRLPNCRATKKLLDNSHLPATFKVSSSPQKEGRVSQRARVPKPGAGSKLSDRPLHALKRKSAFMAPVPTKKRNLVLRSRSSSSSNASGNGGDGKEERPEGSPTLFKRMSSPKKAKPTKGNGEPATKLPPPETPDACLKLASRAAFQGAMKTKVLPPRKGRGLKLEAIVQKITSPSLKKFACKAPGASPGNPLSPSLSDKDRGLKGAGGSPVGVEEGLVNVGTGQKLPTSGADPLCRNPTNRSLKGKLMNSKKLSSTDCFKTEAFTSPEALQPGGTALAPKKRSRKGRAGAHGLSKGPLEKRPYLGPALLLTPRDRASGTQGASEDNSGGGGKKPKMEELGLASQPPEGRPCQPQTRAQKQPGHTNYSSYSKRKRLTRGRAKNTTSSPCKGRAKRRRQQQVLPLDPAEPEIRLKYISSCKRLRSDSRTPAFSPLEPSLGAQNPRSGQNAPPAPADARPLCTTRDRRAYSAREQGQR

SEQ ID NO: 1690 - protein, 966 aa, Homo sapiens
MQSFRERCGFHGKQQNYQQTSQETSRLENYRQPSQAGLSCDRQRLLAKDYYNPQPYPSYEGGAGTPSGTAAAVAADKYHRGSKALPTQQGLQGRPAFPGYGVQDSSPYPGRYAGEESLQAWGAPQPPPPQPQPLPAGVAKYDENLMKKTAVPPSRQYAEQGAQVPFRTHSLHVQQPPPPQQPLAYPKLQRQKLQNDIASPLPFPQGTHFPQHSQSFPTSSTYSSSVQGGGQGAHSYKSCTAPTAQPHDRPLTASSSLAPGQRVQNLHAYQSGRLSYDQQQQQQQQQQQQQQALQSRHHAQETLHYQNLAKYQHYGQQGQGYCQPDAAVRTPEQYYQTFSPSSSHSPARSVGRSPSYSSTPSPLMPNLENFPYSQQPLSTGAFPAGITDHSHFMPLLNPSPTDATSSVDTQAGNCKPLQKDKLPENLLSDLSLQSLTALTSQVENISNTVQQLLLSKAAVPQKKGVKNLVSRTPEQHKSQHCSPEGSGYSAEPAGTPLSEPPSSTPQSTHAEPQEADYLSGSEDPLERSFLYCNQARGSPARVNSNSKAKPESVSTCSVTSPDDMSTKSDDSFQSLHGSLPLDSFSKFVAGERDCPRLLLSALAQEDLASEILGLQEAIGEKADKAWAEAPSLVKDSSKPPFSLENHSACLDSVAKSAWPRPGEPEALPDSLQLDKGGNAKDFSPGLFEDPSVAFATPDPKKTTGPLSFGTKPTLGVPAPDPTTAAFDCFPDTTAASSADSANPFAWPEENLGDACPRWGLHPGELTKGLEQGGKASDGISKGDTHEASACLGFQEEDPPGEKVASLPGDFKQEEVGGVKEEAGGLLQCPEVAKADRWLEDSRHCCSTADFGDLPLLPPTSRKEDLEAEEEYSSLCELLGSPEQRPGMQDPLSPKAPLICTKEEVEEVLDSKAGWGSPCHLSGESVILLGPTVGTESKVQSWFESSLYSVYICIHIHIYNIYEDCKC

SEQ ID NO: 1691 - protein, 369 aa, Homo sapiens
MLWEETGAAPAPARASDLPYRISSDHLKKEEKMTMMAHQYPSWIFINEKTFITREQLNSLLKTYNIFYENQKNLHILYGETEDGKLIVEGMLDIFWGVKRPIQLKIQDEKPFSSFTSMKSSDVFSSKGMTRWGEFDDLYRISELDRTQIPMSEKRNSQEDYLSYHSNTLKPHAKDEPDSPVLYRTMSEAALVRKRMKPLMMDRKERQKNRASINGHFYNHETSIFIPAFESETKVRVNSNMRTEEVIKQLLQKFKIENSPQDFALHIIFATGEQRRLKKTDIPLLQRLLQGPSEKNARIFLMDKDAEEISSDVAQYINFHFSLLESILQRLNEEEKREIQRIVTKFNKEKAIILKCLQNKLVIKTETTV

SEQ ID NO: 1692 - protein, 337 aa, Homo sapiens
MTMMAHQYPSWIFINEKTFITREQLNSLLKTYNIFYENQKNLHILYGETEDGKLIVEGMLDIFWGVKRPIQLKIQDEKPFSSFTSMKSSDVFSSKGMTRWGEFDDLYRISELDRTQIPMSEKRNSQEDYLSYHSNTLKPHAKDEPDSPVLYRTMSEAALVRKRMKPLMMDRKERQKNRASINGHFYNHETSIFIPAFESETKVRVNSNMRTEEVIKQLLQKFKIENSPQDFALHIIFATGEQRRLKKTDIPLLQRLLQGPSEKNARIFLMDKDAEEISSDVAQYINFHFSLLESILQRLNEEEKREIQRIVTKFNKEKAIILKCLQNKLVIKTETTV

SEQ ID NO: 1693 - protein, 325 aa, Homo sapiens
MLWEETGAAPAPARASDLPYRIHFLSSGLILVTRQLTEDGKLIVEGMLDIFWGVKRPIQLKIQDEKPFSSFTSMKSSDVFSSKGMTRWGEFDDLYRISELDRTQIPMSEKRNSQEDYLSYHSNTLKPHAKDEPDSPVLYRTMSEAALVRKRMKPLMMDRKERQKNRASINGHFYNHETSIFIPAFESETKVRVNSNMRTEEVIKQLLQKFKIENSPQDFALHIIFATGEQRRLKKTDIPLLQRLLQGPSEKNARIFLMDKDAEEISSDVAQYINFHFSLLESILQRLNEEEKREIQRIVTKFNKEKAIILKCLQNKLVIKTETTV

SEQ ID NO: 1694 - protein, 303 aa, Homo sapiens
MTMMAHQYPSWIFINEKTFITREQLNSLLKTYNIFYENQKNLHILYGETEDGKLIVEGMLDIFWGVKRPIQLKIQDEKPFSSFTSMKSSDVFSSKGMTRWGEFDDLYRISELDRTQIPMSEKRNSQEDYLSYHSNTLKPHAKDEPDSPVLYRTMSEAALVRKRMKPLMMDRKERQKNRASINGHFYNHEIENSPQDFALHIIFATGEQRRLKKTDIPLLQRLLQGPSEKNARIFLMDKDAEEISSDVAQYINFHFSLLESILQRLNEEEKREIQRIVTKFNKEKAIILKCLQNKLVIKTETTV

SEQ ID NO: 1695 - protein, 190 aa, Homo sapiens
MEAETKTLPLENASILSEGSLQEGHRLWIGNLDPKITEYHLLKLLQKFGKVKQFDFLFHKSGALEGQPRGYCFVNFETKQEAEQAIQCLNGKLALSKKLVVRWAHAQVKRYDHNKNDKILPISLEPSSSTEPTQSNLSVTAKIKAIEAKLKMMAENPDAEYPAAPVYSYFKPPDKKRTTPYSRTAWKSRR

SEQ ID NO: 1696 - protein, 1123 aa, Homo sapiens
MWGDSRPANRTGPFRGSQEERFAPGWNRDYPPPPLKSHAQERHSGNFPGRDSLPFDFQGHSGPPFANVEEHSFSYGARDGPHGDYRGGEGPGHDFRGGDFSSSDFQSRDSSQLDFRGRDIHSGDFRDREGPPMDYRGGDGTSMDYRGREAPHMNYRDRDAHAVDFRGRDAPPSDFRGRGTYDLDFRGRDGSHADFRGRDLSDLDFRAREQSRSDFRNRDVSDLDFRDKDGTQVDFRGRGSGTTDLDFRDRDTPHSDFRGRHRSRTDQDFRGREMGSCMEFKDREMPPVDPNILDYIQPSTQDREHSGMNVNRREESTHDHTIERPAFGIQKGEFEHSETREGETQGVAFEHESPADFQNSQSPVQDQDKSQLSGREEQSSDAGLFKEEGGLDFLGRQDTDYRSMEYRDVDHRLPGSQMFGYGQSKSFPEGKTARDAQRDLQDQDYRTGPSEEKPSRLIRLSGVPEDATKEEILNAFRTPDGMPVKNLQLKEYNTGYDYGYVCVEFSLLEDAIGCMEANQGTLMIQDKEVTLEYVSSLDFWYCKRCKANIGGHRSSCSFCKNPREVTEAKQELITYPQPQKTSIPAPLEKQPNQPLRPADKEPEPRKREEGQESRLGHQKREAERYLPPSRREGPTFRRDRERESWSGETRQDGESKTIMLKRIYRSTPPEVIVEVLEPYVRLTTANVRIIKNRTGPMGHTYGFIDLDSHAEALRVVKILQNLDPPFSIDGKMVAVNLATGKRRNDSGDHSDHMHYYQGKKYFRDRRGGGRNSDWSSDTNRQGQQSSSDCYIYDSATGYYYDPLAGTYYDPNTQQEVYVPQDPGLPEEEEIKEKKPTSQGKSSSKKEMSKRDGKEKKDRGVTRFQENASEGKAPAEDVFKKPLPPTVKKEESPPPPKVVNPLIGLLGEYGGDSDYEEEEEEEQTPPPQPRTAQPQKREEQTKKENEEDKLTDWNKLACLLCRRQFPNKEVLIKHQQLSDLHKQNLEIHRKIKQSEQELAYLERREREGKFKGRGNDRREKLQSFDSPERKRIKYSRETDSDRKLVDKEDIDTSSKGGCVQQATGWRKGTGLGYGHPGLASSEEAEGRMRGPSVGASGRTSKRQSNETYRDAVRRVMFARYKELD

SEQ ID NO: 1697 - protein, 601 aa, Homo sapiens
MIQDKEVTLEYVSSLDFWYCKRCKANIGGHRSSCSFCKNPREVTEAKQELITYPQPQKTSIPAPLEKQPNQPLRPADKEPEPRKREEGQESRLGHQKREAERYLPPSRREGPTFRRDRERESWSGETRQDGESKTIMLKRIYRSTPPEVIVEVLEPYVRLTTANVRIIKNRTGPMGHTYGFIDLDSHAEALRVVKILQNLDPPFSIDGKMVAVNLATGKRRNDSGDHSDHMHYYQGKKYFRDRRGGGRNSDWSSDTNRQGQQSSSDCYIYDSATGYYYDPLAGTYYDPNTQQEVYVPQDPGLPEEEEIKEKKPTSQGKSSSKKEMSKRDGKEKKDRGVTRFQENASEGKAPAEDVFKKPLPPTVKKEESPPPPKVVNPLIGLLGEYGGDSDYEEEEEEEQTPPPQPRTAQPQKREEQTKKENEEDKLTDWNKLACLLCRRQFPNKEVLIKHQQLSDLHKQNLEIHRKIKQSEQELAYLERREREGKFKGRGNDRREKLQSFDSPERKRIKYSRETDSDRKLVDKEDIDTSSKGGCVQQATGWRKGTGLGYGHPGLASSEEAEGRMRGPSVGASGRTSKRQSNETYRDAVRRVMFARYKELD

SEQ ID NO: 1698 - protein, 520 aa, Homo sapiens
MWGDSRPANRTGPFRGSQEERFAPGWNRDYPPPPLKSHAQERHSGNFPGRDSLPFDFQGHSGPPFANVEEHSFSYGARDGPHGDYRGGEGPGHDFRGGDFSSSDFQSRDSSQLDFRGRDIHSGDFRDREGPPMDYRGGDGTSMDYRGREAPHMNYRDRDAHAVDFRGRDAPPSDFRGRGTYDLDFRGRDGSHADFRGRDLSDLDFRAREQSRSDFRNRDVSDLDFRDKDGTQVDFRGRGSGTTDLDFRDRDTPHSDFRGRHRSRTDQDFRGREMGSCMEFKDREMPPVDPNILDYIQPSTQDREHSGMNVNRREESTHDHTIERPAFGIQKGEFEHSETREGETQGVAFEHESPADFQNSQSPVQDQDKSQLSGREEQSSDAGLFKEEGGLDFLGRQDTDYRSMEYRDVDHRLPGSQMFGYGQSKSFPEGKTARDAQRDLQDQDYRTGPSEEKPSRLIRLSGVPEDATKEEILNAFRTPDGMPVKNLQLKEYNTGNSNDPGQRSYPGVCIKPGFLVLQTM

SEQ ID NO: 1699 - protein, 1594 aa, Homo sapiens
MKLYVFLVNTGTTLTFDTELTVQTVADLKHAIQSKYKIAIQHQVLVVNGGECMAADRRVCTYSAGTDTNPIFLFNKEMILCDRPPAIPKTTFSTENDMEIKVEESLMMPAVFHTVASRTQLALEMYEVAKKLCSFCEGLVHDEHLQHQGWAAIMANLEDCSNSYQKLLFKFESIYSNYLQSIEDIKLKLTHLGTAVSVMAKIPLLECLTRHSYRECLGRLDSLPEHEDSEKAEMKRSTELVLSPDMPRTTNESLLTSFPKSVEHVSPDTADAESGKEIRESCQSTVHQQDETTIDTKDGDLPFFNVSLLDWINVQDRPNDVESLVRKCFDSMSRLDPRIIRPFIAECRQTIAKLDNQNMKAIKGLEDRLYALDQMIASCGRLVNEQKELAQGFLANQKRAENLKDASVLPDLCLSHANQLMIMLQNHRKLLDIKQKCTTAKQELANNLHVRLKWCCFVMLHADQDGEKLQALLRLVIELLERVKIVEALSTVPQMYCLAVVEVVRRKMFIKHYREWAGALVKDGKRLYEAEKSKRESFGKLFRKSFLRNRLFRGLDSWPPSFCTQKPRKFDCELPDISLKDLQFLQSFCPSEVQPFLRVPLLCDFEPLHQHVLALHNLVKAAQSLDEMSQTITDLLSEQKASVSQTSPQSASSPRMESTAGITTTTSPRTPPPLTVQDPLCPAVCPLEELSPDSIDAHTFDFETIPHPNIEQTIHQVSLDLDSLAESPESDFMSAVNEFVIEENLSSPNPISDPQSPEMMVESLYSSVINAIDSRRMQDTNVCGKEDFGDHTSLNVQLERCRVVAQDSHFSIQTIKEDLCHFRTFVQKEQCDFSNSLKCTAVEIRNIIEKVKCSLEITLKEKHQKELLSLKNEYEGKLDGLIKETEENENKIKKLKGELVCLEEVLQNKDNEFALVKHEKEAVICLQNEKDQKLLEMENIMHSQNCEIKELKQSREIVLEDLKKLHVENDEKLQLLRAELQSLEQSHLKELEDTLQVRHIQEFEKVMTDHRVSLEELKKENQQIINQIQESHAEIIQEKEKQLQELKLKVSDLSDTRCKLEVELALKEAETDEIKILLEESRAQQKETLKSLLEQETENLRTEISKLNQKIQDNNENYQVGLAELRTLMTIEKDQCISELISRHEEESNILKAELNKVTSLHNQAFEIEKNLKEQIIELQSKLDSELSALERQKDEKITQQEEKYEAIIQNLEKDRQKLVSSQEQDREQLIQKLNCEKDEAIQTALKEFKLEREVVEKELLEKVKHLENQIAKSPAIDSTRGDSSSLVAELQEKLQEEKAKFLEQLEEQEKRKNEEMQNVRTSLIAEQQTNFNTVLTREKMRKENIINDLSDKLKSTMQQQERDKDLIESLSEDRARLLEEKKKLEEEVSKLRSSSFVPSPYVATAPELYGACAPELPGESDRSAVETADEGRVDSAMETSMMSVQENIHMLSEEKQRIMLLERTLQLKEEENKRLNQRLMSQSMSSVSSRHSEKIAIRDFQVGDLVLIILDERHDNYVLFTVSPTLYFLHSESLPALDLKPGEGASGASRRPWVLGKVMEKEYCQAKKAQNRFKVPLGTKFYRVKAVSWNKKV

SEQ ID NO: 1700 - protein, 1591 aa, Homo sapiens
MKLYVFLVNTGTTLTFDTELTVQTVADLKHAIQSKYKIAIQHQVLVVNGGECMAADRRVCTYSAGTDTNPIFLFNKEMILCDRPPAIPKTTFSTENDMEIKVEESLMMPAVFHTVASRTQLALEMYEVAKKLCSFCEGLVHDEHLQHQGWAAIMANLEDCSNSYQKLLFKFESIYSNYLQSIEDIKLKLTHLGTAVSVMAKIPLLECLTRHSYRECLGRLDSLPEHEDSEKAEMKRSTELVLSPDMPRTTNESLLTSFPKSVEHVSPDTADAESGKEIRESCQSTVHQQDETTIDTKDGDLPFFNVSLLDWINVQDRPNDVESLVRKCFDSMSRLDPRIIRPFIAECRQTIAKLDNQNMKAIKGLEDRLYALDQMIASCGRLVNEQKELAQGFLANQKRAENLKDASVLPDLCLSHANQLMIMLQNHRKLLDIKQKCTTAKQELANNLHVRLKWCCFVMLHADQDGEKLQALLRLVIELLERVKIVEALSTVPQMYCLAVVEVVRRKMFIKHYREWAGALVKDGKRLYEAEKSKRESFGKLFRKSFLRNRLFRGLDSWPPSFCTQKPRKFDCELPDISLKDLQFLQSFCPSEVQPFLRVPLLCDFEPLHQHVLALHNLVKAAQSLDEMSQTITDLLSEQKASVSQTSPQSASSPRMESTAGITTTTSPRTPPPLTVQDPLCPAVCPLEELSPDSIDAHTFDFETIPHPNIEQTIHQVSLDLDSLAESPESDFMSAVNEFVIEENLSSPNPISDPQSPEMMVESLYSSVINAIDSRRMQDTNVCGKEDFGDHTSLNVQLERCRVVAQDSHFSIQTIKEDLCHFRTFVQKEQCDFSNSLKCTAVEIRNIIEKVKCSLEITLKEKHQKELLSLKNEYEGKLDGLIKETEENENKIKKLKGELVCLEEVLQNKDNEFALVKHEKEAVICLQNEKDQKLLEMENIMHSQNCEIKELKQSREIVLEDLKKLHVENDEKLQLLRAELQSLEQSHLKELEDTLQVRHIQEFEKVMTDHRVSLEELKKENQQIINQIQESHAEIIQEKEKQLQELKLKVSDLSDTRCKLEVELALKEAETDEIKILLEESRAQQKETLKSLLEQETENLRTEISKLNQKIQDNNENYQVGLAELRTLMTIEKDQCISELISRHEEESNILKAELNKVTSLHNQAFEIEKNLKEQIIELQSKLDSELSALERQKDEKITQQEEKYEAIIQNLEKDRQKLVSSQEQDREQLIQKLNCEKDEAIQTALKEFKLEREVVEKELLEKVKHLENQIAKSPAIDSTRGDSSSLVAELQEKLQEEKAKFLEQLEEQEKRKNEEMQNVRTSLIAEQQTNFNTVLTREKMRKENIINDLSDKLKSTMQQQERDKDLIESLSEDRARLLEEKKKLEEEVSKLRSSSFVPSPYVATAPELYGACAPELPGESDRSAVETADEGRVDSAMETSMMSVQENIHMLSEEKQRIMLLERTLQLKEEENKRLNQRLMSQSMSSVSSRHSEKIAIRDFQVGDLVLIILDERHDNYVLFTVSPTLYFLHSESLPALDLKPASGASRRPWVLGKVMEKEYCQAKKAQNRFKVPLGTKFYRVKAVSWNKKV

SEQ ID NO: 1701 - protein, 252 aa, Homo sapiens
MEDGVAGPQLGAAAEAAEAAEARARPGVTLRPFAPLSGAAEADEGGGDWSFIDCEMEEVDLQDLPSATIACHLDPRVFVDGLCRAKFESLFRTYDKDITFQYFKSFKRVRINFSNPFSAADARLQLHKTEFLGKEMKLYFAQTLHIGSSHLAPPNPDKQFLISPPASPPVGWKQVEDATPVINYDLLYAISKLGPGEKYELHAATDTTPSVVVHVCESDQEKEEEEEMERMRRPKPKIIQTRRPEYTPIHLS

SEQ ID NO: 1702 - protein, 197 aa, Homo sapiens
MHFRNFNYSFSSLIACVANSDIFSESETRAKFESLFRTYDKDITFQYFKSFKRVRINFSNPFSAADARLQLHKTEFLGKEMKLYFAQTLHIGSSHLAPPNPDKQFLISPPASPPVGWKQVEDATPVINYDLLYAISKLGPGEKYELHAATDTTPSVVVHVCESDQEKEEEEEMERMRRPKPKIIQTRRPEYTPIHLS

SEQ ID NO: 1703 - protein, 171 aa, Homo sapiens
MVYAKFESLFRTYDKDITFQYFKSFKRVRINFSNPFSAADARLQLHKTEFLGKEMKLYFAQTLHIGSSHLAPPNPDKQFLISPPASPPVGWKQVEDATPVINYDLLYAISKLGPGEKYELHAATDTTPSVVVHVCESDQEKEEEEEMERMRRPKPKIIQTRRPEYTPIHLS

SEQ ID NO: 1704 - protein, 117 aa, Homo sapiens
MKLYFAQTLHIGSSHLAPPNPDKQFLISPPASPPVGWKQVEDATPVINYDLLYAISKLGPGEKYELHAATDTTPSVVVHVCESDQEKEEEEEMERMRRPKPKIIQTRRPEYTPIHLS

SEQ ID NO: 1705 - protein, 194 aa, Homo sapiens
MAIRELKVCLLGDTGVGKSSIVCRFVQDHFDHNISPTIGASFMTKTVPCGNELHKFLIWDTAGQERFHSLAPMYYRGSAAAVIVYDITKQDSFYTLKKWVKELKEHGPENIVMAIAGNKCDLSDIREVPLKDAKEYAESIGAIVVETSAKNAINIEELFQGISRQIPPLDPHENGNNGTIKVEKPTMQASRRCC

SEQ ID NO: 1706 - protein, 225 aa, Homo sapiens
MAGGGAGDPGLGAAAAPAPETREHLFKVLVIGELGVGKTSIIKRYVHQLFSQHYRATIGVDFALKVLNWDSRTLVRLQLWDIAGQERFGNMTRVYYKEAVGAFVVFDISRSSTFEAVLKWKSDLDSKVHLPNGSPIPAVLLANKCDQNKDSSQSPSQVDQFCKEHGFAGWFETSAKDNINIEEAARFLVEKILVNHQSFPNEENDVDKIKLDQETLRAENKSQCC

SEQ ID NO: 1707 - protein, 228 aa, Homo sapiens
MAEDKTKPSELDQGKYDADDNVKIICLGDSAVGKSKLMERFLMDGFQPQQLSTYALTLYKHTATVDGKTILVDFWDTAGQERFQSMHASYYHKAHACIMVFDIQRKVTYRNLSTWYTELREFRPEIPCIVVANKIDDINVTQKSFNFAKKFSLPLYFVSAADGTNVVKLFNDAIRLAVSYKQNSQDFMDEIFQELENFSLEQEEEDVPDQEQSSSIETPSEEVASPHS

SEQ ID NO: 1708 - protein, 229 aa, Homo sapiens
MAEDKTKPSELDQGKYDADDNVKIICLGDSAVGKSKLMERFLMDGFQPQQLSTYALTLYKHTATVDGKTILVDFWDTAGQERFQSMHASYYHKAHACIMVFDIQRKVTYRNLSTWYTELREFRPEIPCIVVANKIDADINVTQKSFNFAKKFSLPLYFVSAADGTNVVKLFNDAIRLAVSYKQNSQDFMDEIFQELENFSLEQEEEDVPDQEQSSSIETPSEEVASPHS

SEQ ID NO: 1709 - protein, 238 aa, Homo sapiens
MAEDKTKPSELDQGKYDADDNVKIICLGDSAVGKSKLMERFLMDGFQPQQLSTYALTLYKHTATVDGKTILVDFWDTAGQERFQSMHASYYHKAHACIMVFDIQRKVTYRNLSTWYTELREFRPEIPCIVVANKIDDINVTQKSFNFAKKFSLPLYFVSAADGTNVVKVWLTAEVASKLFNDAIRLAVSYKQNSQDFMDEIFQELENFSLEQEEEDVPDQEQSSSIETPSEEVASPHS

SEQ ID NO: 1710 - protein, 156 aa, Homo sapiens
MAPAVTRLLFLQLVLGPTLVMDIKMQIGSRNFYTLSIDYPRVNYPKGFRGYCNGLMSYMRGKMQNSDCPKIHYVIHAPWKAIQKFCKYSDSFCENYNEYCTLTQDSLPITVCSLSHQQPPTSCYYNSTLTNQKLYLLCSRKYEADPIGIAGLYSGI

SEQ ID NO: 1711 - protein, 325 aa, Homo sapiens
MAAAVRCMGRALIHHQRHSLSKMVYQTSLCSCSVNIRVPNRHFAAATKSAKKTKKGAKEKTPDEKKDEIEKIKAYPYMEGEPEDDVYLKRLYPRQIYEVEKAVHLLKKFQILDFTSPKQSVYLDLTLDMALGKKKNVEPFTSVLSLPYPFASEINKVAVFTENASEVKIAEENGAAFAGGTSLIQKIWDDEIVADFYVAVPEIMPELNRLRKKLNKKYPKLSRNSIGRDIPKMLELFKNGHEIKVDEERENFLQTKIATLDMSSDQIAANLQAVINEVCRHRPLNLGPFVVRAFLRSSTSEGLLLKIDPLLPKEVKNEESEKEDA

SEQ ID NO: 1712 - protein, 199 aa, Homo sapiens
METFPLLLLSLGLVLAEASESTMKIIKEEFTDEEMQYDMAKSGQEKQTIEILMNPILLVKNTSLSMSKDDMSSTLLTFRSLHYNDPKGNSSGNDKECCNDMTVWRKVSEANGSCKWSNNFIRSSTEVMRRVHRAPSCKFVQNPGISCCESLELENTVCQFTTGKQFPRCQYHSVTSLEKILTVLTGHSLMSWLVCGSKL

SEQ ID NO: 1713 - protein, 412 aa, Homo sapiens
MPLQLLLLLILLGPGNSLQLWDTWADEAEKALGPLLARDRRQATEYEYLDYDFLPETEPPEMLRNSTDTTPLTGPGTPESTTVEPAARRSTGLDAGGAVTELTTELANMGNLSTDSAAMEIQTTQPAATEAQTTQPVPTEAQTTPLAATEAQTTRLTATEAQTTPLAATEAQTTPPAATEAQTTQPTGLEAQTTAPAAMEAQTTAPAAMEAQTTPPAAMEAQTTQTTAMEAQTTAPEATEAQTTQPTATEAQTTPLAAMEALSTEPSATEALSMEPTTKRGLFIPFSVSSVTHKGIPMAASNLSVNYPVGAPDHISVKQCLLAILILALVATIFFVCTVVLAVRLSRKGHMYPVRNYSPTEMVCISSLLPDGGEGPSATANGGLSKAKSPGLTPEPREDREGDDLTLHSFLP

SEQ ID NO: 1714 - protein, 428 aa, Homo sapiens
MAVGASGLEGDKMAGAMPLQLLLLLILLGPGNSLQLWDTWADEAEKALGPLLARDRRQATEYEYLDYDFLPETEPPEMLRNSTDTTPLTGPGTPESTTVEPAARRSTGLDAGGAVTELTTELANMGNLSTDSAAMEIQTTQPAATEAQTTQPVPTEAQTTPLAATEAQTTRLTATEAQTTPLAATEAQTTPPAATEAQTTQPTGLEAQTTAPAAMEAQTTAPAAMEAQTTPPAAMEAQTTQTTAMEAQTTAPEATEAQTTQPTATEAQTTPLAAMEALSTEPSATEALSMEPTTKRGLFIPFSVSSVTHKGIPMAASNLSVNYPVGAPDHISVKQCLLAILILALVATIFFVCTVVLAVRLSRKGHMYPVRNYSPTEMVCISSLLPDGGEGPSATANGGLSKAKSPGLTPEPREDREGDDLTLHSFLP

SEQ ID NO: 1715 - protein, 31 aa, Homo sapiens
MGINTRELFLNFTIVLITVILMWLLVRSYQY

SEQ ID NO: 1716 - protein, 130 aa, Homo sapiens
MRLFTGIVFCSLVMGVTSESWRSFFKEALQGVGDMGRAYWDIMISNHQNSNRYLYARGNYDAAQRGPGGVWAAKLISRSRVYLQGLIDCYLFGNSSTVLEDSKSNEKAEEWGRSGKDPDRFRPDGLPKKY

SEQ ID NO: 1717 - protein, 150 aa, Homo sapiens
MAGILFEDIFDVKDIDPEGKKFDRVSRLHCESESFKMDLILDVNIQIYPVDLGDKFRLVIASTLYEDGTLDDGEYNPTDDRPSRADQFEYVMYGKVYRIEGDETSTEAATRLSAYVSYGGLLMRLQGDANNLHGFEVDSRVYLLMKKLAF

SEQ ID NO: 1718 - protein, 122 aa, Homo sapiens
MAGILFEDIFDVKDIDPEGKKFDRVSRLHCESESFKMDLILDVNIQIYPVDLGDKFRLVIASTLYEDGTLDDGEYNPTDDRPSSSAYVSYGGLLMRLQGDANNLHGFEVDSRVYLLMKKLAF

SEQ ID NO: 1719 - protein, 114 aa, Homo sapiens
MDLILDVNIQIYPVDLGDKFRLVIASTLYEDGTLDDGEYNPTDDRPSRADQFEYVMYGKVYRIEGDETSTEAATRLSAYVSYGGLLMRLQGDANNLHGFEVDSRVYLLMKKLAF

SEQ ID NO: 1720 - protein, 175 aa, Homo sapiens
MAGILFEDIFDVKDIDPEGKKFDRVSRLHCESESFKMDLILDVNIQIYPVDLGDKFRLVIASTLYEDGTLDDGEYNPTDDRPSRADQFEYVMYGKVYRIEGDETSTEAATRLLRLRAAEWQCSRITGWGLLFQLCVRVLWGPAHEAAGGCQQPAWIRGGLQSLSPDEEASLLNLA

SEQ ID NO: 1721 - protein, 86 aa, Homo sapiens
MDLILDVNIQIYPVDLGDKFRLVIASTLYEDGTLDDGEYNPTDDRPSSSAYVSYGGLLMRLQGDANNLHGFEVDSRVYLLMKKLAF

SEQ ID NO: 1722 - protein, 918 aa, Homo sapiens
MASLSRALRVAAAHPRQSPTRGMGPCNLSSAAGPTAEKSVPYQRTLKEGQGTSVVAQGPSRPLPSTANVVVIGGGSLGCQTLYHLAKLGMSGAVLLERERLTSGTTWHTAGLLWQLRPSDVEVELLAHTRRVVSRELEEETGLHTGWIQNGGLFIASNRQRLDEYKRLMSLGKAYGVESHVLSPAETKTLYPLMNVDDLYGTLYVPHDGTMDPAGTCTTLARAASARGAQVIENCPVTGIRVWTDDFGVRRVAGVETQHGSIQTPCVVNCAGVWASAVGRMAGVKVPLVAMHHAYVVTERIEGIQNMPNVRDHDASVYLRLQGDALSVGGYEANPIFWEEVSDKFAFGLFDLDWEVFTQHIEGAINRVPVLEKTGIKSTVCGPESFTPDHKPLMGEAPELRGFFLGCGFNSAGMMLGGGCGQELAHWIIHGRPEKDMHGYDIRRFHHSLTDHPRWIRERSHESYAKNYSVVFPHDEPLAGRNMRRDPLHEELLGQGCVFQERHGWERPGWFHPRGPAPVLEYDYYGAYGSRAHEDYAYRRLLADEYTFAFPPHHDTIKKECLACRGAAAVFDMSYFGKFYLVGLDARKAADWLFSADVSRPPGSTVYTCMLNHRGGTESDLTVSRLAPSHQASPLAPAFEGDGYYLAMGGAVAQHNWSHITTVLQDQKSQCQLIDSSEDLGMISIQGPASRAILQEVLDADLSNEAFPFSTHKLLRAAGHLVRAMRLSFVGELGWELHIPKASCVPVYRAVMAAGAKHGLINAGYRAIDSLSIEKGYRHWHADLRPDDSPLEAGLAFTCKLKSPVPFLGREALEQQRAAGLRRRLVCFTMEDKVPMFGLEAIWRNGQVVGHVRRADFGFAIDKTIAYGYIHDPSGGPVSLDFVKSGDYALERMGVTYGAQAHLKSPFDPNNKRVKGIY

SEQ ID NO: 1723 - protein, 750 aa, Homo sapiens
MSLGKAYGVESHVLSPAETKTLYPLMNVDDLYGTLYVPHDGTMDPAGTCTTLARAASARGAQVIENCPVTGIRVWTDDFGVRRVAGVETQHGSIQTPCVVNCAGVWASAVGRMAGVKVPLVAMHHAYVVTERIEGIQNMPNVRDHDASVYLRLQGDALSVGGYEANPIFWEEVSDKFAFGLFDLDWEVFTQHIEGAINRVPVLEKTGIKSTVCGPESFTPDHKPLMGEAPELRGFFLGCGFNSAGMMLGGGCGQELAHWIIHGRPEKDMHGYDIRRFHHSLTDHPRWIRERSHESYAKNYSVVFPHDEPLAGRNMRRDPLHEELLGQGCVFQERHGWERPGWFHPRGPAPVLEYDYYGAYGSRAHEDYAYRRLLADEYTFAFPPHHDTIKKECLACRGAAAVFDMSYFGKFYLVGLDARKAADWLFSADVSRPPGSTVYTCMLNHRGGTESDLTVSRLAPSHQASPLAPAFEGDGYYLAMGGAVAQHNWSHITTVLQDQKSQCQLIDSSEDLGMISIQGPASRAILQEVLDADLSNEAFPFSTHKLLRAAGHLVRAMRLSFVGELGWELHIPKASCVPVYRAVMAAGAKHGLINAGYRAIDSLSIEKGYRHWHADLRPDDSPLEAGLAFTCKLKSPVPFLGREALEQQRAAGLRRRLVCFTMEDKVPMFGLEAIWRNGQVVGHVRRADFGFAIDKTIAYGYIHDPSGGPVSLDFVKSGDYALERMGVTYGAQAHLKSPFDPNNKRVKGIY

SEQ ID NO: 1724 - protein, 606 aa, Homo sapiens
MVRGARQPQQPRSRLAPRLTGTVEKPPRKRRSRTEFALKEIMSSGGAEDDIPQGERKTVTDFCYLLDKSKQLFNGLRDLPQYGQKQWQSYFGRTFDVYTKLWKFQQQHRQVLDNRYGLKRWQIGEIASKIGQLYYHYYLRTSETSYLNEAFSFYSAIRQRSYYSQVNKEDRPELVVKKLRYYARFIVVCLLLNKMDVVKDLVKELSDEIEDYTHRFNTEDQVEWNLVLQEVAAFIEADPVMVLNDDNTIVITSNRLAETGAPLLEQGMIVGQLSLADALIIGNCNNQVKFSELTVDMFRMLQALEREPMNLASQMNKPGMQESADKPTRRENPHKYLLYKPTFSQLYTFLAASFKELPANSVLLIYLSATGVFPTGRSDSEGPYDFGGVLTNSNRDIINGDAIHKRNQSHKEMHCLHPGDLYPFTRKPLFIIVDSSNSVAYKNFTNLFGQPLVCLLSPTAYPKALQDQSQRGSLFTLFLNNPLMAFLFVSGLSSMRRGLWEKCQEYLRKINRDIAQLLTHSRSIDQAFLQFFGDEFLRLLLTRFIFCSATMRMHKIFRETRNYPESYPQLPRDETVENPHLQKHILELASILDVRNVFFENTIDDY

SEQ ID NO: 1725 - protein, 629 aa, Homo sapiens
MVRGARQPQQPRSRLAPRLTGTVEKPPRKRRSSIRGSGDSSHSQSQGERYQHFTEKTEFALKEIMSSGGAEDDIPQGERKTVTDFCYLLDKSKQLFNGLRDLPQYGQKQWQSYFGRTFDVYTKLWKFQQQHRQVLDNRYGLKRWQIGEIASKIGQLYYHYYLRTSETSYLNEAFSFYSAIRQRSYYSQVNKEDRPELVVKKLRYYARFIVVCLLLNKMDVVKDLVKELSDEIEDYTHRFNTEDQVEWNLVLQEVAAFIEADPVMVLNDDNTIVITSNRLAETGAPLLEQGMIVGQLSLADALIIGNCNNQVKFSELTVDMFRMLQALEREPMNLASQMNKPGMQESADKPTRRENPHKYLLYKPTFSQLYTFLAASFKELPANSVLLIYLSATGVFPTGRSDSEGPYDFGGVLTNSNRDIINGDAIHKRNQSHKEMHCLHPGDLYPFTRKPLFIIVDSSNSVAYKNFTNLFGQPLVCLLSPTAYPKALQDQSQRGSLFTLFLNNPLMAFLFVSGLSSMRRGLWEKCQEYLRKINRDIAQLLTHSRSIDQAFLQFFGDEFLRLLLTRFIFCSATMRMHKIFRETRNYPESYPQLPRDETVENPHLQKHILELASILDVRNVFFENTIDDY

SEQ ID NO: 1726 - protein, 147 aa, Homo sapiens
MAAAADSFSGGPAGVRLPRSPPLKVLAEQLRRDAEGGPGAWRLSRAAAGRGPLDLAAVWMQGRVVMADRGEARLRDPSGDFSVRGLERVPRGRPCLVPGKYVMVMGVVQACSPEPCLQAVKMTDLSDNPIHESMWELEVEDLHRNIP

SEQ ID NO: 1727 - protein, 84 aa, Homo sapiens
MKQTQVGSLFSLGIRNPEPGPVSGTAVPRQLAWKSGKYVMVMGVVQACSPEPCLQAVKMTDLSDNPIHESMWELEVEDLHRNIP

SEQ ID NO: 1728 - protein, 662 aa, Homo sapiens
MKPLEKFLKKQTSQLAGRTVAGGPGGGLGSCGGPGGGGGPGGGGGPAGGQRSLQRRQSVSRLLLPAFLREPPAEPGLEPPVPEEGGEPAGVAEEPGSGGPCWLQLEEVPGPGPLGGGGPLRSPSSYSSDELSPGEPLTSPPWAPLGAPERPEHLLNRVLERLAGGATRDSAASDILLDDIVLTHSLFLPTEKFLQELHQYFVRAGGMEGPEGLGRKQACLAMLLHFLDTYQGLLQEEEGAGHIIKDLYLLIMKDESLYQGLREDTLRLHQLVETVELKIPEENQPPSKQVKPLFRHFRRIDSCLQTRVAFRGSDEIFCRVYMPDHSYVTIRSRLSASVQDILGSVTEKLQYSEEPAGREDSLILVAVSSSGEKVLLQPTEDCVFTALGINSHLFACTRDSYEALVPLPEEIQVSPGDTEIHRVEPEDVANHLTAFHWELFRCVHELEFVDYVFHGERGRRETANLELLLQRCSEVTHWVATEVLLCEAPGKRAQLLKKFIKIAALCKQNQDLLSFYAVVMGLDNAAVSRLRLTWEKLPGKFKNLFRKFENLTDPCRNHKSYREVISKMKPPVIPFVPLILKDLTFLHEGSKTLVDGLVNIEKLHSVAEKVRTIRKYRSRPLCLDMEASPNHLQTKAYVRQFQVIDNQNLLFELSYKLEANSQ

SEQ ID NO: 1729 - protein, 456 aa, Homo sapiens
MEGPEGLGRKQACLAMLLHFLDTYQGLLQEEEGAGHIIKDLYLLIMKDESLYQGLREDTLRLHQLVETVELKIPEENQPPSKQVKPLFRHFRRIDSCLQTRVAFRGSDEIFCRVYMPDHSYVTIRSRLSASVQDILGSVTEKLQYSEEPAGREDSLILVAVSSSGEKVLLQPTEDCVFTALGINSHLFACTRDSYEALVPLPEEIQVSPGDTEIHRVEPEDVANHLTAFHWELFRCVHELEFVDYVFHGERGRRETANLELLLQRCSEVTHWVATEVLLCEAPGKRAQLLKKFIKIAALCKQNQDLLSFYAVVMGLDNAAVSRLRLTWEKLPGKFKNLFRKFENLTDPCRNHKSYREVISKMKPPVIPFVPLILKDLTFLHEGSKTLVDGLVNIEKLHSVAEKVRTIRKYRSRPLCLDMEASPNHLQTKAYVRQFQVIDNQNLLFELSYKLEANSQ

SEQ ID NO: 1730 - protein, 511 aa, Homo sapiens
MLIHPRGLPSSSHRRKINSTYFYILLDDIVLTHSLFLPTEKFLQELHQYFVRAGGMEGPEGLGRKQACLAMLLHFLDTYQGLLQEEEGAGHIIKDLYLLIMKDESLYQGLREDTLRLHQLVETVELKIPEENQPPSKQVKPLFRHFRRIDSCLQTRVAFRGSDEIFCRVYMPDHSYVTIRSRLSASVQDILGSVTEKLQYSEEPAGREDSLILVAVSSSGEKVLLQPTEDCVFTALGINSHLFACTRDSYEALVPLPEEIQVSPGDTEIHRVEPEDVANHLTAFHWELFRCVHELEFVDYVFHGERGRRETANLELLLQRCSEVTHWVATEVLLCEAPGKRAQLLKKFIKIAALCKQNQDLLSFYAVVMGLDNAAVSRLRLTWEKLPGKFKNLFRKFENLTDPCRNHKSYREVISKMKPPVIPFVPLILKDLTFLHEGSKTLVDGLVNIEKLHSVAEKVRTIRKYRSRPLCLDMEASPNHLQTKAYVRQFQVIDNQNLLFELSYKLEANSQ

SEQ ID NO: 1731 - protein, 730 aa, Homo sapiens
MFGRKRSVSFGGFGWIDKTMLASLKVKKQELANSSDATLPDRPLSPPLTAPPTMKSSEFFEMLEKMQGIKLEEQKPGPQKNKDDYIPYPSIDEVVEKGGPYPQVILPQFGGYWIEDPENVGTPTSLGSSICEEEEEDNLSPNTFGYKLECKGEARAYRRHFLGKDHLNFYCTGSSLGNLILSVKCEEAEGIEYLRVILRSKLKTVHERIPLAGLSKLPSVPQIAKAFCDDAVGLRFNPVLYPKASQMIVSYDEHEVNNTFKFGVIYQKARQTLEEELFGNNEESPAFKEFLDLLGDTITLQDFKGFRGGLDVTHGQTGVESVYTTFRDREIMFHVSTKLPFTDGDAQQLQRKRHIGNDIVAIIFQEENTPFVPDMIASNFLHAYIVVQVETPGTETPSYKVSVTAREDVPTFGPPLPSPPVFQKGPEFREFLLTKLTNAENACCKSDKFAKLEDRTRAALLDNLHDELHAHTQAMLGLGPEEDKFENGGHGGFLESFKRAIRVRSHSMETMVGGQKKSHSGGIPGSLSGGISHNSMEVTKTTFSPPVVAATVKNQSRSPIKRRSGLFPRLHTGSEGQGDSRARCDSTSSTPKTPDGGHSSQEIKSETSSNPSSPEICPNKEKPFMKLKENGRAISRSSSSTSSVSSTAGEGEAMEEGDSGGSQPSTTSPFKQEVFVYSPSPSSESPSLGAAATPIIMSRSPTDAKSRNSPRSNLKFRFDKLSHASSGAGH

SEQ ID NO: 1732 - protein, 715 aa, Homo sapiens
MFGRKRSVSFGGFGWIDKTMLASLKVKKQELANSSDATLPDRPLSPPLTAPPTMKSSEFFEMLEKMQDDYIPYPSIDEVVEKGGPYPQVILPQFGGYWIEDPENVGTPTSLGSSICEEEEEDNLSPNTFGYKLECKGEARAYRRHFLGKDHLNFYCTGSSLGNLILSVKCEEAEGIEYLRVILRSKLKTVHERIPLAGLSKLPSVPQIAKAFCDDAVGLRFNPVLYPKASQMIVSYDEHEVNNTFKFGVIYQKARQTLEEELFGNNEESPAFKEFLDLLGDTITLQDFKGFRGGLDVTHGQTGVESVYTTFRDREIMFHVSTKLPFTDGDAQQLQRKRHIGNDIVAIIFQEENTPFVPDMIASNFLHAYIVVQVETPGTETPSYKVSVTAREDVPTFGPPLPSPPVFQKGPEFREFLLTKLTNAENACCKSDKFAKLEDRTRAALLDNLHDELHAHTQAMLGLGPEEDKFENGGHGGFLESFKRAIRVRSHSMETMVGGQKKSHSGGIPGSLSGGISHNSMEVTKTTFSPPVVAATVKNQSRSPIKRRSGLFPRLHTGSEGQGDSRARCDSTSSTPKTPDGGHSSQEIKSETSSNPSSPEICPNKEKPFMKLKENGRAISRSSSSTSSVSSTAGEGEAMEEGDSGGSQPSTTSPFKQEVFVYSPSPSSESPSLGAAATPIIMSRSPTDAKSRNSPRSNLKFRFDKLSHASSGAGH

SEQ ID NO: 1733 - protein, 711 aa, Homo sapiens
MLASLKVKKQELANSSDATLPDRPLSPPLTAPPTMKSSEFFEMLEKMQGIKLEEQKPGPQKNKDDYIPYPSIDEVVEKGGPYPQVILPQFGGYWIEDPENVGTPTSLGSSICEEEEEDNLSPNTFGYKLECKGEARAYRRHFLGKDHLNFYCTGSSLGNLILSVKCEEAEGIEYLRVILRSKLKTVHERIPLAGLSKLPSVPQIAKAFCDDAVGLRFNPVLYPKASQMIVSYDEHEVNNTFKFGVIYQKARQTLEEELFGNNEESPAFKEFLDLLGDTITLQDFKGFRGGLDVTHGQTGVESVYTTFRDREIMFHVSTKLPFTDGDAQQLQRKRHIGNDIVAIIFQEENTPFVPDMIASNFLHAYIVVQVETPGTETPSYKVSVTAREDVPTFGPPLPSPPVFQKGPEFREFLLTKLTNAENACCKSDKFAKLEDRTRAALLDNLHDELHAHTQAMLGLGPEEDKFENGGHGGFLESFKRAIRVRSHSMETMVGGQKKSHSGGIPGSLSGGISHNSMEVTKTTFSPPVVAATVKNQSRSPIKRRSGLFPRLHTGSEGQGDSRARCDSTSSTPKTPDGGHSSQEIKSETSSNPSSPEICPNKEKPFMKLKENGRAISRSSSSTSSVSSTAGEGEAMEEGDSGGSQPSTTSPFKQEVFVYSPSPSSESPSLGAAATPIIMSRSPTDAKSRNSPRSNLKFRFDKLSHASSGAGH

SEQ ID NO: 1734 - protein, 340 aa, Homo sapiens
MAAPLLHTRLPGDAAASPSAVKMLGASRTGISNMRALENDFFNSPPRKTVQFGGTVTEVLLKYKTGETNDFELLKNQLLDPDIKDDQIINWLLEFRSSIMYLTKDFEQLISIILRLPWLNRSQTVVEEYLAFLGNLVSAQTVFLRPCLSMIASHFVPPRVIIKEGDVDVSDSDDEDDNLPANFDTSQSLANNSKICTIECYVHNLLRISVYFPTLRHEILELIIEKLLKLDVNASRQGIEDAEETANQTCGGTDSTEGLCNMGFAEAFLEPLWKKLQDPSNPAIIRQAAGNYIGSFLARAKFIPLMIREQRHSAMLLSMDHFTQPAKLCSTPLFLDTSSF

SEQ ID NO: 1735 - protein, 275 aa, Homo sapiens
MPYANQPTVRITELTDENVKFIIENTDLAVANSIRRVFIAEVPIIAIDWVQIDANSSVLHDEFIAHRLGLIPLISDDIVDKLQYSRDCTCEEFCPECSVEFTLDVRCNEDQTRHVTSRDLISNSPRVIPVTSRNRDNDPNDYVEQDDILIVKLRKGQELRLRAYAKKGFGKEHAKWNPTAGVAFEYDPDNALRHTVYPKPEEWPKSEYSELDEDESQAPYDPNGKPERFYYNVESCGSLRPETIVLSALSGLKKKLSDLQTQLSHEIQSDVLTIN

SEQ ID NO: 1736 - protein, 286 aa, Homo sapiens
MSWLLFLAHRVALAALPCRRGSRGFGMFYAVRRGRKTGVFLTWNECRAQVDRFPAARFKKFATEDEAWAFVRKSASPEVSEGHENQHGQESEAKASKRLREPLDGDGHESAEPYAKHMKPSVEPAPPVSRDTFSYMGDFVVVYTDGCCSSNGRRRPRAGIGVYWGPGHPLNVGIRLPGRQTNQRAEIHAACKAIEQAKTQNINKLVLYTDSMFTINGITNWVQGWKKNGWKTSAGKEVINKEDFVALERLTQGMDIQWMHVPGHSGFIGNEEADRLAREGAKQSED

SEQ ID NO: 1737 - protein, 279 aa, Homo sapiens [sequence omitted]

SEQ ID NO: 1738 - protein, 376 aa, Homo sapiens
MHLLKVGTWRNNTASSWLMKFSVLWLVSQNCCRASVVWMAYMNISFHVGNHVLSELGETGVFGRSSTLKRVAGVIVPPEGKIQNACNPNTIFSRSKYSETWLALIERGGCTFTQKIKVATEKGASGVIIYNVPGTGNQVFPMFHQAFEDVVVVMIGNLKGTEIFHLIKKGVLITAVVEVGRKHIIWMNHYLVSFVIVTTATLAYFIFYHIHRLCLARIQNRRWQRLTTDLQNTFGQLQLRVVKEGDEEINPNGDSCVICFERYKPNDIVRILTCKHFFHKNCIDPWILPHGTCPICKCDILKVLGIQVVVENGTEPLQVLMSNELPETLSPSEEETNNEVSPAGTSDKVIHVEENPTSQNNDIQPHSVVEDVHPSP

SEQ ID NO: 1739 - protein, 212 aa, Homo sapiens
MAQTDKPTCIPPELPKMLKEFAKAAIRVQPQDLIQWAADYFEALSRGETPPVRERSERVALCNRAELTPELLKILHSQVAGRLIIRAEELAQMWKVVNLPTDLFNSVMNVGRFTEEIEWLKFLALACSALGVTITKTLKIVCEVLSCDHNGGSPRIPFSTFQFLYTYIAKVDGEISASHVSRMLNYMEQEVIGPDGIITVNDFTQNPRVQLE

SEQ ID NO: 1740 - protein, 58 aa, Homo sapiens
MAQTDKPTCIPPELPKMLKEFAKAAIRVQPQDLIQWAAEYVLLSRLHPLEDGRRQRVL

SEQ ID NO: 1741 - protein, 227 aa, Homo sapiens
MACTKTLQQSQPISAGATTTTTAVAPAGGHSGSTECDLECLVCREPYSCPRLPKLLACQHAFCAICLKLLLCVQDNTWSITCPLCRKVTAVPGGLICSLRDHEAVVGQLAQPCTEVSLCPQGLVDPADLAAGHPSLVGEDGQDEVSANHVAARRLAAHLLLLALLIILIGPFIYPGVLRWVLTFIIALALLMSTLFCCLPSTRGSCWPSSRTLFCREQKHSHISSIA

SEQ ID NO: 1742 - protein, 566 aa, Homo sapiens
MDLHRAAFKMENSSYLPNPLASPALMVLASTAEASRDASIPCQQPRPFGVPVSVDKDVHIPFTNGSYTFASMYHRQGGVPGTFANRDFPPSLLHLHPQFAPPNLDCTPISMLNHSGVGAFRPFASTEDRESYQSAFTPAKRLKNCHDTESPHLRFSDADGKEYDFGTQLPSSSPGSLKVDDTGKKIFAVSGLISDREASSSPEDRNDRCKKKAAALFDSQAPICPICQVLLRPSELQEHMEQELEQLAQLPSSKNSLLKDAMAPGTPKSLLLSASIKREGESPTASPHSSATDDLHHSDRYQTFLRVRANRQTRLNARIGKMKRRKQDEGQREGSCMAEDDAVDIEHENNNRFEEYEWCGQKRIRATTLLEGGFRGSGFIMCSGKENPDSDADLDVDGDDTLEYGKPQYTEADVIPCTGEEPGEAKEREALRGAVLNGGPPSTRITPEFSKWASDEMPSTSNGESSKQEAMQKTCKNSDIEKITEDSAVTTFEALKARVRELERQLSRGDRYKCLICMDSYSMPLTSIQCWHVHCEECWLRTLGAKKLCPQCNTITAPGDLRRIYL

SEQ ID NO: 1743 - protein, 353 aa, Homo sapiens
MEQELEQLAQLPSSKNSLLKDAMAPGTPKSLLLSASIKREGESPTASPHSSATDDLHHSDRYQTFLRVRANRQTRLNARIGKMKRRKQDEGQVCPLCNRPLAGSEQEMSRHVEHCLSKREGSCMAEDDAVDIEHENNNRFEEYEWCGQKRIRATTLLEGGFRGSGFIMCSGKENPDSDADLDVDGDDTLEYGKPQYTEADVIPCTGEEPGEAKEREALRGAVLNGGPPSTRITPEFSKWASDEMPSTSNGESSKQEAMQKTCKNSDIEKITEDSAVTTFEALKARVRELERQLSRGDRYKCLICMDSYSMPLTSIQCWHVHCEECWLRTLGAKKLCPQCNTITAPGDLRRIYL

SEQ ID NO: 1744 - protein, 5207 aa, Homo sapiens
MECPSCQHVSKEETPKFCSQCGERLPPAAPIADSENNNSTMASASEGEMECGQELKEEGGPCLFPGSDSWQENPEEPCSKASWTVQESKKKKRKKKKKGNKSASSELASLPLSPASPCHLTLLSNPWPQDTALPHSQAQQSGPTGQPSQPPGTATTPLEGDGLSAPTEVGDSPLQAQALGEAGVATGSEAQSSPQFQDHTEGEDQDASIPSGGRGLSQEGTGPPTSAGEGHSRTEDAAQELLLPESKGGSSEPGTELQTTEQQAGASASMAVDAVAEPANAVKGAGKEMKEKTQRMKQPPATTPPFKTHCQEAETKTKDEMAAAEEKVGKNEQGEPEDLKKPEGKNRSAAAVKNEKEQKNQEADVQEVKASTLSPGGGVTVFFHAIISLHFPFNPDLHKVFIRGGEEFGESKWDSNICELHYTRDLGHDRVLVEGIVCISKKHLDKYIPYKYVIYNGESFEYEFIYKHQQKKGEYVNRCLFIKSSLLGSGDWHQYYDIVYMKPHGRLQKVMNHITDGPRKDLVKGKQIAAALMLDSTFSILQTWDTINLNSFFTQFEQFCFVLQQPMIYEGQAQLWTDLQYREKEVKRYLWQHLKKHVVPLPDGKSTDFLPVDCPVRSKLKTGLIVLFVVEKIELLLEGSLDWLCHLLTSDASSPDEFHRDLSHILGIPQSWRLYLVNLCQRCMDTRTYTWLGALPVLHCCMELAPRHKDAWRQPEDTWAALEGLSFSPFREQMLDTSSLLQFMREKQHLLSIDEPLFRSWFSLLPLSHLVMYMENFIEHLGRFPAHILDCLSGIYYRLPGLEQVLNTQDVQDVQNVQNILEMLLRLLDTYRDKIPEEALSPSYLTVCLKLHEAICSSTKLLKFYELPALSAEIVCRMIRLLSLVDSAGQRDETGNNSVQTVFQGTLAATKRWLREVFTKNMLTSSGASFTYVKEIEVWRRLVEIQFPAEHGWKESLLGDMEWRLTKEEPLSQITAYCNSCWDTKGLEDSVAKTFEKCIIEAVSSACQSQTSILQGFSYSDLRKFGIVLSAVITKSWPRTADNFNDILKHLLTLADVKHVFRLCGTDEKILANVTEDAKRLIAVADSVLTKVVGDLLSGTILVGQLELIIKHKNQFLDIWQLREKSLSPQDEQCAVEEALDWRREELLLLKKEKRCVDSLLKMCGNVKHLIQVDFGVLAVRHSQDLSSKRLNDTVTVRLSTSSNSQRATHYHLSSQVQEMAGKIDLLRDSHIFQLFWREAAEPLSEPKEDQEAAELLSEPEEESERHILELEEVYDYLYQPSYRKFIKLHQDLKSGEVTLAEIDVIFKDFVNKYTDLDSELKIMCTVDHQDQRDWIKDRVEQIKEYHHLHQAVHAAKVILQVKESLGLNGDFSVLNTLLNFTDNFDDFRRETLDQINQELIQAKKLLQDISEARCKGLQALSLRKEFICWVREALGGINELKVFVDLASISAGENDIDVDRVACFHDAVQGYASLLFKLDPSVDFSAFMKHLKKLWKALDKDQYLPRKLCDSARNLEWLKTVNESHGSVERSSLTLATAINQRGIYVIQAPKGGQKISPDTVLHLILPESPGSHEESREYSLEEVKELLNKLMLMSGKKDRNNTEVERFSEVFCSVQRLSQAFIDLHSAGNMLFRTWIAMAYCSPKQGVSLQMDFGLDLVTELKEGGDVTELLAALCRQMEHFLDSWKRFVTQKRMEHFYLNFYTAEQLVYLSTELRKQPPSDAALTMLSFIKSNCTLRDVLRASVGCGSEAARYRMRRVMEELPLMLLSEFSLVDKLRIIMEQSMRCLPAFLPDCLDLETLGHCLAHLAGMGGSPVERCLPRGLQVGQPNLVVCGHSEVLPAALAVYMQTPSQPLPTYDEVLLCTPATTFEEVALLLRRCLTLGSLGHKVYSLLFADQLSYEVARQAEELFHNLCTQQHREDYQLVMVCDGDWEHCYLPSAFSQHKVFVTPQAPLEAIQAYLAGHYRVPKQTLSAAAVFNDRLCVGIVASERAGVGKSLYVKRLHDKMKMQLNVKNVPLKTIRLIDPQVDESRVLGALLPFLDAQYQKVPVLFHLDVTSSVQTGIWVFLFKLLILQYLMDINGKMWLRNPCHLYIVEILERRTSVPSRSSSALRTRVPQFSFLDIFPKVTCRPPKEVIDMELSALRSDTEPGMDLWEFCSETFQRPYQYLRRFNQNQDLDTFQYQEGSVEGTPEECLQHFLFHCGVINPSWSELRNFARFLNYQLRDCEASLFCNPSFIGDTLRGFKKFVVTFMIFMARDFATPSLHTSDQSPGKHMVTMDGVREEDLAPFSLRKRWESEPHPYVFFNDDHTTMTFIGFHLQPNINGSVDAISHLTGKVIKRDVMTRDLYQGLLLQRVPFNVDFDKLPRHKKLERLCLTLGIPQATDPDKTYELTTDNMLKILAIEMRFRCGIPVIIMGETGCGKTRLIKFLSDLRRGGTNADTIKLVKVHGGTTADMIYSRVREAENVAFANKDQHQLDTILFFDEANTTEAISCIKEVLCDHMVDGQPLAEDSGLHIIAACNPYRKHSEEMICRLESAGLGYRVSMEETADRLGSIPLRQLVYRVHALPPSLIPLVWDFGQLSDVAEKLYIQQIVQRLVESISLDENGTRVITEVLCASQGFMRKTEDECSFVSLRDVERCVKVFRWFHEHSAMLLAQLNAFLSKSSVSKNHTERDPVLWSLMLAIGVCYHASLEKKDSYRKAIARFFPKPYDDSRLLLDEITRAQDLFLDGVPLRKTIAKNLALKENVFMMVVCIELKIPLFLVGKPGSSKSLAKTIVADAMQGPAAYSDLFRSLKQVHLVSFQCSPHSTPQGIISTFRQCARFQQGKDLQQYVSVVVLDEVGLAEDSPKMPLKTLHPLLEDGCIEDDPAPHKKVGFVGISNWALDPAKMNRGIFVSRGSPNETELIESAKGICSSDILVQDRVQGYFASFAKAYETVCKRQDKEFFGLRDYYSLIKMVFAAAKASNRKPSPQDIAQAVLRNFSGKDDIQALDIFLANLPEAKCSEEVSPMQLIKQNIFGPSQKVPGGEQEDAESRYLLVLTKNYVALQILQQTFFEGDQQPEIIFGSGFPKDQEYTQLCRNINRVKICMETGKMVLLLNLQNLYESLYDALNQYYVHLGGQKYVDLGLGTHRVKCRVHPNFRLIVIEEKDVVYKHFPIPLINRLEKHYLDINTVLEKWQKSIVEELCAWVEKFINVKAHHFQKRHKYSPSDVFIGYHSDACASVVLQVIERQGPRALTEELHQKVSEEAKSILLNCATPDAVVRLSAYSLGGFAAEWLSQEYFHRQRHNSFADFLQAHLHTADLERHAIFTEITTFSRLLTSHDCEILESEVTGRAPKPTLLWLQQFDTEYSFLKEVRNCLTNTAKCKILIFQTDFEDGIRSAQLIASAKYSVINEINKIRENEDRIFVYFITKLSRVGRGTAYVGFHGGLWQSVHIDDLRRSTLMVSDVTRLQHVTISQLFAPGDLPELGLEHRAEDGHEEAMETEASTSGEVAEVAEEAMETESSEKVGKETSELGGSDVSILDTTRLLRSCVQSAVGMLRDQNESCTRNMRRVVLLLGLLNEDDACHASFLRVSKMRLSVFLKKQEESQFHPLEWLAREACNQDALQEAGTFRHTLWKRVQGAVTPLLASMISFIDRDGNLELLTRPDTPPWARDLWMFIFSDTMLLNIPLVMNNERHKGEMAYIVVQNHMNLSENASNNVPFSWKIKDYLEELWVQAQYITDAEGLPKKFVDIFQQTPLGRFLAQLHGEPQQELLQCYLKDFILLTMRVSTEEELKFLQMALWSCTRKLKAASEAPEEEVSLPWVHLAYQRFRSRLQNFSRILTIYPQVLHSLMEARWNHELAGCEMTLDAFAAMACTEMLTRNTLKPSPQAWLQLVKNLSMPLELICSDEHMQGSGSLAQAVIREVRAQWSRIFSTALFVEHVLLGTESRVPELQGLVTEHVFLLDKCLRENSDVKTHGPFEAVMRTLCECKETASKTLSRFGIQPCSICLGDAKDPVCLPCDHVHCLRCLRAWFASEQMICPYCLTALPDEFSPAVSQAHREAIEKHARFRQMCNSFFVDLVSTICFKDNAPPEKEVIESLLSLLFVQKGRLRDAAQRHCEHTKSLSPFNDVVDKTPVIRSVILKLLLKYSFHDVKDYIQEYLTLLKKKAFITEDKTELYMLFINCLEDSILEKTSAYSRNDELNHLEEEGRFLKAYSPASRGREPANEASVEYLQEVARIRLCLDRAADFLSEPEGGPEMAKEKQCYLQQVKQFCIRVENDWHRVYLVRKLSSQRGMEFVQGLSKPGRPHQWVFPKDVVKQQGLRQDHPGQMDRYLVYGDEYKALRDAVAKAVLECKPLGIKTALKACKTPQSQQSAYFLLTLFREVAILYRSHNASLHPTPEQCEAVSKFIGECKILSPPDISRFATSLVDNSVPLLRAGPSDSNLDGTVTEMAIHAAAVLLCGQNELLEPLKNLAFSPATMAHAFLPTMPEDLLAQARRWKGLERVHWYTCPNGHPCSVGECGRPMEQSICIDCHAPIGGIDHKPRDGFHLVKDKADRTQTGHVLGNPQRRDVVTCDRGLPPVVFLLIRLLTHLALLLGASQSSQALINIIKPPVRDPKGFLQQHILKDLEQLAKMLGHSADETIGVVHLVLRRLLQEQHQLSSRRLLNFDTELSTKEMRNNWEKEIAAVISPELEHLDKTLPTMNNLISQDKRISSNPVAKIIYGDPVTFLPHLPRKSVVHCSKIWSCRKRITVEYLQHIVEQKNGKERVPILWHFLQKEAELRLVKFLPEILALQRDLVKQFQNVQQVEYSSIRGFLSKHSSDGLRQLLHNRITVFLSTWNKLRRSLETNGEINLPKDYCSTDLDLDTEFEILLPRRRGLGLCATALVSYLIRLHNEIVYAVEKLSKENNSYSVDAAEVTELHVISYEVERDLTPLILSNCQYQVEEGRETVQEFDLEKIQRQIVSRFLQGKPRLSLKGIPTLVYRHDWNYEHLFMDIKNKMAQDSLPSSVISAISGQLQSYSDACEVLSVVEVTLGFLSTAGGDPNMQLNVYTQDILQMGDQTIHVLKALNRCQLKHTIALWQFLSAHKSEQLLRLHKEPFGEISSRYKADLSPENAKLLSTFLNQTGLDAFLLELHEMIILKLKNPQTQTEERFRPQWSLRDTLVSYMQTKESEILPEMASQFPEEILLASCVSVWKTAAVLKWNREMR

SEQ ID NO: 1745 - protein, 5256 aa, Homo sapiens
MECPSCQHVSKEETPKFCSQCGERLPPAAPIADSENNNSTMASASEGEMECGQELKEEGGPCLFPGSDSWQENPEEPCSKASWTVQEGATSEVLVDAAVDLISDEWEAANAIPSKRRKQDAAPLEAASVPSADCEQSKKKKRKKKKKGNKSASSELASLPLSPASPCHLTLLSNPWPQDTALPHSQAQQSGPTGQPSQPPGTATTPLEGDGLSAPTEVGDSPLQAQALGEAGVATGSEAQSSPQFQDHTEGEDQDASIPSGGRGLSQEGTGPPTSAGEGHSRTEDAAQELLLPESKGGSSEPGTELQTTEQQAGASASMAVDAVAEPANAVKGAGKEMKEKTQRMKQPPATTPPFKTHCQEAETKTKDEMAAAEEKVGKNEQGEPEDLKKPEGKNRSAAAVKNEKEQKNQEADVQEVKASTLSPGGGVTVFFHAIISLHFPFNPDLHKVFIRGGEEFGESKWDSNICELHYTRDLGHDRVLVEGIVCISKKHLDKYIPYKYVIYNGESFEYEFIYKHQQKKGEYVNRCLFIKSSLLGSGDWHQYYDIVYMKPHGRLQKVMNHITDGPRKDLVKGKQIAAALMLDSTFSILQTWDTINLNSFFTQFEQFCFVLQQPMIYEGQAQLWTDLQYREKEVKRYLWQHLKKHVVPLPDGKSTDFLPVDCPVRSKLKTGLIVLFVVEKIELLLEGSLDWLCHLLTSDASSPDEFHRDLSHILGIPQSWRLYLVNLCQRCMDTRTYTWLGALPVLHCCMELAPRHKDAWRQPEDTWAALEGLSFSPFREQMLDTSSLLQFMREKQHLLSIDEPLFRSWFSLLPLSHLVMYMENFIEHLGRFPAHILDCLSGIYYRLPGLEQVLNTQDVQDVQNVQNILEMLLRLLDTYRDKIPEEALSPSYLTVCLKLHEAICSSTKLLKFYELPALSAEIVCRMIRLLSLVDSAGQRDETGNNSVQTVFQGTLAATKRWLREVFTKNMLTSSGASFTYVKEIEVWRRLVEIQFPAEHGWKESLLGDMEWRLTKEEPLSQITAYCNSCWDTKGLEDSVAKTFEKCIIEAVSSACQSQTSILQGFSYSDLRKFGIVLSAVITKSWPRTADNFNDILKHLLTLADVKHVFRLCGTDEKILANVTEDAKRLIAVADSVLTKVVGDLLSGTILVGQLELIIKHKNQFLDIWQLREKSLSPQDEQCAVEEALDWRREELLLLKKEKRCVDSLLKMCGNVKHLIQVDFGVLAVRHSQDLSSKRLNDTVTVRLSTSSNSQRATHYHLSSQVQEMAGKIDLLRDSHIFQLFWREAAEPLSEPKEDQEAAELLSEPEEESERHILELEEVYDYLYQPSYRKFIKLHQDLKSGEVTLAEIDVIFKDFVNKYTDLDSELKIMCTVDHQDQRDWIKDRVEQIKEYHHLHQAVHAAKVILQVKESLGLNGDFSVLNTLLNFTDNFDDFRRETLDQINQELIQAKKLLQDISEARCKGLQALSLRKEFICWVREALGGINELKVFVDLASISAGENDIDVDRVACFHDAVQGYASLLFKLDPSVDFSAFMKHLKKLWKALDKDQYLPRKLCDSARNLEWLKTVNESHGSVERSSLTLATAINQRGIYVIQAPKGGQKISPDTVLHLILPESPGSHEESREYSLEEVKELLNKLMLMSGKKDRNNTEVERFSEVFCSVQRLSQAFIDLHSAGNMLFRTWIAMAYCSPKQGVSLQMDFGLDLVTELKEGGDVTELLAALCRQMEHFLDSWKRFVTQKRMEHFYLNFYTAEQLVYLSTELRKQPPSDAALTMLSFIKSNCTLRDVLRASVGCGSEAARYRMRRVMEELPLMLLSEFSLVDKLRIIMEQSMRCLPAFLPDCLDLETLGHCLAHLAGMGGSPVERCLPRGLQVGQPNLVVCGHSEVLPAALAVYMQTPSQPLPTYDEVLLCTPATTFEEVALLLRRCLTLGSLGHKVYSLLFADQLSYEVARQAEELFHNLCTQQHREDYQLVMVCDGDWEHCYLPSAFSQHKVFVTPQAPLEAIQAYLAGHYRVPKQTLSAAAVFNDRLCVGIVASERAGVGKSLYVKRLHDKMKMQLNVKNVPLKTIRLIDPQVDESRVLGALLPFLDAQYQKVPVLFHLDVTSSVQTGIWVFLFKLLILQYLMDINGKMWLRNPCHLYIVEILERRTSVPSRSSSALRTRVPQFSFLDIFPKVTCRPPKEVIDMELSALRSDTEPGMDLWEFCSETFQRPYQYLRRFNQNQDLDTFQYQEGSVEGTPEECLQHFLFHCGVINPSWSELRNFARFLNYQLRDCEASLFCNPSFIGDTLRGFKKFVVTFMIFMARDFATPSLHTSDQSPGKHMVTMDGVREEDLAPFSLRKRWESEPHPYVFFNDDHTTMTFIGFHLQPNINGSVDAISHLTGKVIKRDVMTRDLYQGLLLQRVPFNVDFDKLPRHKKLERLCLTLGIPQATDPDKTYELTTDNMLKILAIEMRFRCGIPVIIMGETGCGKTRLIKFLSDLRRGGTNADTIKLVKVHGGTTADMIYSRVREAENVAFANKDQHQLDTILFFDEANTTEAISCIKEVLCDHMVDGQPLAEDSGLHIIAACNPYRKHSEEMICRLESAGLGYRVSMEETADRLGSIPLRQLVYRVHALPPSLIPLVWDFGQLSDVAEKLYIQQIVQRLVESISLDENGTRVITEVLCASQGFMRKTEDECSFVSLRDVERCVKVFRWFHEHSAMLLAQLNAFLSKSSVSKNHTERDPVLWSLMLAIGVCYHASLEKKDSYRKAIARFFPKPYDDSRLLLDEITRAQDLFLDGVPLRKTIAKNLALKENVFMMVVCIELKIPLFLVGKPGSSKSLAKTIVADAMQGPAAYSDLFRSLKQVHLVSFQCSPHSTPQGIISTFRQCARFQQGKDLQQYVSVVVLDEVGLAEDSPKMPLKTLHPLLEDGCIEDDPAPHKKVGFVGISNWALDPAKMNRGIFVSRGSPNETELIESAKGICSSDILVQDRVQGYFASFAKAYETVCKRQDKEFFGLRDYYSLIKMVFAAAKASNRKPSPQDIAQAVLRNFSGKDDIQALDIFLANLPEAKCSEEVSPMQLIKQNIFGPSQKVPGGEQEDAESRYLLVLTKNYVALQILQQTFFEGDQQPEIIFGSGFPKDQEYTQLCRNINRVKICMETGKMVLLLNLQNLYESLYDALNQYYVHLGGQKYVDLGLGTHRVKCRVHPNFRLIVIEEKDVVYKHFPIPLINRLEKHYLDINTVLEKWQKSIVEELCAWVEKFINVKAHHFQKRHKYSPSDVFIGYHSDACASVVLQVIERQGPRALTEELHQKVSEEAKSILLNCATPDAVVRLSAYSLGGFAAEWLSQEYFHRQRHNSFADFLQAHLHTADLERHAIFTEITTFSRLLTSHDCEILESEVTGRAPKPTLLWLQQFDTEYSFLKEVRNCLTNTAKCKILIFQTDFEDGIRSAQLIASAKYSVINEINKIRENEDRIFVYFITKLSRVGRGTAYVGFHGGLWQSVHIDDLRRSTLMVSDVTRLQHVTISQLFAPGDLPELGLEHRAEDGHEEAMETEASTSGEVAEVAEEAMETESSEKVGKETSELGGSDVSILDTTRLLRSCVQSAVGMLRDQNESCTRNMRRVVLLLGLLNEDDACHASFLRVSKMRLSVFLKKQEESQFHPLEWLAREACNQDALQEAGTFRHTLWKRVQGAVTPLLASMISFIDRDGNLELLTRPDTPPWARDLWMFIFSDTMLLNIPLVMNNERHKGEMAYIVVQNHMNLSENASNNVPFSWKIKDYLEELWVQAQYITDAEGLPKKFVDIFQQTPLGRFLAQLHGEPQQELLQCYLKDFILLTMRVSTEEELKFLQMALWSCTRKLKAASEAPEEEVSLPWVHLAYQRFRSRLQNFSRILTIYPQVLHSLMEARWNHELAGCEMTLDAFAAMACTEMLTRNTLKPSPQAWLQLVKNLSMPLELICSDEHMQGSGSLAQAVIREVRAQWSRIFSTALFVEHVLLGTESRVPELQGLVTEHVFLLDKCLRENSDVKTHGPFEAVMRTLCECKETASKTLSRFGIQPCSICLGDAKDPVCLPCDHVHCLRCLRAWFASEQMICPYCLTALPDEFSPAVSQAHREAIEKHARFRQMCNSFFVDLVSTICFKDNAPPEKEVIESLLSLLFVQKGRLRDAAQRHCEHTKSLSPFNDVVDKTPVIRSVILKLLLKYSFHDVKDYIQEYLTLLKKKAFITEDKTELYMLFINCLEDSILEKTSAYSRNDELNHLEEEGRFLKAYSPASRGREPANEASVEYLQEVARIRLCLDRAADFLSEPEGGPEMAKEKQCYLQQVKQFCIRVENDWHRVYLVRKLSSQRGMEFVQGLSKPGRPHQWVFPKDVVKQQGLRQDHPGQMDRYLVYGDEYKALRDAVAKAVLECKPLGIKTALKACKTPQSQQSAYFLLTLFREVAILYRSHNASLHPTPEQCEAVSKFIGECKILSPPDISRFATSLVDNSVPLLRAGPSDSNLDGTVTEMAIHAAAVLLCGQNELLEPLKNLAFSPATMAHAFLPTMPEDLLAQARRWKGLERVHWYTCPNGHPCSVGECGRPMEQSICIDCHAPIGGIDHKPRDGFHLVKDKADRTQTGHVLGNPQRRDVVTCDRGLPPVVFLLIRLLTHLALLLGASQSSQALINIIKPPVRDPKGFLQQHILKDLEQLAKMLGHSADETIGVVHLVLRRLLQEQHQLSSRRLLNFDTELSTKEMRNNWEKEIAAVISPELEHLDKTLPTMNNLISQDKRISSNPVAKIIYGDPVTFLPHLPRKSVVHCSKIWSCRKRITVEYLQHIVEQKNGKERVPILWHFLQKEAELRLVKFLPEILALQRDLVKQFQNVQQVEYSSIRGFLSKHSSDGLRQLLHNRITVFLSTWNKLRRSLETNGEINLPKDYCSTDLDLDTEFEILLPRRRGLGLCATALVSYLIRLHNEIVYAVEKLSKENNSYSVDAAEVTELHVISYEVERDLTPLILSNCQYQVEEGRETVQEFDLEKIQRQIVSRFLQGKPRLSLKGIPTLVYRHDWNYEHLFMDIKNKMAQDSLPSSVISAISGQLQSYSDACEVLSVVEVTLGFLSTAGGDPNMQLNVYTQDILQMGDQTIHVLKALNRCQLKHTIALWQFLSAHKSEQLLRLHKEPFGEISSRYKADLSPENAKLLSTFLNQTGLDAFLLELHEMIILKLKNPQTQTEERFRPQWSLRDTLVSYMQTKESEILPEMASQFPEEILLASCVSVWKTAAVLKWNREMR

SEQ ID NO: 1746 - protein, 1063 aa, Homo sapiens
MECPSCQHVSKEETPKFCSQCGERLPPAAPIADSENNNSTMASASEGEMECGQELKEEGGPCLFPGSDSWQENPEEPCSKASWTVQESKKKKRKKKKKGNKSASSELASLPLSPASPCHLTLLSNPWPQDTALPHSQAQQSGPTGQPSQPPGTATTPLEGDGLSAPTEVGDSPLQAQALGEAGVATGSEAQSSPQFQDHTEGEDQDASIPSGGRGLSQEGTGPPTSAGEGHSRTEDAAQELLLPESKGGSSEPGTELQTTEQQAGASASMAVDAVAEPANAVKGAGKEMKEKTQRMKQPPATTPPFKTHCQEAETKTKDEMAAAEEKVGKNEQGEPEDLKKPEGKNRSAAAVKNEKEQKNQEADVQEVKASTLSPGGGVTVFFHAIISLHFPFNPDLHKVFIRGGEEFGESKWDSNICELHYTRDLGHDRVLVEGIVCISKKHLDKYIPYKYVIYNGESFEYEFIYKHQQKKGEYVNRCLFIKSSLLGSGDWHQYYDIVYMKPHGRLQKVMNHITDGPRKDLVKGKQIAAALMLDSTFSILQTWDTINLNSFFTQFEQFCFVLQQPMIYEGQAQLWTDLQYREKEVKRYLWQHLKKHVVPLPDGKSTDFLPVDCPVRSKLKTGLIVLFVVEKIELLLEGSLDWLCHLLTSDASSPDEFHRDLSHILGIPQSWRLYLVNLCQRCMDTRTYTWLGALPVLHCCMELAPRHKDAWRQPEDTWAALEGLSFSPFREQMLDTSSLLQFMREKQHLLSIDEPLFRSWFSLLPLSHLVMYMENFIEHLGRFPAHILDCLSGIYYRLPGLEQVLNTQDVQDVQNVQNILEMLLRLLDTYRDKIPEEALSPSYLTVCLKLHEAICSSTKLLKFYELPALSAEIVCRMIRLLSLVDSAGQRDETGNNSVQTVFQGTLAATKRWLREVFTKNMLTSSGASFTYVKEIEVWRRLVEIQFPAEHGWKESLLGDMEWRLTKEEPLSQITAYCNSCWDTKGLEDSVAKTFEKCIIEAVSSACQVNNLSSWETDSGSQLCSAMTQLRAMKHPLGLSSSANSEIGKWAPSSLAKGNGAEI

SEQ ID NO: 1747 - protein, 557 aa, Homo sapiens
MTRKSAPTSGLLNFDTELSTKEMRNNWEKEIAAVISPELEHLDKTLPTMNNLISQDKRISSNPVAKIIYGDPVTFLPHLPRKSVVHCSKIWSCRKRITVEYLQHIVEQKNGKERVPILWHFLQKEAELRLVKFLPEILALQRDLVKQFQNVQQVEYSSIRGFLSKHSSDGLRQLLHNRITVFLSTWNKLRRSLETNGEINLPKDYCSTDLDLDTEFEILLPRRRGLGLCATALVSYLIRLHNEIVYAVEKLSKENNSYSVDAAEVTELHVISYEVERDLTPLILSNCQYQVEEGRETVQEFDLEKIQRQIVSRFLQGKPRLSLKGIPTLVYRHDWNYEHLFMDIKNKMAQDSLPSSVISAISGQLQSYSDACEVLSVVEVTLGFLSTAGGDPNMQLNVYTQDILQMGDQTIHVLKALNRCQLKHTIALWQFLSAHKSEQLLRLHKEPFGEISSRYKADLSPENAKLLSTFLNQTGLDAFLLELHEMIILKLKNPQTQTEERFRPQWSLRDTLVSYMQTKESEILPEMASQFPEEILLASCVSVWKTAAVLKWNREMR

SEQ ID NO: 1748 - protein, 2347 aa, Homo sapiens
MKNIYCLIPKLVNFATLGCLWISVVQCTVLNSCLKSCVTNLGQQLDLGTPHNLSEPCIQGCHFWNSVDQKNCALKCRESCEVGCSSAEGAYEEEVLENADLPTAPFASSIGSHNMTLRWKSANFSGVKYIIQWKYAQLLGSWTYTKTVSRPSYVVKPLHPFTEYIFRVVWIFTAQLQLYSPPSPSYRTHPHGVPETAPLIRNIESSSPDTVEVSWDPPQFPGGPILGYNLRLISKNQKLDAGTQRTSFQFYSTLPNTIYRFSIAAVNEVGEGPEAESSITTSSSAVQQEEQWLFLSRKTSLRKRSLKHLVDEAHCLRLDAIYHNITGISVDVHQQIVYFSEGTLIWAKKAANMSDVSDLRIFYRGSGLISSISIDWLYQRMYFIMDELVCVCDLENCSNIEEITPPSISAPQKIVADSYNGYVFYLLRDGIYRADLPVPSGRCAEAVRIVESCTLKDFAIKPQAKRIIYFNDTAQVFMSTFLDGSASHLILPRIPFADVKSFACENNDFLVTDGKVIFQQDALSFNEFIVGCDLSHIEEFGFGNLVIFGSSSQLHPLPGRPQELSVLFGSHQALVQWKPPALAIGANVILISDIIELFELGPSAWQNWTYEVKVSTQDPPEVTHIFLNISGTMLNVPELQSAMKYKVSVRASSPKRPGPWSEPSVGTTLVPASEPPFIMAVKEDGLWSKPLNSFGPGEFLSSDIGNVSDMDWYNNSLYYSDTKGDVFVWLLNGTDISENYHLPSIAGAGALAFEWLGHFLYWAGKTYVIQRQSVLTGHTDIVTHVKLLVNDMVVDSVGGYLYWTTLYSVESTRLNGESSLVLQTQPWFSGKKVIALTLDLSDGLLYWLVQDSQCIHLYTAVLRGQSTGDTTITEFAAWSTSEISQNALMYYSGRLFWINGFRIITTQEIGQKTSVSVLEPARFNQFTIIQTSLKPLPGNFSFTPKVIPDSVQESSFRIEGNASSFQILWNGPPAVDWGVVFYSVEFSAHSKFLASEQHSLPVFTVEGLEPYALFNLSVTPYTYWGKGPKTSLSLRAPETVPSAPENPRIFILPSGKCCNKNEVVVEFRWNKPKHENGVLTKFEIFYNISNQSITNKTCEDWIAVNVTPSVMSFQLEGMSPRCFIAFQVRAFTSKGPGPYADVVKSTTSEINPFPHLITLLGNKIVFLDMDQNQVVWTFSAERVISAVCYTADNEMGYYAEGDSLFLLHLHNRSSSELFQDSLVFDITVITIDWISRHLYFALKESQNGMQVFDVDLEHKVKYPREVKIHNRNSTIISFSVYPLLSRLYWTEVSNFGYQMFYYSIISHTLHRILQPTATNQQNKRNQCSCNVTEFELSGAMAIDTSNLEKPLIYFAKAQEIWAMDLEGCQCWRVITVPAMLAGKTLVSLTVDGDLIYWIITAKDSTQIYQAKKGNGAIVSQVKALRSRHILAYSSVMQPFPDKAFLSLASDTVEPTILNATNTSLTIRLPLAKTNLTWYGITSPTPTYLVYYAEVNDRKNSSDLKYRILEFQDSIALIEDLQPFSTYMIQIAVKNYYSDPLEHLPPGKEIWGKTKNGVPEAVQLINTTVRSDTSLIISWRESHKPNGPKESVRYQLAISHLALIPETPLRQSEFPNGRLTLLVTRLSGGNIYVLKVLACHSEEMWCTESHPVTVEMFNTPEKPYSLVPENTSLQFNWKAPLNVNLIRFWVELQKWKYNEFYHVKTSCSQGPAYVCNITNLQPYTSYNVRVVVVYKTGENSTSLPESFKTKAGVPNKPGIPKLLEGSKNSIQWEKAEDNGCRITYYILEIRKSTSNNLQNQNLRWKMTFNGSCSSVCTWKSKNLKGIFQFRVVAANNLGFGEYSGISENIILVGDDFWIPETSFILTIIVGIFLVVTIPLTFVWHRRLKNQKSAKEGVTVLINEDKELAELRGLAAGVGLANACYAIHTLPTQEEIENLPAFPREKLTLRLLLGSGAFGEVYEGTAVDILGVGSGEIKVAVKTLKKGSTDQEKIEFLKEAHLMSKFNHPNILKQLGVCLLNEPQYIILELMEGGDLLTYLRKARMATFYGPLLTLVDLVDLCVDISKGCVYLERMHFIHRDLAARNCLVSVKDYTSPRIVKIGDFGLARDIYKNDYYRKRGEGLLPVRWMAPESLMDGIFTTQSDVWSFGILIWEILTLGHQPYPAHSNLDVLNYVQTGGRLEPPRNCPDDLWNLMTQCWAQEPDQRPTFHRIQDQLQLFRNFFLNSIYKSRDEANNSGVINESFEGEDGDVICLNSDDIMPVALMETKNREGLNYMVLATECGQGEEKSEGPLGSQESESCGLRKEEKEPHADKDFCQEKQVAYCPSGKPEGLNYACLTHSGYGDGSD

SEQ ID NO: 1749 - protein, 314 aa, Homo sapiens
MSENAAPGLISELKLAVPWGHIAAKAWGSLQGPPVLCLHGWLDNASSFDRLIPLLPQDFYYVAMDFGGHGLSSHYSPGVPYYLQTFVSEIRRVVAALKWNRFSILGHSFGGVVGGMFFCTFPEMVDKLILLDTPLFLLESDEMENLLTYKRRAIEHVLQVEASQEPSHVFSLKQLLQRLLKSNSHLSEECGELLLQRGTTKVATGLVLNRDQRLAWAENSIDFISRELCAHSIRKLQAHVLLIKAVHGYFDSRQNYSEKESLSFMIDTMKSTLKEQFQFVEVPGNHCVHMSEPQHVASIISSFLQCTHMLPAQL

SEQ ID NO: 1750 - protein, 250 aa, Homo sapiens
MSENAAPDFYYVAMDFGGHGLSSHYSPGVPYYLQTFVSEIRRVVAGGVVGGMFFCTFPEMVDKLILLDTPLFLLESDEMENLLTYKRRAIEHVLQVEASQEPSHVFSLKQLLQRLLKSNSHLSEECGELLLQRGTTKVATGLVLNRDQRLAWAENSIDFISRELCAHSIRKLQAHVLLIKAVHGYFDSRQNYSEKESLSFMIDTMKSTLKEQFQFVEVPGNHCVHMSEPQHVASIISSFLQCTHMLPAQL

SEQ ID NO: 1751 - protein, 134 aa, Homo sapiens
MSENAAPGLISELLLQRGTTKVATGLVLNRDQRLAWAENSIDFISRELCAHSIRKLQAHVLLIKAVHGYFDSRQNYSEKESLSFMIDTMKSTLKEQFQFVEVPGNHCVHMSEPQHVASIISSFLQCTHMLPAQL

SEQ ID NO: 1752 - protein, 1132 aa, Homo sapiens
MQRRGAGLGWPRQQQQQPPPLAVGPRAAAMVPSGGVPQGLGGRSACALLLLCYLNVVPSLGRQTSLTTSVIPKAEQSVAYKDFIYFTVFEGNVRNVSEVSVEYLCSQPCVVNLEAVVSSEFRSSIPVYKKRWKNEKHLHTSRTQIVHVKFPSIMVYRDDYFIRHSISVSAVIVRAWITHKYSGRDWNVKWEENLLHAVAKNYTLLQTIPPFERPFKDHQVCLEWNMGYIWNLRANRIPQCPLENDVVALLGFPYASSGENTGIVKKFPRFRNRELEATRRQRMDYPVFTVSLWLYLLHYCKANLCGILYFVDSNEMYGTPSVFLTEEGYLHIQMHLVKGEDLAVKTKFIIPLKEWFRLDISFNGGQIVVTTSIGQDLKSYHNQTISFREDFHYNDTAGYFIIGGSRYVAGIEGFFGPLKYYRLRSLHPAQIFNPLLEKQLAEQIKLYYERCAEVQEIVSVYASAAKHGGERQEACHLHNSYLDLQRRYGRPSMCRAFPWEKELKDKHPSLFQALLEMDLLTVPRNQNESVSEIGGKIFEKAVKRLSSIDGLHQISSIVPFLTDSSCCGYHKASYYLAVFYETGLNVPRDQLQGMLYSLVGGQGSERLSSMNLGYKHYQGIDNYPLDWELSYAYYSNIATKTPLDQHTLQGDQAYVETIRLKDDEILKVQTKEDGDVFMWLKHEATRGNAAAQQRLAQMLFWGQQGVAKNPEAAIEWYAKGALETEDPALIYDYAIVLFKGQGVKKNRRLALELMKKAASKGLHQAVNGLGWYYHKFKKNYAKAAKYWLKAEEMGNPDASYNLGVLHLDGIFPGVPGRNQTLAGEYFHKAAQGGHMEGTLWCSLYYITGNLETFPRDPEKAVVWAKHVAEKNGYLGHVIRKGLNAYLEGSWHEALLYYVLAAETGIEVSQTNLAHICEERPDLARRYLGVNCVWRYYNFSVFQIDAPSFAYLKMGDLYYYGHQNQSQDLELSVQMYAQAALDGDSQGFFNLALLIEEGTIIPHHILDFLEIDSTLHSNNISILQELYERCWSHSNEESFSPCSLAWLYLHLRLLWGAILHSALIYFLGTFLLSILIAWTVQYFQSVSASDPPPRPSQASPDTATSTASPAVTPAADASDQDQPTVTNNPEPRG

SEQ ID NO: 1753 - protein, 1097 aa, Homo sapiens
MAPRPKKQPDKNPLHGRELNVVPSLGRQTSLTTSVIPKAEQSVAYKDFIYFTVFEGNVRNVSEVSVEYLCSQPCVVNLEAVVSSEFRSSIPVYKKRWKNEKHLHTSRTQIVHVKFPSIMVYRDDYFIRHSISVSAVIVRAWITHKYSGRDWNVKWEENLLHAVAKNYTLLQTIPPFERPFKDHQVCLEWNMGYIWNLRANRIPQCPLENDVVALLGFPYASSGENTGIVKKFPRFRNRELEATRRQRMDYPVFTVSLWLYLLHYCKANLCGILYFVDSNEMYGTPSVFLTEEGYLHIQMHLVKGEDLAVKTKFIIPLKEWFRLDISFNGGQIVVTTSIGQDLKSYHNQTISFREDFHYNDTAGYFIIGGSRYVAGIEGFFGPLKYYRLRSLHPAQIFNPLLEKQLAEQIKLYYERCAEVQEIVSVYASAAKHGGERQEACHLHNSYLDLQRRYGRPSMCRAFPWEKELKDKHPSLFQALLEMDLLTVPRNQNESVSEIGGKIFEKAVKRLSSIDGLHQISSIVPFLTDSSCCGYHKASYYLAVFYETGLNVPRDQLQGMLYSLVGGQGSERLSSMNLGYKHYQGIDNYPLDWELSYAYYSNIATKTPLDQHTLQGDQAYVETIRLKDDEILKVQTKEDGDVFMWLKHEATRGNAAAQQRLAQMLFWGQQGVAKNPEAAIEWYAKGALETEDPALIYDYAIVLFKGQGVKKNRRLALELMKKAASKGLHQAVNGLGWYYHKFKKNYAKAAKYWLKAEEMGNPDASYNLGVLHLDGIFPGVPGRNQTLAGEYFHKAAQGGHMEGTLWCSLYYITGNLETFPRDPEKAVVWAKHVAEKNGYLGHVIRKGLNAYLEGSWHEALLYYVLAAETGIEVSQTNLAHICEERPDLARRYLGVNCVWRYYNFSVFQIDAPSFAYLKMGDLYYYGHQNQSQDLELSVQMYAQAALDGDSQGFFNLALLIEEGTIIPHHILDFLEIDSTLHSNNISILQELYERCWSHSNEESFSPCSLAWLYLHLRLLWGAILHSALIYFLGTFLLSILIAWTVQYFQSVSASDPPPRPSQASPDTATSTASPAVTPAADASDQDQPTVTNNPEPRG

SEQ ID NO: 1754 - protein, 979 aa, Homo sapiens
MVYRDDYFIRHSISVSAVIVRAWITHKYSGRDWNVKWEENLLHAVAKNYTLLQTIPPFERPFKDHQVCLEWNMGYIWNLRANRIPQCPLENDVVALLGFPYASSGENTGIVKKFPRFRNRELEATRRQRMDYPVFTVSLWLYLLHYCKANLCGILYFVDSNEMYGTPSVFLTEEGYLHIQMHLVKGEDLAVKTKFIIPLKEWFRLDISFNGGQIVVTTSIGQDLKSYHNQTISFREDFHYNDTAGYFIIGGSRYVAGIEGFFGPLKYYRLRSLHPAQIFNPLLEKQLAEQIKLYYERCAEVQEIVSVYASAAKHGGERQEACHLHNSYLDLQRRYGRPSMCRAFPWEKELKDKHPSLFQALLEMDLLTVPRNQNESVSEIGGKIFEKAVKRLSSIDGLHQISSIVPFLTDSSCCGYHKASYYLAVFYETGLNVPRDQLQGMLYSLVGGQGSERLSSMNLGYKHYQGIDNYPLDWELSYAYYSNIATKTPLDQHTLQGDQAYVETIRLKDDEILKVQTKEDGDVFMWLKHEATRGNAAAQQRLAQMLFWGQQGVAKNPEAAIEWYAKGALETEDPALIYDYAIVLFKGQGVKKNRRLALELMKKAASKGLHQAVNGLGWYYHKFKKNYAKAAKYWLKAEEMGNPDASYNLGVLHLDGIFPGVPGRNQTLAGEYFHKAAQGGHMEGTLWCSLYYITGNLETFPRDPEKAVVWAKHVAEKNGYLGHVIRKGLNAYLEGSWHEALLYYVLAAETGIEVSQTNLAHICEERPDLARRYLGVNCVWRYYNFSVFQIDAPSFAYLKMGDLYYYGHQNQSQDLELSVQMYAQAALDGDSQGFFNLALLIEEGTIIPHHILDFLEIDSTLHSNNISILQELYERCWSHSNEESFSPCSLAWLYLHLRLLWGAILHSALIYFLGTFLLSILIAWTVQYFQSVSASDPPPRPSQASPDTATSTASPAVTPAADASDQDQPTVTNNPEPRG

SEQ ID NO: 1755 - protein, 313 aa, Homo sapiens
MPNTAMKKKVLLMGKSGSGKTSMRSIIFANYIARDTRRLGATIDVEHSHVRFLGNLVLNLWDCGGQDTFMENYFTSQRDNIFRNVEVLIYVFDVESRELEKDMHYYQSCLEAILQNSPDAKIFCLVHKMDLVQEDQRDLIFKEREEDLRRLSRPLECACFRTSIWDETLYKAWSSIVYQLIPNVQQLEMNLRNFAQIIEADEVLLFERATFLVISHYQCKEQRDVHRFEKISNIIKQFKLSCSKLAASFQSMEVRNSNFAAFIDIFTSNTYVMVVMSDPSIPSAATLINIRNARKHFEKLERVDGPKHSLLMR

SEQ ID NO: 1756 - protein, 335 aa, Homo sapiens
MAVDITLLFRASVKTVKTRNKALGVAVGGGVDGSRDELFRRSPRPKGDFSSRAREVISHIGKLRDFLLEHRKDYINAYSHTMSEYGRMTDTERDQIDQDAQIFMRTCSEAIQQLRTEAHKEIHSQQVKEHRTAVLDFIEDYLKRVCKLYSEQRAIRVKRVVDKKRLSKLEPEPNTKTRESTSSEKVSQSPSKDSEENPATEERPEKILAETQPELGTWGDGKGEDELSPEEIQMFEQENQRLIGEMNSLFDEVRQIEGRVVEISRLQEIFTEKVLQQEAEIDSIHQLVVGATENIKEGNEDIREAIKNNAGFRVWILFFLVMCSFSLLFLDWYDS

SEQ ID NO: 1757 - protein, 132 aa, Homo sapiens [sequence omitted]

SEQ ID NO: 1758 - protein, 1423 aa, Homo sapiens
MALVTVQRSPTPSTTSSPCASEADSGEEECRSQPRSISESFLTVKGAALFLPRGNGSSTPRISHRRNKHAGDLQQHLQAMFILLRPEDNIRLAVRLESTYQNRTRYMVVVSTNGRQDTEESIVLGMDFSSNDSSTCTMGLVLPLWSDTLIHLDGDGGFSVSTDNRVHIFKPVSVQAMWSALQSLHKACEVARAHNYYPGSLFLTWVSYYESHINSDQSSVNEWNAMQDVQSHRPDSPALFTDIPTERERTERLIKTKLREIMMQKDLENITSKEIRTELEMQMVCNLREFKEFIDNEMIVILGQMDSPTQIFEHVFLGSEWNASNLEDLQNRGVRYILNVTREIDNFFPGVFEYHNIRVYDEEATDLLAYWNDTYKFISKAKKHGSKCLVHCKMGVSRSASTVIAYAMKEYGWNLDRAYDYVKERRTVTKPNPSFMRQLEEYQGILLASKQRHNKLWRSHSDSDLSDHHEPICKPGLELNKKDITTSADQIAEVKTMESHPPIPPVFVEHMVPQDANQKGLCTKERMICLEFTSREFHAGQIEDELNLNDINGCSSGCCLNESKFPLDNCHASKALIQPGHVPEMANKFPDLTVEDLETDALKADMNVHLLPMEELTSPLKDPPMSPDPESPSPQPSCQTEISDFSTDRIDFFSALEKFVELSQETRSRSFSHSRMEELGGGRNESCRLSVVEVAPSKVTADDQRSSSLSNTPHASEESSMDEEQSKAISELVSPDIFMQSHSENAISVKEIVTEIESISQGVGQIQLKGDILPNPCHTPKKNSIHELLLERAQTPENKPGHMEQDEDSCTAQPELAKDSGMCNPEGCLTTHSSIADLEEGEPAEGEQELQGSGMHPGAKWYPGSVRRATLEFEERLRQEQEHHGAAPTCTSLSTRKNSKNDSSVADLAPKGKSDEAPPEHSFVLKEPEMSKGKGKYSGSEAGSLSHSEQNATVPAPRVLEFDHLPDPQEGPGSDTGTQQEGVLKDLRTVIPYQESETQAVPLPLPKRVEIIEYTHIVTSPNHTGPGSEIATSEKSGEQGLRKVNMEKSVTVLCTLDENLNRTLDPNQVSLHPQVLPLPHSSSPEHNRPTDHPTSILSSPEDRGSSLSTALETAAPFVSHTTHLLSASLDYLHPQTMVHLEGFTEQSSTTDEPSAEQVSWEESQESPLSSGSEVPYKDSQLSSADLSLISKLGDNTGELQEKMDPLPVACRLPHSSSSENIKSLSHSPGVVKERAKEIESRVVFQAGLTKPSQMRRSASLAKLGYLDLCKDCLPEREPASCESPHLKLLQPFLRTDSGMHAMEDQESLENPGAPHNPEPTKSFVEQLTTTECIVQSKPVERPLVQYAKEFGSSQQYLLPRAGLELTSSEGGLPVLQTQGLQCACPAPGLAVAPRQQHGRTHPLRRLKKANDKKRTTNPFYNTM

SEQ ID NO: 1759 - protein, 202 aa, Homo sapiens
MTLSTLARKRKAPLACTCSLGGPDMIPYFSANAVISQNAINQLISESFLTVKGAALFLPRGNGSSTPRISHRRNKHAGDLQQHLQAMFILLRPEDNIRLAVRLESTYQNRTRYMVVVSTNGRQDTEESIVLGMDFSSNDSSTCTMGLVLPLWSDTLIHLDGDGGFSVSTDNRVHIFKPVSVQAMWVDRDSRNKHCYVLLVEE

SEQ ID NO: 1760 - protein, 195 aa, Homo sapiens
MALVTVQRSPTPSTTSSPCASEADSGEEECRSQPRSISESFLTVKGAALFLPRGNGSSTPRISHRRNKHAGDLQQHLQAMFILLRPEDNIRLAVRLESTYQNRTRYMVVVSTNGRQDTEESIVLGMDFSSNDSSTCTMGLVLPLWSDTLIHLDGDGGFSVSTDNRVHIFKPVSVQAMWVDRDSRNKHCYVLLVEE

SEQ ID NO: 1761 - protein, 449 aa, Homo sapiens
MALVTVQRSPTPSTTSSPCASEADSGEEECRSQPRSISESFLTVKGAALFLPRGNGSSTPRISHRRNKHAGDLQQHLQAMFILLRPEDNIRLAVRLESTYQNRTRYMVVVSTNGRQDTEESIVLGMDFSSNDSSTCTMGLVLPLWSDTLIHLDGDGGFSVSTDNRVHIFKPVSVQAMWSALQSLHKACEVARAHNYYPGSLFLTWVSYYESHINSDQSSVNEWNAMQDVQSHRPDSPALFTDIPTERERTERLIKTKLREIMMQKDLENITSKEIRTELEMQMVCNLREFKEFIDNEMIVILGQMDSPTQIFEHVFLGSEWNASNLEDLQNRGVRYILNVTREIDNFFPGVFEYHNIRVYDEEATDLLAYWNDTYKFISKAKKHGSKCLVHCKMGVSRSASTVIAYAMKEYGWNLDRAYDYVKERRTVTKPNPSFMRQLEEYQGILLAR

SEQ ID NO: 1762 - protein, 84 aa, Homo sapiens
MPLARDLLHPSLEEEKKKHKKKRLVQSPNSYFMDVKCPGCYKITTVFSHAQTVVLCVGCSTVLCQPTGGKARLTEGCSFRRKQH

SEQ ID NO: 1763 - protein, 494 aa, Homo sapiens
MAMSLPGSRRTSAGSRRRTSPPVSVRDAYGTSSLSSSSNSGSYKGSDSSPTPRRSMKYTLCSDNHGIKPPTPEQYLTPLQQKEVCIRHLKARLKDTQDRLQDRDTEIDDLKTQLSRMQEDWIEEECHRVEAQLALKEARKEIKQLKQVIDTVKNNLIDKDKGLQKYFVDINIQNKKLETLLHSMEVAQNGMAKEDGTGESAGGSPARSLTRSSTYTKLSDPAVCGDRQPGDPSSGSAEDGADSGFAAADDTLSRTDALEASSLLSSGVDCGTEETSLHSSFGLGPRFPASNTYEKLLCGMEAGVQASCMQERAIQTDFVQYQPDLDTILEKVTQAQVCGTDPESGDRCPELDAHPSGPRDPNSAVVVTVGDELEAPEPITRGPTPQRPGANPNPGQSVSVVCPMEEEEEAAVAEKEPKSYWSRHYIVDLLAVVVPAVPTVAWLCRSQRRQGQPIYNISSLLRGCCTVALHSIRRISCRSLSQPSPSPAGGGSQL

SEQ ID NO: 1764 - protein, 538 aa, Homo sapiens
MPGSGPSERMTWPGPALSAGPPTRPLSSAPGIPPIPPLTRTHSLMAMSLPGSRRTSAGSRRRTSPPVSVRDAYGTSSLSSSSNSGSYKGSDSSPTPRRSMKYTLCSDNHGIKPPTPEQYLTPLQQKEVCIRHLKARLKDTQDRLQDRDTEIDDLKTQLSRMQEDWIEEECHRVEAQLALKEARKEIKQLKQVIDTVKNNLIDKDKGLQKYFVDINIQNKKLETLLHSMEVAQNGMAKEDGTGESAGGSPARSLTRSSTYTKLSDPAVCGDRQPGDPSSGSAEDGADSGFAAADDTLSRTDALEASSLLSSGVDCGTEETSLHSSFGLGPRFPASNTYEKLLCGMEAGVQASCMQERAIQTDFVQYQPDLDTILEKVTQAQVCGTDPESGDRCPELDAHPSGPRDPNSAVVVTVGDELEAPEPITRGPTPQRPGANPNPGQSVSVVCPMEEEEEAAVAEKEPKSYWSRHYIVDLLAVVVPAVPTVAWLCRSQRRQGQPIYNISSLLRGCCTVALHSIRRISCRSLSQPSPSPAGGGSQL

SEQ ID NO: 1765 - protein, 724 aa, Homo sapiens
MKSAKGIENLAFVPSSPDILRRLSASPSQIEVSALSSDPQRENSQPQELQKPQEPQKSPEPSLPSAPPNVSEEKLRSLSLSEFEEGSYGWRNFHPQCLQRCNTPGGFLLHYCLLAVTQGIVVNGLVNISISTVEKRYEMKSSLTGLISSSYDISFCLLSLFVSFFGERGHKPRWLAFAAFMIGLGALVFSLPQFFSGEYKLGSLFEDTCVTTRNSTSCTSSTSSLSNYLYVFILGQLLLGAGGTPLYTLGTAFLDDSVPTHKSSLYIGTGYAMSILGPAIGYVLGGQLLTIYIDVAMGESTDVTEDDPRWLGAWWIGFLLSWIFAWSLIIPFSCFPKHLPGTAEIQAGKTSQAHQSNSNADVKFGKSIKDFPAALKNLMKNAVFMCLVLSTSSEALITTGFATFLPKFIENQFGLTSSFAATLGGAVLIPGAALGQILGGFLVSKFRMTCKNTMKFALFTSGVALTLSFVFMYAKCENEPFAGVSESYNGTGELGNLIAPCNANCNCSRSYYYPVCGDGVQYFSPCFAGCSNPVAHRKPKVYYNCSCIERKTEITSTAETFGFEAKAGKCETHCAKLPIFLCIFFIVIIFTFMAGTPITVSILRCVNHRQRSLALGIQFMVLRLLGTIPGPIIFGFTIDSTCILWDINDCGIKGACWIYDNIKMAHMLVAISVTCKVITMFFNGFAIFLYKPPPSATDVSFHKENAVVTNVLAEQDLNKIVKEG

SEQ ID NO: 1766 - protein, 729 aa, Homo sapiens
MDDLTLLDLLECPVCFEKLDVTAKVLPCQHTFCKPCLQRVFKAHKELRCPECRTPVFSNIEALPANLLLVRLLDGVRSGQSSGRGGSFRRPGTMTLQDGRKSRTNPRRLQASPFRLVPNVRIHMDGVPRAKALCNYRGQNPGDLRFNKGDIILLRRQLDENWYQGEINGISGNFPASSVEVIKQLPQPPPLCRALYNFDLRGKDKSENQDCLTFLKDDIITVISRVDENWAEGKLGDKVGIFPILFVEPNLTARHLLEKNKGRQSSRTKNLSLVSSSSRGNTSTLRRGPGSRRKVPGQFSITTALNTLNRMVHSPSGRHMVEISTPVLISSSNPSVITQPMEKADVPSSCVGQVSTYHPAPVSPGHSTAVVSLPGSQQHLSANMFVALHSYSAHGPDELDLQKGEGVRVLGKCQDGWLRGVSLVTGRVGIFPNNYVIPIFRKTSSFPDSRSPGLYTTWTLSTSSVSSQGSISEGDPRQSRPFKSVFVPTAIVNPVRSTAGPGTLGQGSLRKGRSSMRKNGSLQRPLQSGIPTLVVGSLRRSPTMVLRPQQFQFYQPQGIPSSPSAVVVEMGSKPALTGEPALTCISRGSEAWIHSAASSLIMEDKEIPIKSEPLPKPPASAPPSILVKPENSRNGIEKQVKTVRFQNYSPPPTKHYTSHPTSGKPEQPATLKASQPEAASLGPEMTVLFAHRSGCHSGQQTDLRRKSALGKATTLVSTASGTQTVFPSK

SEQ ID NO: 1767 - protein, 220 aa, Homo sapiens
MRKSKWWQRDGSLQRPLQSGIPTLVVGSLRRSPTMVLRPQQFQFYQPQGIPSSPSAVVVEMGSKPALTGEPALTCISRGSEAWIHSAASSLIMEDKEIPIKSEPLPKPPASAPPSILVKPENSRNGIEKQVKTVRFQNYSPPPTKHYTSHPTSGKPEQPATLKASQPEAASLGPEMTVLFAHRSGCHSGQQTDLRRKSALGKATTLVSTASGTQTVFPSK

SEQ ID NO: 1768 - protein, 186 aa, Homo sapiens
MVLRPQQFQFYQPQGIPSSPSAVVVEMGSKPALTGEPALTCISRGSEAWIHSAASSLIMEDKEIPIKSEPLPKPPASAPPSILVKPENSRNGIEKQVKTVRFQNYSPPPTKHYTSHPTSGKPEQPATLKASQPEAASLGPEMTVLFAHRSGCHSGQQTDLRRKSALGKATTLVSTASGTQTVFPSK

SEQ ID NO: 1769 - protein, 813 aa, Homo sapiens
MSGSQNNDKRQFLLERLLDAVKQCQIRFGGRKEIASDSDSRVTCLCAQFEAVLQHGLKRSRGLALTAAAIKQAAGFASKTETEPVFWYYVKEVLNKHELQRFYSLRHIASDVGRGRAWLRCALNEHSLERYLHMLLADRCRLSTFYEDWSFVMDEERSSMLPTMAAGLNSILFAINIDNKDLNGQSKFAPTVSDLLKESTQNVTSLLKESTQGVSSLFREITASSAVSILIKPEQETDPLPVVSRNVSADAKCKKERKKKKKVTNIISFDDEEDEQNSGDVFKKTPGAGESSEDNSDRSSVNIMSAFESPFGPNSNGSQSSNSWKIDSLSLNGEFGYQKLDVKSIDDEDVDENEDDVYGNSSGRKHRGHSESPEKPLEGNTCLSQMHSWAPLKVLHNDSDILFPVSGVGSYSPADAPLGSLENGTGPEDHVLPDPGLRYSVEASSPGHGSPLSSLLPSASVPESMTISELRQATVAMMNRKDELEEENRSLRNLLDGEMEHSAALRQEVDTLKRKVAEQEERQGMKVQALARENEVLKVQLKKYVGAVQMLKREGQTAEVPNLWSVDGEVTVAEQKPGEIAEELASSYERKLIEVAEMHGELIEFNERLHRALVAKEALVSQMRQELIDLRGPVPGDLSQTSEDQSLSDFEISNRALINVWIPSVFLRGKAANAFHVYQVYIRIKDDEWNIYRRYTEFRSLHHKLQNKYPQVRAYNFPPKKAIGNKDAKFVEERRKQLQNYLRSVMNKVIQMVPEFAASPKKETLIQLMPFFVDITPPGEPVNSRPKAASRFPKLSRGQPRETRNVEPQSGDL

SEQ ID NO: 1770 - protein, 793 aa, Homo sapiens
MSGSQNNDKRQFLLERLLDAVKQCQIRFGGRKEIASDSDSRVTCLCAQFEAVLQHGLKRSRGLALTAAAIKQAAGFASKTETEPVFWYYVKEVLNKHELQRFYSLRHIASDVGRGRAWLRCALNEHSLERYLHMLLADRCRLSTFYEDWSFVMDEERSSMLPTMAAGLNSILFAINIDNKDLNGQSKFAPTVSDLLKESTQNVTSLLKESTQGVSSLFREITASSAVSILIKPEQETDPLPVVSRNVSADAKCKKERKKKKKVTNIISFDDEEDEQNSGDVFKKTPGAGESSEDNSDRSSVNIMSAFESPFGPNSNGSQSSNSWKIDSLSLNGEFGYQKLDVKSIDDEDVDENEDDVYGNSSGRKHRGHSESPEKPLEGNTCLSQMHSWAPLKVLHNDSDILFPVSGVGSYSPADAPLGSLENGTGPEDHVLPDPGLRYSVEASSPGHGSPLSSLLPSASVPESMTISELRQATVAMMNRKDELEEENRSLRNLLDGEMEHSAALRQEVDTLKRKVAEQEERQGMKVQALARENEVLKVQLKKYVGAVQMLKREGQTAEVPNLWSVDGEVTVAEQKPGEIAEELASSYERKLIEVAEMHGELIEFNERLHRALVAKEALVSQMRQELIDLRGPVPGDLSQTSEDQSLSDFEISNRALINVWIPSVFLRGKAANAFHVYQVYIRIKDDEWNIYRRYTEFRSLHHKLQNKYPQVRAYNFPPKKAIGNKDAKFVEERRKQLQNYLRSVMNKVIQMVPEFAASPKKETLIQLMPFFVDWISLFGNGRDSSREEFSSS

SEQ ID NO: 1771 - protein, 1047 aa, Homo sapiens
MAVTLDKDAYYRRVKRLYSNWRKGEDEYANVDAIVVSVGVDEEIVYAKSTALQTWLFGYELTDTIMVFCDDKIIFMASKKKVEFLKQIANTKGNENANGAPAITLLIREKNESNKSSFDKMIEAIKESKNGKKIGVFSKDKFPGEFMKSWNDCLNKEGFDKIDISAVVAYTIAVKEDGELNLMKKAASITSEVFNKFFKERVMEIVDADEKVRHSKLAESVEKAIEEKKYLAGADPSTVEMCYPPIIQSGGNYNLKFSVVSDKNHMHFGAITCAMGIRFKSYCSNLVRTLMVDPSQEVQENYNFLLQLQEELLKELRHGVKICDVYNAVMDVVKKQKPELLNKITKNLGFGMGIEFREGSLVINSKNQYKLKKGMVFSINLGFSDLTNKEGKKPEEKTYALFIGDTVLVDEDGPATVLTSVKKKVKNVGIFLKNEDEEEEEEEKDEAEDLLGRGSRAALLTERTRNEMTAEEKRRAHQKELAAQLNEEAKRRLTEQKGEQQIQKARKSNVSYKNPSLMPKEPHIREMKIYIDKKYETVIMPVFGIATPFHIATIKNISMSVEGDYTYLRINFYCPGSALGRNEGNIFPNPEATFVKEITYRASNIKAPGEQTVPALNLQNAFRIIKEVQKRYKTREAEEKEKEGIVKQDSLVINLNRSNPKLKDLYIRPNIAQKRMQGSLEAHVNGFRFTSVRGDKVDILYNNIKHALFQPCDGEMIIVLHFHLKNAIMFGKKRHTDVQFYTEVGEITTDLGKHQHMHDRDDLYAEQMEREMRHKLKTAFKNFIEKVEALTKEELEFEVPFRDLGFNGAPYRSTCLLQPTSSALVNATEWPPFVVTLDEVELIHFERVQFHLKNFDMVIVYKDYSKKVTMINAIPVASLDPIKEWLNSCDLKYTEGVQSLNWTKIMKTIVDDPEGFFEQGGWSFLEPEGEGSDAEEGDSESEIEDETFNPSEDDYEEEEEDSDEDYSSEAEESDYSKESLGSEEESGKDWDELEEEARKADRESRYEEEEEQSRSMSRKRKASVHSSGRGSNRGSRHSSAPPKKKRK

SEQ ID NO: 1772 - protein, 332 aa, Homo sapiens
MVFRSPLDLYSSHFLLPNFADSHHRSILLASSGGGNGAGGGGGAGGGSGGGNGAGGGGAGGAGGGGGGGSRAPPEELSMFQLPTLNFSPEQVASVCETLEETGDIERLGRFLWSLPVAPGACEAINKHESILRARAVVAFHTGNFRDLYHILENHKFTKESHGKLQAMWLEAHYQEAEKLRGRPLGPVDKYRVRKKFPLPRTIWDGEQKTHCFKERTRSLLREWYLQDPYPNPSKKRELAQATGLTPTQVGNWFKNRRQRDRAAAAKNRLQHQAIGPSGMRSLAEPGCPTHGSAESPSTAASPTTSVSSLTERADTGTSILSVTSSDSECDV

SEQ ID NO: 1773 - protein, 398 aa, Homo sapiens
MPVPASWPHLPSPFLLMTLLLGRLTGVAGEDELQVIQPEKSVSVAAGESATLRCAMTSLIPVGPIMWFRGAGAGRELIYNQKEGHFPRVTTVSELTKRNNLDFSISISNITPADAGTYYCVKFRKGSPDDVEFKSGAGTELSVRAKPSAPVVSGPAVRATPEHTVSFTCESHGFSPRDITLKWFKNGNELSDFQTNVDPAGDSVSYSIHSTARVVLTRGDVHSQVICEIAHITLQGDPLRGTANLSEAIRVPPTLEVTQQPMRAENQANVTCQVSNFYPRGLQLTWLENGNVSRTETASTLIENKDGTYNWMSWLLVNTCAHRDDVVLTCQVEHDGQQAVSKSYALEISAHQKEHGSDITHEAALAPTAPLLVALLLGPKLLLVVGVSAIYICWKQKA

SEQ ID NO: 1774 - protein, 181 aa, Homo sapiens
MPVPASWPHLPSPFLLMTLLLGRLTGVAGEDELQVIQPEKSVSVAAGESATLRCAMTSLIPVGPIMWFRGAGAGRELIYNQKEGHFPRVTTVSELTKRNNLDFSISISNITPADAGTYYCVKFRKGSPDDVEFKSGAGTELSVREAALAPTAPLLVALLLGPKLLLVVGVSAIYICWKQKA

SEQ ID NO: 1775 - protein, 226 aa, Homo sapiens
MAAAAVQGGRSGGSGGCSGAGGASNCGTGSGRSGLLDKWKIDDKPVKIDKWDGSAVKNSLDDSAKKVLLEKYKYVENFGLIDGRLTICTISCFFAIVALIWDYMHPFPESKPVLALCVISYFVMMGILTIYTSYKEKSIFLVAHRKDPTGMDPDDIWQLSSSLKRFDDKYTLKLTFISGRTKQQREAEFTKSIAKFFDHSGTLVMDAYEPEISRLHDSLAIERKIK

SEQ ID NO: 1776 - protein, 919 aa, Homo sapiens
MEAPEYLDLDEIDFSDDISYSVTSLKTIPELCRRCDTQNEDRSVSSSSWNCGISTLITNTQKPTGIADVYSKFRPVKRVSPLKHQPETLENNESDDQKNQKVVEYQKGGESDLGPQPQELGPGDGVGGPPGKSSEPSTSLGELEHYDLDMDEILDVPYIKSSQQLASFTKVTSEKRILGLCTTINGLSGKACSTGSSESSSSNMAPFCVLSPVKSPHLRKASAVIHDQHKLSTEETEISPPLVKCGSAYEPENQSKDFLNKTFSDPHGRKVEKTTPDCQLRAFHLQSSAAESKPEEQVSGLNRTSSQGPEERSEYLKKVKSILNIVKEGQISLLPHLAADNLDKIHDENGNNLLHIAASQGHAECLQHLTSLMGEDCLNERNTEKLTPAGLAIKNGQLECVRWMVSETEAIAELSCSKDFPSLIHYAGCYGQEKILLWLLQFMQEQGISLDEVDQDGNSAVHVASQHGYLGCIQTLVEYGANVTMQNHAGEKPSQSAERQGHTLCSRYLVVVETCMSLASQVVKLTKQLKEQTVERVTLQNQLQQFLEAQKSEGKSLPSSPSSPSSPASRKSQWKSPDADDDSVAKSKPGVQEGIQVLGSLSASSRARPKAKDEDSDKILRQLLGKEISENVCTQEKLSLEFQDAQASSRNSKKIPLEKRELKLARLRQLMQRSLSESDTDSNNSEDPKTTPVRKADRPRPQPIVESVESMDSAESLHLMIKKHTLASGGRRFPFSIKASKSLDGHSPSPTSESSEPDLESQYPGSGSIPPNQPSGDPQQPSPDSTAAQKVATSPKSALKSPSSKRRTSQNLKLRVTFEEPVVQMEQPSLELNGEKDKDKGRTLQRTSTSNESGDQLKRPFGAFRSIMETLSGNQNNNNNYQAANQLKTSTLPLTSLGRKTDAKGNPASSASKGKNKAA

SEQ ID NO: 1777 - protein, 603 aa, Homo sapiens
MTYLIQSHHSRRSQNCAEDVIRKTKTDQNGQLECVRWMVSETEAIAELSCSKDFPSLIHYAGCYGQEKILLWLLQFMQEQGISLDEVDQDGNSAVHVASQHGYLGCIQTLVEYGANVTMQNHAGEKPSQSAERQGHTLCSRYLVVVETCMSLASQVVKLTKQLKEQTVERVTLQNQLQQFLEAQKSEGKSLPSSPSSPSSPASRKSQWKSPDADDDSVAKSKPGVQEGIQVLGSLSASSRARPKAKDEDSDKILRQLLGKEISENVCTQEKLSLEFQDAQASSRNSKKIPLEKRELKLARLRQLMQRSLSESDTDSNNSEDPKTTPVRKADRPRPQPIVESVESMDSAESLHLMIKKHTLASGGRRFPFSIKASKSLDGHSPSPTSESSEPDLESQYPGSGSIPPNQPSGDPQQPSPDSTAAQKVATSPKSALKSPSSKRRTSQNLKLRVTFEEPVVQMEQPSLELNGEKDKDKGRTLQRTSTSNESGDQLKRPFGAFRSIMETLSGNQNNNNNYQAANQLKTSTLPLTSLGRKTDAKGNPASSASKGKNKAEMYSSCINLSSNMLIEEHLCNDTRHNDINRKMKKSYSIKHIAEPESKELFL

SEQ ID NO: 1778 - protein, 1016 aa, Homo sapiens
MEAPEYLDLDEIDFSDDISDNRSQGNRLQKLGLEDTDREDAMGFGSHRAKLTVVAALGACHCPENEYSVTSLKTIPELCRRCDTQNEDRSVSSSSWNCGISTLITNTQKPTGIADVYSKFRPVKRVSPLKHQPETLENNESDDQKNQKVVEYQKGGESDLGPQPQELGPGDGVGGPPGKSSEPSTSLGELEHYDLDMDEILDVPYIKSSQQLASFTKVTSEKRILGLCTTINGLSGKACSTGSSESSSSNMAPFCVLSPVKSPHLRKASAVIHDQHKLSTEETEISPPLVKCGSAYEPENQSKDFLNKTFSDPHGRKVEKTTPDCQLRAFHLQSSAAESKPEEQVSGLNRTSSQGPEERSEYLKKVKSILNIVKEGQISLLPHLAADNLDKIHDENGNNLLHIAASQGHAECLQHLTSLMGEDCLNERNTEKLTPAGLAIKNGQLECVRWMVSETEAIAELSCSKDFPSLIHYAGCYGQEKILLWLLQFMQEQGISLDEVDQDGNSAVHVASQHGYLGCIQTLVEYGANVTMQNHAGEKPSQSAERQGHTLCSRYLVVVETCMSLASQVVKLTKQLKEQTVERVTLQNQLQQFLEAQKSEGKSLPSSPSSPSSPASRKSQWKSPDADDDSVAKSKPGVQEGIQVLGSLSASSRARPKAKDEDSDKILRQLLGKEISENVCTQEKLSLEFQDAQASSRNSKKIPLEKRELKLARLRQLMQRSLSESDTDSNNSEDPKTTPVRKADRPRPQPIVESVESMDSAESLHLMIKKHTLASGGRRFPFSIKASKSLDGHSPSPTSESSEPDLESQYPGSGSIPPNQPSGDPQQPSPDSTAAQKVATSPKSALKSPSSKRRTSQNLKLRVTFEEPVVQMEQPSLELNGEKDKDKGRTLQRTSTSNESGDQLKRPFGAFRSIMETLSGNQNNNNNYQAANQLKTSTLPLTSLGRKTDAKGNPASSASKGKNKAEMYSSCINLSSNMLIEEHLCNDTRHNDINRKMKKSYSIKHIAEPESKELFL

SEQ ID NO: 1779 - protein, 859 aa, Homo sapiens
MEAPEYLDLDEIDFSDDISYSVTSLKTIPELCRRCDTQNEDRSVSSSSWNCGISTLITNTQKPTGIADVYSKFRPVKRVSPLKHQPETLENNESDDQKNQKVVEYQKGGESDLGPQPQELGPGDGVGGPPGKSSEPSTSLGELEHYDLDMDEILDVPYIKSSQQLASFTKVTSEKRILGLCTTINGLSGKACSTGSSESSSSNMAPFCVLSPVKSPHLRKASAVIHDQHKLSTEETEISPPLVKCGSAYEPENQSKDFLNKTFSDPHGRKVEKTTPDCQLRAFHLQSSAAESKPEEQVSGLNRTSSQGPEERSEYLKKVKSILNIVKEGQISLLNGQLECVRWMVSETEAIAELSCSKDFPSLIHYAGCYGQEKILLWLLQFMQEQGISLDEVDQDGNSAVHVASQHGYLGCIQTLVEYGANVTMQNHAGEKPSQSAERQGHTLCSRYLVVVETCMSLASQVVKLTKQLKEQTVERVTLQNQLQQFLEAQKSEGKSLPSSPSSPSSPASRKSQWKSPDADDDSVAKSKPGVQEGIQVLGSLSASSRARPKAKDEDSDKILRQLLGKEISENVCTQEKLSLEFQDAQASSRNSKKIPLEKRELKLARLRQLMQRSLSESDTDSNNSEDPKTTPVRKADRPRPQPIVESVESMDSAESLHLMIKKHTLASGGRRFPFSIKASKSLDGHSPSPTSESSEPDLESQYPGSGSIPPNQPSGDPQQPSPDSTAAQKVATSPKSALKSPSSKRRTSQNLKLRVTFEEPVVQMEQPSLELNGEKDKDKGRTLQRTSTSNESGDQLKRPFGAFRSIMETLSGNQNNNNNYQAANQLKTSTLPLTSLGRKTDAKGNPASSASKGKNKAA

SEQ ID NO: 1780 - protein, 553 aa, Homo sapiens
MTYLIQSHHSRRSQNCAEDVIRKTKTDQNGQLECVRWMVSETEAIAELSCSKDFPSLIHYAGCYGQEKILLWLLQFMQEQGISLDEVDQDGNSAVHVASQHGYLGCIQTLVEYGANVTMQNHAGEKPSQSAERQGHTLCSRYLVVVETCMSLASQVVKLTKQLKEQTVERVTLQNQLQQFLEAQKSEGKSLPSSPSSPSSPASRKSQWKSPDADDDSVAKSKPGVQEGIQVLGSLSASSRARPKAKDEDSDKILRQLLGKEISENVCTQEKLSLEFQDAQASSRNSKKIPLEKRELKLARLRQLMQRSLSESDTDSNNSEDPKTTPVRKADRPRPQPIVESVESMDSAESLHLMIKKHTLASGGRRFPFSIKASKSLDGHSPSPTSESSEPDLESQYPGSGSIPPNQPSGDPQQPSPDSTAAQKVATSPKSALKSPSSKRRTSQNLKLRVTFEEPVVQMEQPSLELNGEKDKDKGRTLQRTSTSNESGDQLKRPFGAFRSIMETLSGNQNNNNNYQAANQLKTSTLPLTSLGRKTDAKGNPASSASKGKNKAA

SEQ ID NO: 1781 - protein, 588 aa, Homo sapiens
MEAPEYLDLDEIDFSDDISDNRSQGNRLQKLGLEDTDREDAMGFGSHRAKLTVVAALGACHCPENEYSVTSLKTIPELCRRCDTQNEDRSVSSSSWNCGISTLITNTQKPTGIADVYSKFRPVKRVSPLKHQPETLENNESDDQKNQKVVEYQKGGESDLGPQPQELGPGDGVGGPPGKSSEPSTSLGELEHYDLDMDEILDVPYIKSSQQLASFTKVTSEKRILGLCTTINGLSGKACSTGSSESSSSNMAPFCVLSPVKSPHLRKASAVIHDQHKLSTEETEISPPLVKCGSAYEPENQSKDFLNKTFSDPHGRKVEKTTPDCQLRAFHLQSSAAESKPEEQVSGLNRTSSQGPEERSEYLKKVKSILNIVKEGQISLLPHLAADNLDKIHDENGNNLLHIAASQGHAECLQHLTSLMGEDCLNERNTEKLTPAGLAIKNGQLECVRWMVSETEAIAELSCSKDFPSLIHYAGCYGQEKILLWLLQFMQEQGISLDEVDQDGNSAVHVASQHGYLGCIQTRLKIQGTWNGSETCLFTHHFSSYPPISSGLQCQGQEGVLFIPDQVGAATNKQVLFQNQLPETKSSY

SEQ ID NO: 1782 - protein, 1288 aa, Homo sapiens
MPRKGTQPSTARRREEGPPPPSPDGASSDAEPEPPSGRTESPATAAETASEELDNRSLEEILNSIPPPPPPAMTNEAGAPRLMITHIVNQNFKSYAGEKILGPFHKRFSCIIGPNGSGKSNVIDSMLFVFGYRAQKIRSKKLSVLIHNSDEHKDIQSCTVEVHFQKIIDKEGDDYEVIPNSNFYVSRTACRDNTSVYHISGKKKTFKDVGNLLRSHGIDLDHNRFLILQGEVEQIAMMKPKGQTEHDEGMLEYLEDIIGCGRLNEPIKVLCRRVEILNEHRGEKLNRVKMVEKEKDALEGEKNIAIEFLTLENEIFRKKNHVCQYYIYELQKRIAEMETQKEKIHEDTKEINEKSNILSNEMKAKNKDVKDTEKKLNKITKFIEENKEKFTQLDLEDVQVREKLKHATSKAKKLEKQLQKDKEKVEEFKSIPAKSNNIINETTTRNNALEKEKEKEEKKLKEVMDSLKQETQGLQKEKESREKELMGFSKSVNEARSKMDVAQSELDIYLSRHNTAVSQLTKAKEALIAASETLKERKAAIRDIEGKLPQTEQELKEKEKELQKLTQEETNFKSLVHDLFQKVEEAKSSLAMNRSRGKVLDAIIQEKKSGRIPGIYGRLGDLGAIDEKYDVAISSCCHALDYIVVDSIDIAQECVNFLKRQNIGVATFIGLDKMAVWAKKMTEIQTPENTPRLFDLVKVKDEKIRQAFYFALRDTLVADNLDQATRVAYQKDRRWRVVTLQGQIIEQSGTMTGGGSKVMKGRMGSSLVIEISEEEVNKMESQLQNDSKKAMQIQEQKVQLEERVVKLRHSEREMRNTLEKFTASIQRLIEQEEYLNVQVKELEANVLATAPDKKKQKLLEENVSAFKTEYDAVAEKAGKVEAEVKRLHNTIVEINNHKLKAQQDKLDKINKQLDECASAITKAQVAIKTADRNLQKAQDSVLRTEKEIKDTEKEVDDLTAELKSLEDKAAEVVKNTNAAEESLPEIQKEHRNLLQELKVIQENEHALQKDALSIKLKLEQIDGHIAEHNSKIKYWHKEISKISLHPIEDNPIEEISVLSPEDLEAIKNPDSITNQIALLEARCHEMKPNLGAIAEYKKKEELYLQRVAELDKITYERDSFRQAYEDLRKQRLNEFMAGFYIITNKLKENYQMLTLGGDAELELVDSLDPFSEGIMFSVRPPKKSWKKIFNLSGGEKTLSSLALVFALHHYKPTPLYFMDEIDAALDFKNVSIVAFYIYEQTKNAQFIIISLRNNMFEISDRLIGIYKTYNITKSVAVNPKEIASKGLC

SEQ ID NO: 1783 - protein, 1230 aa, Homo sapiens
MPRKGTQPSTARRREEGPPPPSPDGASSDAEPEPPSGRTESPATAAETASEELDNRSLEEILNSIPPPPPPAMTNEAGAPRLMITHIVNQNFKSYAGEKILGPFHKRFSCIIGPNGSGKSNVIDSMLFVFGYRAQKIRSKKLSVLIHNSDEHKDIQSCTVEVHFQKIIDKEGDDYEVIPNSNFYVSRTACRDNTSVYHISGKKKTFKDVGNLLRSHGIDLDHNRFLILQGEVEQIAMMKPKGQTEHDEGMLEYLEDIIGCGRLNEPIKVLCRRVEILNEHRGEKLNRVKMVEKEKDALEGEKNIAIEFLTLENEIFRKKNHVCQYYIYELQKRIAEMETQKEKIHEDTKEINEKSNILSNEMKAKNKDVKDTEKKLNKITKFIEENKEKFTQLDLEDVQVREKLKHATSKAKKLEKQLQKDKEKVEEFKSIPAKSNNIINETTTRNNALEKEKEKEEKKLKEVMDSLKQETQGLQKEKESREKELMGFSKSVNEARSKMDVAQSELDIYLSRHNTAVSQLTKAKEALIAASETLKERKAAIRDIEGKLPQTEQELKEKEKELQKLTQEETNFKSLVHDLFQKVEEAKSSLAMNRSRGKVLDAIIQEKKSGRIPGIYGRLGDLGAIDEKYDVAISSCCHALDYIVVDSIDIAQECVNFLKRQNIGVATFIGLDKMAVWAKKMTEIQTPENTPRLFDLVKVKDEKIRQAFYFALRDTLVADNLDQATRVAYQKDRRWRVVTLQGQIIEQSGTMTGGGSKVMKGRMGSSLVIEISEEEVNKMESQLQNDSKKAMQIQEQKVQLEERVVKLRHSEREMRNTLEKFTASIQRLIEQEEYLNVQVKELEANVLATAPDKKKQKLLEENVSAFKTEYDAVAEKAGKVEAEVKRLHNTIVEINNHKLKAQQDKLDKINKQLDECASAITKAQVAIKTADRNLQKAQDSVLRTEKEIKDTEKEVDDLTAELKSLEDKAAEVVKNTNAAEISKISLHPIEDNPIEEISVLSPEDLEAIKNPDSITNQIALLEARCHEMKPNLGAIAEYKKKEELYLQRVAELDKITYERDSFRQAYEDLRKQRLNEFMAGFYIITNKLKENYQMLTLGGDAELELVDSLDPFSEGIMFSVRPPKKSWKKIFNLSGGEKTLSSLALVFALHHYKPTPLYFMDEIDAALDFKNVSIVAFYIYEQTKNAQFIIISLRNNMFEISDRLIGIYKTYNITKSVAVNPKEIASKGLC

SEQ ID NO: 1784 - protein, 1647 aa, Homo sapiens
MSTPDPPLGGTPRPGPSPGPGPSPGAMLGPSPGPSPGSAHSMMGPSPGPPSAGHPIPTQGPGGYPQDNMHQMHKPMESMHEKGMSDDPRYNQMKGMGMRSGGHAGMGPPPSPMDQHSQGYPSPLGGSEHASSPVPASGPSSGPQMSSGPGGAPLDGADPQALGQQNRGPTPFNQNQLHQLRAQIMAYKMLARGQPLPDHLQMAVQGKRPMPGMQQQMPTLPPPSVSATGPGPGPGPGPGPGPGPAPPNYSRPHGMGGPNMPPPGPSGVPPGMPGQPPGGPPKPWPEGPMANAAAPTSTPQKLIPPQPTGRPSPAPPAVPPAASPVMPPQTQSPGQPAQPAPMVPLHQKQSRITPIQKPRGLDPVEILQEREYRLQARIAHRIQELENLPGSLAGDLRTKATIELKALRLLNFQRQLRQEVVVCMRRDTALETALNAKAYKRSKRQSLREARITEKLEKQQKIEQERKRRQKHQEYLNSILQHAKDFKEYHRSVTGKIQKLTKAVATYHANTEREQKKENERIEKERMRRLMAEDEEGYRKLIDQKKDKRLAYLLQQTDEYVANLTELVRQHKAAQVAKEKKKKKKKKKAENAEGQTPAIGPDGEPLDETSQMSDLPVKVIHVESGKILTGTDAPKAGQLEAWLEMNPGYEVAPRSDSEESGSEEEEEEEEEEQPQAAQPPTLPVEEKKKIPDPDSDDVSEVDARHIIENAKQDVDDEYGVSQALARGLQSYYAVAHAVTERVDKQSALMVNGVLKQYQIKGLEWLVSLYNNNLNGILADEMGLGKTIQTIALITYLMEHKRINGPFLIIVPLSTLSNWAYEFDKWAPSVVKVSYKGSPAARRAFVPQLRSGKFNVLLTTYEYIIKDKHILAKIRWKYMIVDEGHRMKNHHCKLTQVLNTHYVAPRRLLLTGTPLQNKLPELWALLNFLLPTIFKSCSTFEQWFNAPFAMTGEKVDLNEEETILIIRRLHKVLRPFLLRRLKKEVEAQLPEKVEYVIKCDMSALQRVLYRHMQAKGVLLTDGSEKDKKGKGGTKTLMNTIMQLRKICNHPYMFQHIEESFSEHLGFTGGIVQGLDLYRASGKFELLDRILPKLRATNHKVLLFCQMTSLMTIMEDYFAYRGFKYLRLDGTTKAEDRGMLLKTFNEPGSEYFIFLLSTRAGGLGLNLQSADTVIIFDSDWNPHQDLQAQDRAHRIGQQNEVRVLRLCTVNSVEEKILAAAKYKLNVDQKVIQAGMFDQKSSSHERRAFLQAILEHEEQDESRHCSTGSGSASFAHTAPPPAGVNPDLEEPPLKEEDEVPDDETVNQMIARHEEEFDLFMRMDLDRRREEARNPKRKPRLMEEDELPSWIIKDDAEVERLTCEEEEEKMFGRGSRHRKEVDYSDSLTEKQWLKAIEEGTLEEIEEEVRQKKSSRKRKRDSDAGSSTPTTSTRSRDKDDESKKQKKRGRPPAEKLSPNPPNLTKKMKKIVDAVIKYKDSSSGRQLSEVFIQLPSRKELPEYYELIRKPVDFKKIKERIRNHKYRSLNDLEKDVMLLCQNAQTFNLEGSLIYEDSIVLQSVFTSVRQKIEKEDDSEGEESEEEEEGEEEGSESESRSVKVKIKLGRKEKAQDRLKGGRRRPSRGSRAKPVVSDDDSEEEQEEDRSGSGSEED

SEQ ID NO: 1785 - protein, 1614 aa, Homo sapiens
MSTPDPPLGGTPRPGPSPGPGPSPGAMLGPSPGPSPGSAHSMMGPSPGPPSAGHPIPTQGPGGYPQDNMHQMHKPMESMHEKGMSDDPRYNQMKGMGMRSGGHAGMGPPPSPMDQHSQGYPSPLGGSEHASSPVPASGPSSGPQMSSGPGGAPLDGADPQALGQQNRGPTPFNQNQLHQLRAQIMAYKMLARGQPLPDHLQMAVQGKRPMPGMQQQMPTLPPPSVSATGPGPGPGPGPGPGPGPAPPNYSRPHGMGGPNMPPPGPSGVPPGMPGQPPGGPPKPWPEGPMANAAAPTSTPQKLIPPQPTGRPSPAPPAVPPAASPVMPPQTQSPGQPAQPAPMVPLHQKQSRITPIQKPRGLDPVEILQEREYRLQARIAHRIQELENLPGSLAGDLRTKATIELKALRLLNFQRQLRQEVVVCMRRDTALETALNAKAYKRSKRQSLREARITEKLEKQQKIEQERKRRQKHQEYLNSILQHAKDFKEYHRSVTGKIQKLTKAVATYHANTEREQKKENERIEKERMRRLMAEDEEGYRKLIDQKKDKRLAYLLQQTDEYVANLTELVRQHKAAQVAKEKKKKKKKKKAENAEGQTPAIGPDGEPLDETSQMSDLPVKVIHVESGKILTGTDAPKAGQLEAWLEMNPGYEVAPRSDSEESGSEEEEEEEEEEQPQAAQPPTLPVEEKKKIPDPDSDDVSEVDARHIIENAKQDVDDEYGVSQALARGLQSYYAVAHAVTERVDKQSALMVNGVLKQYQIKGLEWLVSLYNNNLNGILADEMGLGKTIQTIALITYLMEHKRINGPFLIIVPLSTLSNWAYEFDKWAPSVVKVSYKGSPAARRAFVPQLRSGKFNVLLTTYEYIIKDKHILAKIRWKYMIVDEGHRMKNHHCKLTQVLNTHYVAPRRLLLTGTPLQNKLPELWALLNFLLPTIFKSCSTFEQWFNAPFAMTGEKVDLNEEETILIIRRLHKVLRPFLLRRLKKEVEAQLPEKVEYVIKCDMSALQRVLYRHMQAKGVLLTDGSEKDKKGKGGTKTLMNTIMQLRKICNHPYMFQHIEESFSEHLGFTGGIVQGLDLYRASGKFELLDRILPKLRATNHKVLLFCQMTSLMTIMEDYFAYRGFKYLRLDGTTKAEDRGMLLKTFNEPGSEYFIFLLSTRAGGLGLNLQSADTVIIFDSDWNPHQDLQAQDRAHRIGQQNEVRVLRLCTVNSVEEKILAAAKYKLNVDQKVIQAGMFDQKSSSHERRAFLQAILEHEEQDEEEDEVPDDETVNQMIARHEEEFDLFMRMDLDRRREEARNPKRKPRLMEEDELPSWIIKDDAEVERLTCEEEEEKMFGRGSRHRKEVDYSDSLTEKQWLKAIEEGTLEEIEEEVRQKKSSRKRKRDSDAGSSTPTTSTRSRDKDDESKKQKKRGRPPAEKLSPNPPNLTKKMKKIVDAVIKYKDSSSGRQLSEVFIQLPSRKELPEYYELIRKPVDFKKIKERIRNHKYRSLNDLEKDVMLLCQNAQTFNLEGSLIYEDSIVLQSVFTSVRQKIEKEDDSEGEESEEEEEGEEEGSESESRSVKVKIKLGRKEKAQDRLKGGRRRPSRGSRAKPVVSDDDSEEEQEEDRSGSGSEED

SEQ ID NO: 1786 - protein, 1616 aa, Homo sapiens
MSTPDPPLGGTPRPGPSPGPGPSPGAMLGPSPGPSPGSAHSMMGPSPGPPSAGHPIPTQGPGGYPQDNMHQMHKPMESMHEKGMSDDPRYNQMKGMGMRSGGHAGMGPPPSPMDQHSQGYPSPLGGSEHASSPVPASGPSSGPQMSSGPGGAPLDGADPQALGQQNRGPTPFNQNQLHQLRAQIMAYKMLARGQPLPDHLQMAVQGKRPMPGMQQQMPTLPPPSVSATGPGPGPGPGPGPGPGPAPPNYSRPHGMGGPNMPPPGPSGVPPGMPGQPPGGPPKPWPEGPMANAAAPTSTPQKLIPPQPTGRPSPAPPAVPPAASPVMPPQTQSPGQPAQPAPMVPLHQKQSRITPIQKPRGLDPVEILQEREYRLQARIAHRIQELENLPGSLAGDLRTKATIELKALRLLNFQRQLRQEVVVCMRRDTALETALNAKAYKRSKRQSLREARITEKLEKQQKIEQERKRRQKHQEYLNSILQHAKDFKEYHRSVTGKIQKLTKAVATYHANTEREQKKENERIEKERMRRLMAEDEEGYRKLIDQKKDKRLAYLLQQTDEYVANLTELVRQHKAAQVAKEKKKKKKKKKAENAEGQTPAIGPDGEPLDETSQMSDLPVKVIHVESGKILTGTDAPKAGQLEAWLEMNPGYEVAPRSDSEESGSEEEEEEEEEEQPQAAQPPTLPVEEKKKIPDPDSDDVSEVDARHIIENAKQDVDDEYGVSQALARGLQSYYAVAHAVTERVDKQSALMVNGVLKQYQIKGLEWLVSLYNNNLNGILADEMGLGKTIQTIALITYLMEHKRINGPFLIIVPLSTLSNWAYEFDKWAPSVVKVSYKGSPAARRAFVPQLRSGKFNVLLTTYEYIIKDKHILAKIRWKYMIVDEGHRMKNHHCKLTQVLNTHYVAPRRLLLTGTPLQNKLPELWALLNFLLPTIFKSCSTFEQWFNAPFAMTGEKVDLNEEETILIIRRLHKVLRPFLLRRLKKEVEAQLPEKVEYVIKCDMSALQRVLYRHMQAKGVLLTDGSEKDKKGKGGTKTLMNTIMQLRKICNHPYMFQHIEESFSEHLGFTGGIVQGLDLYRASGKFELLDRILPKLRATNHKVLLFCQMTSLMTIMEDYFAYRGFKYLRLDGTTKAEDRGMLLKTFNEPGSEYFIFLLSTRAGGLGLNLQSADTVIIFDSDWNPHQDLQAQDRAHRIGQQNEVRVLRLCTVNSVEEKILAAAKYKLNVDQKVIQAGMFDQKSSSHERRAFLQAILEHEEQDEEEDEVPDDETVNQMIARHEEEFDLFMRMDLDRRREEARNPKRKPRLMEEDELPSWIIKDDAEVERLTCEEEEEKMFGRGSRHRKEVDYSDSLTEKQWLKTLKAIEEGTLEEIEEEVRQKKSSRKRKRDSDAGSSTPTTSTRSRDKDDESKKQKKRGRPPAEKLSPNPPNLTKKMKKIVDAVIKYKDSSGRQLSEVFIQLPSRKELPEYYELIRKPVDFKKIKERIRNHKYRSLNDLEKDVMLLCQNAQTFNLEGSLIYEDSIVLQSVFTSVRQKIEKEDDSEGEESEEEEEGEEEGSESESRSVKVKIKLGRKEKAQDRLKGGRRRPSRGSRAKPVVSDDDSEEEQEEDRSGSGSEED

SEQ ID NO: 1787 - protein, 1617 aa, Homo sapiens
MSTPDPPLGGTPRPGPSPGPGPSPGAMLGPSPGPSPGSAHSMMGPSPGPPSAGHPIPTQGPGGYPQDNMHQMHKPMESMHEKGMSDDPRYNQMKGMGMRSGGHAGMGPPPSPMDQHSQGYPSPLGGSEHASSPVPASGPSSGPQMSSGPGGAPLDGADPQALGQQNRGPTPFNQNQLHQLRAQIMAYKMLARGQPLPDHLQMAVQGKRPMPGMQQQMPTLPPPSVSATGPGPGPGPGPGPGPGPAPPNYSRPHGMGGPNMPPPGPSGVPPGMPGQPPGGPPKPWPEGPMANAAAPTSTPQKLIPPQPTGRPSPAPPAVPPAASPVMPPQTQSPGQPAQPAPMVPLHQKQSRITPIQKPRGLDPVEILQEREYRLQARIAHRIQELENLPGSLAGDLRTKATIELKALRLLNFQRQLRQEVVVCMRRDTALETALNAKAYKRSKRQSLREARITEKLEKQQKIEQERKRRQKHQEYLNSILQHAKDFKEYHRSVTGKIQKLTKAVATYHANTEREQKKENERIEKERMRRLMAEDEEGYRKLIDQKKDKRLAYLLQQTDEYVANLTELVRQHKAAQVAKEKKKKKKKKKAENAEGQTPAIGPDGEPLDETSQMSDLPVKVIHVESGKILTGTDAPKAGQLEAWLEMNPGYEVAPRSDSEESGSEEEEEEEEEEQPQAAQPPTLPVEEKKKIPDPDSDDVSEVDARHIIENAKQDVDDEYGVSQALARGLQSYYAVAHAVTERVDKQSALMVNGVLKQYQIKGLEWLVSLYNNNLNGILADEMGLGKTIQTIALITYLMEHKRINGPFLIIVPLSTLSNWAYEFDKWAPSVVKVSYKGSPAARRAFVPQLRSGKFNVLLTTYEYIIKDKHILAKIRWKYMIVDEGHRMKNHHCKLTQVLNTHYVAPRRLLLTGTPLQNKLPELWALLNFLLPTIFKSCSTFEQWFNAPFAMTGEKVDLNEEETILIIRRLHKVLRPFLLRRLKKEVEAQLPEKVEYVIKCDMSALQRVLYRHMQAKGVLLTDGSEKDKKGKGGTKTLMNTIMQLRKICNHPYMFQHIEESFSEHLGFTGGIVQGLDLYRASGKFELLDRILPKLRATNHKVLLFCQMTSLMTIMEDYFAYRGFKYLRLDGTTKAEDRGMLLKTFNEPGSEYFIFLLSTRAGGLGLNLQSADTVIIFDSDWNPHQDLQAQDRAHRIGQQNEVRVLRLCTVNSVEEKILAAAKYKLNVDQKVIQAGMFDQKSSSHERRAFLQAILEHEEQDEEEDEVPDDETVNQMIARHEEEFDLFMRMDLDRRREEARNPKRKPRLMEEDELPSWIIKDDAEVERLTCEEEEEKMFGRGSRHRKEVDYSDSLTEKQWLKTLKAIEEGTLEEIEEEVRQKKSSRKRKRDSDAGSSTPTTSTRSRDKDDESKKQKKRGRPPAEKLSPNPPNLTKKMKKIVDAVIKYKDSSSGRQLSEVFIQLPSRKELPEYYELIRKPVDFKKIKERIRNHKYRSLNDLEKDVMLLCQNAQTFNLEGSLIYEDSIVLQSVFTSVRQKIEKEDDSEGEESEEEEEGEEEGSESESRSVKVKIKLGRKEKAQDRLKGGRRRPSRGSRAKPVVSDDDSEEEQEEDRSGSGSEED

SEQ ID NO: 1788 - protein, 1613 aa, Homo sapiens
MSTPDPPLGGTPRPGPSPGPGPSPGAMLGPSPGPSPGSAHSMMGPSPGPPSAGHPIPTQGPGGYPQDNMHQMHKPMESMHEKGMSDDPRYNQMKGMGMRSGGHAGMGPPPSPMDQHSQGYPSPLGGSEHASSPVPASGPSSGPQMSSGPGGAPLDGADPQALGQQNRGPTPFNQNQLHQLRAQIMAYKMLARGQPLPDHLQMAVQGKRPMPGMQQQMPTLPPPSVSATGPGPGPGPGPGPGPGPAPPNYSRPHGMGGPNMPPPGPSGVPPGMPGQPPGGPPKPWPEGPMANAAAPTSTPQKLIPPQPTGRPSPAPPAVPPAASPVMPPQTQSPGQPAQPAPMVPLHQKQSRITPIQKPRGLDPVEILQEREYRLQARIAHRIQELENLPGSLAGDLRTKATIELKALRLLNFQRQLRQEVVVCMRRDTALETALNAKAYKRSKRQSLREARITEKLEKQQKIEQERKRRQKHQEYLNSILQHAKDFKEYHRSVTGKIQKLTKAVATYHANTEREQKKENERIEKERMRRLMAEDEEGYRKLIDQKKDKRLAYLLQQTDEYVANLTELVRQHKAAQVAKEKKKKKKKKKAENAEGQTPAIGPDGEPLDETSQMSDLPVKVIHVESGKILTGTDAPKAGQLEAWLEMNPGYEVAPRSDSEESGSEEEEEEEEEEQPQAAQPPTLPVEEKKKIPDPDSDDVSEVDARHIIENAKQDVDDEYGVSQALARGLQSYYAVAHAVTERVDKQSALMVNGVLKQYQIKGLEWLVSLYNNNLNGILADEMGLGKTIQTIALITYLMEHKRINGPFLIIVPLSTLSNWAYEFDKWAPSVVKVSYKGSPAARRAFVPQLRSGKFNVLLTTYEYIIKDKHILAKIRWKYMIVDEGHRMKNHHCKLTQVLNTHYVAPRRLLLTGTPLQNKLPELWALLNFLLPTIFKSCSTFEQWFNAPFAMTGEKVDLNEEETILIIRRLHKVLRPFLLRRLKKEVEAQLPEKVEYVIKCDMSALQRVLYRHMQAKGVLLTDGSEKDKKGKGGTKTLMNTIMQLRKICNHPYMFQHIEESFSEHLGFTGGIVQGLDLYRASGKFELLDRILPKLRATNHKVLLFCQMTSLMTIMEDYFAYRGFKYLRLDGTTKAEDRGMLLKTFNEPGSEYFIFLLSTRAGGLGLNLQSADTVIIFDSDWNPHQDLQAQDRAHRIGQQNEVRVLRLCTVNSVEEKILAAAKYKLNVDQKVIQAGMFDQKSSSHERRAFLQAILEHEEQDEEEDEVPDDETVNQMIARHEEEFDLFMRMDLDRRREEARNPKRKPRLMEEDELPSWIIKDDAEVERLTCEEEEEKMFGRGSRHRKEVDYSDSLTEKQWLKAIEEGTLEEIEEEVRQKKSSRKRKRDSDAGSSTPTTSTRSRDKDDESKKQKKRGRPPAEKLSPNPPNLTKKMKKIVDAVIKYKDSSGRQLSEVFIQLPSRKELPEYYELIRKPVDFKKIKERIRNHKYRSLNDLEKDVMLLCQNAQTFNLEGSLIYEDSIVLQSVFTSVRQKIEKEDDSEGEESEEEEEGEEEGSESESRSVKVKIKLGRKEKAQDRLKGGRRRPSRGSRAKPVVSDDDSEEEQEEDRSGSGSEED

SEQ ID NO: 1789 - protein, 105 aa, Homo sapiens
MAPAGMSGAQDNSCLYQEIAPSFQRLPCPRTSSRHFSEAMTCPCGWRPFKGGPGGLKGPVWPAKEENSCSHGRIQRVQRRRVPSASPLIQKINRRSVLFHPYCWS

SEQ ID NO: 1790 - protein, 65 aa, Homo sapiens
MAPAGMSGAQDNSCLYQEIAPSFQRLPCPRYLMSCPWQFSTPDVGLTPIRLPFLCGKTGMKLQHS

SEQ ID NO: 1791 - protein, 265 aa, Homo sapiens
MGQILGKIMMSHQPQPQEERSPQRSTSGYPLQEVVDDEVLGPSAPGVDPSPPRRSLGWKRKRECLDESDDEPEKELAPEPEETWVAETLCGLKMKAKRRRVSLVLPEYYEAFNRLLEDPVIKRLLAWDKDLRVSDKYLLAMVIAYFSRAGLPSWQYQRIHFFLALYLANDMEEDDEAPKQNIFYFLYEETRSHIPLLSELWFQLCRYMNPRARKNCSQIALFRKYRFHFFCSMRCRAWVSLEELEEIQAYDPEHWVWARDRAHLS

SEQ ID NO: 1792 - protein, 1091 aa, Homo sapiens
MAKRKEENFSSPKNAKRPRQEELEDFDKDGDEDECKGTTLTAAEVGIIESIHLKNFMCHSMLGPFKFGSNVNFVVGNNGSGKSAVLTALIVGLGGRAVATNRGSSLKGFVKDGQNSADISITLRNRGDDAFKASVYGNSILIQQHISIDGSRSYKLKSATGSVVSTRKEELIAILDHFNIQVDNPVSVLTQEMSKQFLQSKNEGDKYKFFMKATQLEQMKEDYSYIMETKERTKEQIHQGEERLTELKRQCVEKEERFQSIAGLSTMKTNLESLKHEMAWAVVNEIEKQLNAIRDNIKIGEDRAARLDRKMEEQQVRLNEAEQKYKDIQDKLEKISEETNARAPECMALKADVVAKKRAYNEAEVLYNRSLNEYKALKKDDEQLCKRIEELKKSTDQSLEPERLERQKKISWLKERVKAFQNQENSVNQEIEQFQQAIEKDKEEHGKIKREELDVKHALSYNQRQLKELKDSKTDRLKRFGPNVPALLEAIDDAYRQGHFTYKPVGPLGACIHLRDPELALAIESCLKGLLQAYCCHNHADERVLQALMKRFYLPGTSRPPIIVSEFRNEIYDVRHRAAYHPDFPTVLTALEIDNAVVANSLIDMRGIETVLLIKNNSVARAVMQSQKPPKNCREAFTADGDQVFAGRYYSSENTRPKFLSRDVDSEISDLENEVENKTAQILNLQQHLSALEKDIKHNEELLKRCQLHYKELKMKIRKNISEIRELENIEEHQSVDIATLEDEAQENKSKMKMVEEHMEQQKENMEHLKSLKIEAENKYDAIKFKINQLSELADPLKDELNLADSEVDNQKRGKRHYEEKQKEHLDTLNKKKRELDMKEKELEEKMSQARQICPERIEVEKSASILDKEINRLRQKIQAEHASHGDREEIMRQYQEARETYLDLDSKVRTLKKFIKLLGEIMEHRFKTYQQFRRCLTLRCKLYFDNLLSQRAYCGKMNFDHKNETLSISVQPGEGNKAAFNDMRALSGGERSFSTVCFILSLWSIAESPFRCLDEFDVYMDMVNRRIAMDLILKMADSQRFRQFILLTPQSMSSLPSSKLIRILRMSDPERGQTTLPFRPVTQEEDDDQR

SEQ ID NO: 1793 - protein, 1117 aa, Homo sapiens
MAKRKEENFSSPKNAKRPRQEELEDFDKDGDEDECKGTTLTAAEVGIIESIHLKNFMCHSMLGPFKFGSNVNFVVGNNGSWSAVVRSRLNATSASQVQAILLFQPCGKSAVLTALIVGLGGRAVATNRGSSLKGFVKDGQNSADISITLRNRGDDAFKASVYGNSILIQQHISIDGSRSYKLKSATGSVVSTRKEELIAILDHFNIQVDNPVSVLTQEMSKQFLQSKNEGDKYKFFMKATQLEQMKEDYSYIMETKERTKEQIHQGEERLTELKRQCVEKEERFQSIAGLSTMKTNLESLKHEMAWAVVNEIEKQLNAIRDNIKIGEDRAARLDRKMEEQQVRLNEAEQKYKDIQDKLEKISEETNARAPECMALKADVVAKKRAYNEAEVLYNRSLNEYKALKKDDEQLCKRIEELKKSTDQSLEPERLERQKKISWLKERVKAFQNQENSVNQEIEQFQQAIEKDKEEHGKIKREELDVKHALSYNQRQLKELKDSKTDRLKRFGPNVPALLEAIDDAYRQGHFTYKPVGPLGACIHLRDPELALAIESCLKGLLQAYCCHNHADERVLQALMKRFYLPGTSRPPIIVSEFRNEIYDVRHRAAYHPDFPTVLTALEIDNAVVANSLIDMRGIETVLLIKNNSVARAVMQSQKPPKNCREAFTADGDQVFAGRYYSSENTRPKFLSRDVDSEISDLENEVENKTAQILNLQQHLSALEKDIKHNEELLKRCQLHYKELKMKIRKNISEIRELENIEEHQSVDIATLEDEAQENKSKMKMVEEHMEQQKENMEHLKSLKIEAENKYDAIKFKINQLSELADPLKDELNLADSEVDNQKRGKRHYEEKQKEHLDTLNKKKRELDMKEKELEEKMSQARQICPERIEVEKSASILDKEINRLRQKIQAEHASHGDREEIMRQYQEARETYLDLDSKVRTLKKFIKLLGEIMEHRFKTYQQFRRCLTLRCKLYFDNLLSQRAYCGKMNFDHKNETLSISVQPGEGNKAAFNDMRALSGGERSFSTVCFILSLWSIAESPFRCLDEFDVYMDMVNRRIAMDLILKMADSQRFRQFILLTPQSMSSLPSSKLIRILRMSDPERGQTTLPFRPVTQEEDDDQR

SEQ ID NO: 1794 - protein, 183 aa, Homo sapiens
MNGFSTEEDSREGPPAAPAAAAPGYGQSCCLIEDGERCVRPAGNASFSKRVQKSISQKKLKLDIDKSVRHLYICDFHKNFIQSVRNKRKRKTSDDGGDSPEHDTDIPEVDLFQLQVNTLRRYKRHYKLQTRPGFNKAQLAETVSRHFRNIPVNEKETLAYFIYMVKSNKSRLDQKSEGGKQLE

SEQ ID NO: 1795 - protein, 137 aa, Homo sapiens
MNGFSTEEDSREGPPAAPAAAAPGYGQSCCLIEDGERCVRPAGNASFSKRVQKSISQKKLKLDIDKSLQVNTLRRYKRHYKLQTRPGFNKAQLAETVSRHFRNIPVNEKETLAYFIYMVKSNKSRLDQKSEGGKQLE

SEQ ID NO: 1796 - protein, 142 aa, Homo sapiens
MNGFSTEEDSREGPPAAPAAAAPGYGQSCCLIEDGERCVRPAGNASFSKRVQKSISQKKLKLDIDKSVDLFQLQVNTLRRYKRHYKLQTRPGFNKAQLAETVSRHFRNIPVNEKETLAYFIYMVKSNKSRLDQKSEGGKQLE

SEQ ID NO: 1797 - protein, 828 aa, Homo sapiens
MMEGLKKRTRKAFGIRKKEKDTDSTGSPDRDGIQPSPHEPPYNSKAECAREGGKKVSKKSNGAPNGFYAEIDWERYNSPELDEEGYSIRPEEPGSTKGKHFYSSSESEEEEESHKKFNIKIKPLQSKDILKNAATVDELKASIGNIALSPSPVRKSPRRSPGAIKRNLSSEEVARPRRSTPTPELISKKPPDDTTALAPLFGPPLESAFDEQKTEVLLDQPEIWGSGQPINPSMESPKLTRPFPTGTPPPLPPKNVPATPPRTGSPLTIGPGNDQSATEVKIEKLPSINDLDSIFGPVLSPKSVAVNAEEKWVHFSDTSPEHVTPELTPREKVVSPPATPDNPADSPAPGPLGPPGPTGPPGPPGPPRNVLSPLNLEEVQKKVAEQTFIKDDYLETISSPKDFGLGQRATPPPPPPPTYRTVVSSPGPGSGPGPGTTSGASSPARPATPLVPCRSTTPPPPPPRPPSRPKLPPGKPGVGDVSRPFSPPIHSSSPPPIAPLARAESTSSISSTNSLSAATTPTVENEQPSLVWFDRGKFYLTFEGSSRGPSPLTMGAQDTLPVAAAFTETVNAYFKGADPSKCIVKITGEMVLSFPAGITRHFANNPSPAALTFRVINFSRLEHVLPNPQLLCCDNTQNDANTKEFWVNMPNLMTHLKKVSEQKPQATYYNVDMLKYQVSAQGIQSTPLNLAVNWRCEPSSTDLRIDYKYNTDAMTTAVALNNVQFLVPIDGGVTKLQAVLPPAVWNAEQQRILWKIPDISQKSENGGVGSLLARFQLSEGPSKPSPLVVQFTSEGSTLSGCDIELVGAGYRFSLIKKRFAAGKYLADN

SEQ ID NO: 1798 - protein, 832 aa, Homo sapiens
MMEGLKKRTRKAFGIRKKEKDTDSTGSPDRDGIQGKKKTQKTQLLLTSCFWLRALSLTLSQKKSNGAPNGFYAEIDWERYNSPELDEEGYSIRPEEPGSTKGKHFYSSSESEEEEESHKKFNIKIKPLQSKDILKNAATVDELKASIGNIALSPSPVRKSPRRSPGAIKRNLSSEEVARPRRSTPTPELISKKPPDDTTALAPLFGPPLESAFDEQKTEVLLDQPEIWGSGQPINPSMESPKLTRPFPTGTPPPLPPKNVPATPPRTGSPLTIGPGNDQSATEVKIEKLPSINDLDSIFGPVLSPKSVAVNAEEKWVHFSDTSPEHVTPELTPREKVVSPPATPDNPADSPAPGPLGPPGPTGPPGPPGPPRNVLSPLNLEEVQKKVAEQTFIKDDYLETISSPKDFGLGQRATPPPPPPPTYRTVVSSPGPGSGPGPGTTSGASSPARPATPLVPCRSTTPPPPPPRPPSRPKLPPGKPGVGDVSRPFSPPIHSSSPPPIAPLARAESTSSISSTNSLSAATTPTVENEQPSLVWFDRGKFYLTFEGSSRGPSPLTMGAQDTLPVAAAFTETVNAYFKGADPSKCIVKITGEMVLSFPAGITRHFANNPSPAALTFRVINFSRLEHVLPNPQLLCCDNTQNDANTKEFWVNMPNLMTHLKKVSEQKPQATYYNVDMLKYQVSAQGIQSTPLNLAVNWRCEPSSTDLRIDYKYNTDAMTTAVALNNVQFLVPIDGGVTKLQAVLPPAVWNAEQQRILWKIPDISQKSENGGVGSLLARFQLSEGPSKPSPLVVQFTSEGSTLSGCDIELVGAGYRFSLIKKRFAAGKYLADN

SEQ ID NO: 1799 - protein, 859 aa, Homo sapiens
MMEGLKKRTRKAFGIRKKEKDTDSTGSPDRDGIQGKKKTQKTQLLLTSCFWLRALSLTLSQKKSNGAPNGFYAEIDWERYNSPELDEEGYSIRPEEPGSTKGKHFYSSSESEEEEESHKKFNIKIKPLQSKDILKNAATVDELKASIGNIALSPSPVRKSPRRSPGAIKRNLSSEEVARPRRSTPTPELISKKPPDDTTALAPLFGPPLESAFDEQKTEVLLDQPEIWGSGQPINPSMESPKLTRPFPTGTPPPLPPKNVPATPPRTGSPLTIGPGNDQSATEVKIEKLPSINDLDSIFGPVLSPKSVAVNAEEKWVHFSDTSPEHVTPELTPREKVVSPPATPDNPADSPAPGPLGPPGPTGPPGPPGPPRNVLSPLNLEEVQKKVAEQTFIKDDYLETISSPKDFGLGQRATPPPPPPPTYRTVVSSPGPGSGPGPGTTSDGKTEAQRYQVICPSLQAGGNELDSYSGASSPARPATPLVPCRSTTPPPPPPRPPSRPKLPPGKPGVGDVSRPFSPPIHSSSPPPIAPLARAESTSSISSTNSLSAATTPTVENEQPSLVWFDRGKFYLTFEGSSRGPSPLTMGAQDTLPVAAAFTETVNAYFKGADPSKCIVKITGEMVLSFPAGITRHFANNPSPAALTFRVINFSRLEHVLPNPQLLCCDNTQNDANTKEFWVNMPNLMTHLKKVSEQKPQATYYNVDMLKYQVSAQGIQSTPLNLAVNWRCEPSSTDLRIDYKYNTDAMTTAVALNNVQFLVPIDGGVTKLQAVLPPAVWNAEQQRILWKIPDISQKSENGGVGSLLARFQLSEGPSKPSPLVVQFTSEGSTLSGCDIELVGAGYRFSLIKKRFAAGKYLADN

SEQ ID NO: 1800 - protein, 629 aa, Homo sapiens
MMEGLKKRTRKAFGIRKKEKDTDSTGSPDRDGIKKSNGAPNGFYAEIDWERYNSPELDEEGYSIRPEEPGSTKGKHFYSSSESEEEEESHKKFNIKIKPLQSKDILKNAATVDELKASIGNIALSPSPVGAIKRNLSSEEVARPRRSTPTPELISKKPPDDTTALAPLFGPPLESAFDEQKTEVLLDQPEIWGSGQPINPSMESPKLTRPFPTGTPPPLPPKNVPATPPRTGSPLTIGPGASSPARPATPLVPCRSTTPPPPPPRPPSRPKLPPGKPGVGDVSRPFSPPIHSSSPPPIAPLARAESTSSISSTNSLSAATTPTVENEQPSLVWFDRGKFYLTFEGSSRGPSPLTMGAQDTLPVAAAFTETVNAYFKGADPSKCIVKITGEMVLSFPAGITRHFANNPSPAALTFRVINFSRLEHVLPNPQLLCCDNTQNDANTKEFWVNMPNLMTHLKKVSEQKPQATYYNVDMLKYQVSAQGIQSTPLNLAVNWRCEPSSTDLRIDYKYNTDAMTTAVALNNVQFLVPIDGGVTKLQAVLPPAVWNAEQQRILWKIPDISQKSENGGVGSLLARFQLSEGPSKPSPLVVQFTSEGSTLSGCDIELVGAGYRFSLIKKRFAAGKYLADN

SEQ ID NO: 1801 - protein, 631 aa, Homo sapiens
MMEGLKKRTRKAFGIRKKEKDTDSTGSPDRDGIKKSNGAPNGFYAEIDWERYNSPELDEEGYSIRPEEPGSTKGKHFYSSSESEEEEESHKKFNIKIKPLQSKDILKNAATVDELKASIGNIALSPSPVGAIKRNLSSEEVARPRRSTPTPELISKKPPDDTTALAPLFGPPLESAFDEQKTEVLLDQPEIWGSGQPINPSMESPKLTRPFPTGTPPPLPPKNVPATPPRTGSPLTIGPGASSPARPATPLVPCRSTTPPPPPPRPPSRPKLPPGKPGVGDVSRPFSPPIHSSSPPPIAPLARAESTSSISSTNSLSAATTPTVVSEDDVFYDKLPSFERRCETPAGSSRGPSPLTMGAQDTLPVAAAFTETVNAYFKGADPSKCIVKITGEMVLSFPAGITRHFANNPSPAALTFRVINFSRLEHVLPNPQLLCCDNTQNDANTKEFWVNMPNLMTHLKKVSEQKPQATYYNVDMLKYQVSAQGIQSTPLNLAVNWRCEPSSTDLRIDYKYNTDAMTTAVALNNVQFLVPIDGGVTKLQAVLPPAVWNAEQQRILWKIPDISQKSENGGVGSLLARFQLSEGPSKPSPLVVQFTSEGSTLSGCDIELVGAGYRFSLIKKRFAAGKYLADN

SEQ ID NO: 1802 - protein, 265 aa, Homo sapiens
MGQILGKIMMSHQPQPQEEQSPQRSTSGYPLQEVVDDEVSGPSAPGVDPSPPRRSLGWKRKRECLDESDDEPEKELAPEPEETWVAETLCGLKMKAKRRRVSLVLPEYYEAFNRLLEDPVIKRLLAWDKDLRVSDKYLLAMVIAYFSRAGLPSWQYQRIHFFLALYLANDMEEDDEAPKQNIFYFLYEETRSHIPLLRELWFQLCRYMNPRARKNCSQIALFRKYRFHFFCSMRCRAWVSLEELEEIQAYDPEHWVWARDRAHLS

SEQ ID NO: 1803 - protein, 402 aa, Homo sapiens
MDRTETRFRKRGQITGKITTSRQLHPQNEQSPQRSTSGYPLQEVVDDEVLGPSAPGVDPSPPCRSLGWKRKKEWSDESEEEPEKELAPEPEETWVVETLCGLKMKLKQQRVSPILPEHHKDFNSQLAPGVDPSPPHRSFCWKRKREWWDESEESLEEEPRKVLAPEPEEIWVAEMLCGLKMKLKRRRVLLVLPEHHEAFNRLLEDPVIKRFLAWDKDLRVSDKYLLAMVIVYFSRAGLPSWQYQRIHFFLALYLANDMEEDDEDSKQNIFHFLYGKTRSRIPLLRKRWFQLGRSMNPRARKNRSRIPLLRKRRFQLGRSMNPRARKYRSRIPLVRKRRFQLRRCMNPRARKNRSQIVLFQKLRFQFFCSMSGRAWVSPEELEEIQAYDPEHWVWARDRAHLS

SEQ ID NO: 1804 - protein, 237 aa, Homo sapiens
MASGQARPPFEEESPQPSTTVRSPEVVVDDEVPGPSAPWIDPSPQPQSLGLKRKSEWSDESEEELEEELELERAPEPEDTWVVETLCGLKMKLKRKRASSVLPEHHEAFNRLLGDPVVQKFLAWDKDLRVSDKYLLAMVIAYFSRAGLFSWQYQRIHFFLALYLASDMEEDNQAPKQDIFSFLYGKNYSQRPLFHKLRYQLLCSMRWRTWVSPEEMEEIQAYDPEHWVWARDRTLIS

SEQ ID NO: 1805 - protein, 555 aa, Homo sapiens
MAAAAWLQVLPVILLLLGAHPSPLSFFSAGPATVAAADRSKWHIPIPSGKNYFSFGKILFRNTTIFLKFDGEPCDLSLNITWYLKSADCYNEIYNFKAEEVELYLEKLKEKRGLSGKYQTSSKLFQNCSELFKTQTFSGDFMHRLPLLGEKQEAKENGTNLTFIGDKTAMHEPLQTWQDAPYIFIVHIGISSSKESSKENSLSNLFTMTVEVKGPYEYLTLEDYPLMIFFMVMCIVYVLFGVLWLAWSACYWRDLLRIQFWIGAVIFLGMLEKAVFYAEFQNIRYKGESVQGALILAELLSAVKRSLARTLVIIVSLGYGIVKPRLGVTLHKVVVAGALYLLFSGMEGVLRVTGAQTDLASLAFIPLAFLDTALCWWIFISLTQTMKLLKLRRNIVKLSLYRHFTNTLILAVAASIVFIIWTTMKFRIVTCQSDWRELWVDDAIWRLLFSMILFVIMVLWRPSANNQRFAFSPLSEEEEEDEQKEPMLKESFEGMKMRSTKQEPNGNSKVNKAQEDDLKWVEENVPSSVTDVALPALLDSDEERMITHFERSKME

SEQ ID NO: 1806 - protein, 181 aa, Homo sapiens
MAAAAWLQVLPVILLLLGAHPSPLSFFSAGPATVAAADRSKWHIPIPSGKNYFSFGKILFRNTTIFLKFDGEPCDLSLNITWYLKSADCYNEIYNFKAEEVELYLEKLKEKRGLSGKYQTSSKLFQNCSELFKTQTFSGDFMHRLPLLGEKQEAKENGTNLTFIGDKTIQMPFLKKHFLDC

SEQ ID NO: 1807 - protein, 494 aa, Homo sapiens
MAHSDTVVDGEPCDLSLNITWYLKSADCYNEIYNFKAEEVELYLEKLKEKRGLSGKYQTSSKLFQNCSELFKTQTFSGDFMHRLPLLGEKQEAKENGTNLTFIGDKTAMHEPLQTWQDAPYIFIVHIGISSSKESSKENSLSNLFTMTVEVKGPYEYLTLEDYPLMIFFMVMCIVYVLFGVLWLAWSACYWRDLLRIQFWIGAVIFLGMLEKAVFYAEFQNIRYKGESVQGALILAELLSAVKRSLARTLVIIVSLGYGIVKPRLGVTLHKVVVAGALYLLFSGMEGVLRVTGAQTDLASLAFIPLAFLDTALCWWIFISLTQTMKLLKLRRNIVKLSLYRHFTNTLILAVAASIVFIIWTTMKFRIVTCQSDWRELWVDDAIWRLLFSMILFVIMVLWRPSANNQRFAFSPLSEEEEEDEQKEPMLKESFEGMKMRSTKQEPNGNSKVNKAQEDDLKWVEENVPSSVTDVALPALLDSDEERMITHFERSKME

SEQ ID NO: 1808 - protein, 108 aa, Homo sapiens
MPLWVFFFVILTLSNSSHCSPPPPLTLRMRRYADAIFTNSYRKVLGQLSARKLLQDIMSRQQGESNQERGARARLGRQVDSMWAEQKQMELESILVALLQKHSRNSQG

SEQ ID NO: 1809 - protein, 107 aa, Homo sapiens
MPLWVFFFVILTLSNSSHCSPPPPLTLRMRRYADAIFTNSYRKVLGQLSARKLLQDIMSRQQGESNQERGARARLGRQVDSMWAEQKQMELESILVALLQKHRNSQG

SEQ ID NO: 1810 - protein, 163 aa, Homo sapiens
MPSIKLQSSDGEIFEVDVEIAKQSVTIKTMLEDLGMDDEGDDDPVPLPNVNAAILKKVIQWCTHHKDDPPPPEDDENKEKRTDDIPVWDQEFLKVDQGTLFELILAANYLDIKGLLDVTCKTVANMIKGKTPEEIRKTFNIKNDFTEEEEAQVRKENQWCEEK

SEQ ID NO: 1811 - protein, 160 aa, Homo sapiens
MPSIKLQSSDGEIFEVDVEIAKQSVTIKTMLEDLGMDDEGDDDPVPLPNVNAAILKKVIQWCTHHKDDPPPPEDDENKEKRTDDIPVWDQEFLKVDQGTLFELILAANYLDIKGLLDVTCKTVANMIKGKTPEEIRKTFNIKNDFTEEEEAQVGSTQFCL

SEQ ID NO: 1812 - protein, 836 aa, Homo sapiens
MIAELVSSALGLALYLNTLSADFCYDDSRAIKTNQDLLPETPWTHIFYNDFWGTLLTHSGSHKSYRPLCTLSFRLNHAIGGLNPWSYHLVNVLLHAAVTGLFTSFSKILLGDGYWTFMAGLMFASHPIHTEAVAGIVGRADVGASLFFLLSLLCYIKHCSTRGYSARTWGWFLGSGLCAGCSMLWKEQGVTVLAVSAVYDVFVFHRLKIKQILPTIYKRKNLSLFLSISLLIFWGSSLLGARLYWMGNKPPSFSNSDNPAADSDSLLTRTLTFFYLPTKNLWLLLCPDTLSFDWSMDAVPLLKTVCDWRNLHTVAFYTGLLLLAYYGLKSPSVDRECNGKTVTNGKQNANGHSCLSDVEYQNSETKSSFASKVENGIKNDVSQRTQLPSTENIVVLSLSLLIIPFVPATNLFFYVGFVIAERVLYIPSMGFCLLITVGARALYVKVQKRFLKSLIFYATATLIVFYGLKTAIRNGDWQNEEMLYRSGIKVNPAKAWGNLGNVLKSQSKISEAESAYRNALYYRSNMADMLYNLGLLLQENSRFAEALHYYKLAIGSRPTLASAYLNTGIILMNQGRTEEARRTFLKCSEIPDENLKDPHAHKSSVTSCLYNLGKLYHEQGHYEEALSVYKEAIQKMPRQFAPQSLYNMMGEAYMRLSKLPEAEHWYMESLRSKTDHIPAHLTYGKLLALTGRKSEAEKLFLKAIELDPTKGNCYMHYGQFLLEEARLIEAAEMAKKAAELDSTEFDVVFNAAHMLRQASLNEAAEKYYDLAARLRPNYPAALMNLGAILHLNGRLQKAEANYLRALQLKPDDVITQSNLRKLWNIMEKQGLKTSKT

SEQ ID NO: 1813 - protein, 424 aa, Homo sapiens
MAAGPISERNQDATVYVGGLDEKVSEPLLWELFLQAGPVVNTHMPKDRVTGQHQGYGFVEFLSEEDADYAIKIMNMIKLYGKPIRVNKASAHNKNLDVGANIFIGNLDPEIDEKLLYDTFSAFGVILQTPKIMRDPDTGNSKGYAFINFASFDASDAAIEAMNGQYLCNRPITVSYAFKKDSKGERHGSAAERLLAAQNPLSQADRPHQLFADAPPPPSAPNPVVSSLGSGLPPPGMPPPGSFPPPVPPPGALPPGIPPAMPPPPMPPGAAGHGPPSAGTPGAGHPGHGHSHPHPFPPGGMPHPGMSQMQLAHHGPHGLGHPHAGPPGSGGQPPPRPPPGMPHPGPPPMGMPPRGPPFGSPMGHPGPMPPHGMRGPPPLMPPHGYTGPPRPPPYGYQRGPLPPPRPTPRPPVPPRGPLRGPLPQ

SEQ ID NO: 1814 - protein, 333 aa, Homo sapiens
MVSKSRWKLLAMLALVLVVMVWYSISREDRYIELFYFPIPEKKEPCLQGEAESKASKLFGNYSRDQPIFLRLEDYFWVKTPSAYELPYGTKGSEDLLLRVLAITSSSIPKNIQSLRCRRCVVVGNGHRLRNSSLGDAINKYDVVIRLNNAPVAGYEGDVGSKTTMRLFYPESAHFDPKVENNPDTLLVLVAFKAMDFHWIETILSDKKRVRKGFWKQPPLIWDVNPKQIRILNPFFMEIAADKLLSLPMQQPRKIKQKPTTGLLAITLALHLCDLVHIAGFGYPDAYNKKQTIHYYEQITLKSMAGSGHNVSQEALAIKRMLEMGAIKNLTSF

SEQ ID NO: 1815 - protein, 332 aa, Homo sapiens
MCPAGWKLLAMLALVLVVMVWYSISREDRYIELFYFPIPEKKEPCLQGEAESKASKLFGNYSRDQPIFLRLEDYFWVKTPSAYELPYGTKGSEDLLLRVLAITSSSIPKNIQSLRCRRCVVVGNGHRLRNSSLGDAINKYDVVIRLNNAPVAGYEGDVGSKTTMRLFYPESAHFDPKVENNPDTLLVLVAFKAMDFHWIETILSDKKRVRKGFWKQPPLIWDVNPKQIRILNPFFMEIAADKLLSLPMQQPRKIKQKPTTGLLAITLALHLCDLVHIAGFGYPDAYNKKQTIHYYEQITLKSMAGSGHNVSQEALAIKRMLEMGAIKNLTSF

SEQ ID NO: 1816 - protein, 322 aa, Homo sapiens
MLALVLVVMVWYSISREDRYIELFYFPIPEKKEPCLQGEAESKASKLFGNYSRDQPIFLRLEDYFWVKTPSAYELPYGTKGSEDLLLRVLAITSSSIPKNIQSLRCRRCVVVGNGHRLRNSSLGDAINKYDVVIRLNNAPVAGYEGDVGSKTTMRLFYPESAHFDPKVENNPDTLLVLVAFKAMDFHWIETILSDKKRVRKGFWKQPPLIWDVNPKQIRILNPFFMEIAADKLLSLPMQQPRKIKQKPTTGLLAITLALHLCDLVHIAGFGYPDAYNKKQTIHYYEQITLKSMAGSGHNVSQEALAIKRMLEMGAIKNLTSF

SEQ ID NO: 1817 - protein, 339 aa, Homo sapiens
MVSKSRWKLLAMLALVLVVMVWYSISREDRYIELFYFPIPEKKEPCLQGEAESKASKLFGKLSPLCSYSRDQPIFLRLEDYFWVKTPSAYELPYGTKGSEDLLLRVLAITSSSIPKNIQSLRCRRCVVVGNGHRLRNSSLGDAINKYDVVIRLNNAPVAGYEGDVGSKTTMRLFYPESAHFDPKVENNPDTLLVLVAFKAMDFHWIETILSDKKRVRKGFWKQPPLIWDVNPKQIRILNPFFMEIAADKLLSLPMQQPRKIKQKPTTGLLAITLALHLCDLVHIAGFGYPDAYNKKQTIHYYEQITLKSMAGSGHNVSQEALAIKRMLEMGAIKNLTSF

SEQ ID NO: 1818 - protein, 329 aa, Homo sapiens
MVSKSRWKLLAMLALVLVVMVWYSISREDSFYFPIPEKKEPCLQGEAESKASKLFGNYSRDQPIFLRLEDYFWVKTPSAYELPYGTKGSEDLLLRVLAITSSSIPKNIQSLRCRRCVVVGNGHRLRNSSLGDAINKYDVVIRLNNAPVAGYEGDVGSKTTMRLFYPESAHFDPKVENNPDTLLVLVAFKAMDFHWIETILSDKKRVRKGFWKQPPLIWDVNPKQIRILNPFFMEIAADKLLSLPMQQPRKIKQKPTTGLLAITLALHLCDLVHIAGFGYPDAYNKKQTIHYYEQITLKSMAGSGHNVSQEALAIKRMLEMGAIKNLTSF

SEQ ID NO: 1819 - protein, 328 aa, Homo sapiens
MCPAGWKLLAMLALVLVVMVWYSISREDSFYFPIPEKKEPCLQGEAESKASKLFGNYSRDQPIFLRLEDYFWVKTPSAYELPYGTKGSEDLLLRVLAITSSSIPKNIQSLRCRRCVVVGNGHRLRNSSLGDAINKYDVVIRLNNAPVAGYEGDVGSKTTMRLFYPESAHFDPKVENNPDTLLVLVAFKAMDFHWIETILSDKKRVRKGFWKQPPLIWDVNPKQIRILNPFFMEIAADKLLSLPMQQPRKIKQKPTTGLLAITLALHLCDLVHIAGFGYPDAYNKKQTIHYYEQITLKSMAGSGHNVSQEALAIKRMLEMGAIKNLTSF

SEQ ID NO: 1820 - protein, 318 aa, Homo sapiens
MLALVLVVMVWYSISREDSFYFPIPEKKEPCLQGEAESKASKLFGNYSRDQPIFLRLEDYFWVKTPSAYELPYGTKGSEDLLLRVLAITSSSIPKNIQSLRCRRCVVVGNGHRLRNSSLGDAINKYDVVIRLNNAPVAGYEGDVGSKTTMRLFYPESAHFDPKVENNPDTLLVLVAFKAMDFHWIETILSDKKRVRKGFWKQPPLIWDVNPKQIRILNPFFMEIAADKLLSLPMQQPRKIKQKPTTGLLAITLALHLCDLVHIAGFGYPDAYNKKQTIHYYEQITLKSMAGSGHNVSQEALAIKRMLEMGAIKNLTSF

SEQ ID NO: 1821 - protein, 217 aa, Homo sapiens
MAAGSRTSLLLAFGLLCLSWLQEGSAFPTIPLSRLFDNAMLRARRLYQLAYDTYQEFEEAYILKEQKYSFLQNPQTSLCFSESIPTPSNRVKTQQKSNLELLRISLLLIQSWLEPVQLLRSVFANSLVYGASDSNVYRHLKDLEEGIQTLMWRLEDGSPRTGQIFNQSYSKFDTKSHNDDALLKNYGLLYCFRKDMDKVETFLRIVQCRSVEGSCGF

SEQ ID NO: 1822 - protein, 256 aa, Homo sapiens
MAAGSRTSLLLAFGLLCLSWLQEGSAFPTIPLSRLFDNAMLRARRLYQLAYDTYQEFEEAYILKEQKYSFLQNPQTSLCFSESIPTPSNRVKTQQKSNLELLRISLLLIQSWLEPVQLLRSVFANSLVYGASDSNVYRHLKDLEEGIQTLMWVRVAPGIPNPGAPLASRDWGEKHCCPLFSSQALTQENSPYSSFPLVNPPGLSLQPGGEGGKWMNERGREQCPSAWPLLLFLHFAEAGRWQPPDWADLQSVLQQV

SEQ ID NO: 1823 - protein, 202 aa, Homo sapiens
MAAGSRTSLLLAFGLLCLSWLQEGSAFPTIPLSRLFDNAMLRARRLYQLAYDTYQEFNPQTSLCFSESIPTPSNRVKTQQKSNLELLRISLLLIQSWLEPVQLLRSVFANSLVYGASDSNVYRHLKDLEEGIQTLMWRLEDGSPRTGQIFNQSYSKFDTKSHNDDALLKNYGLLYCFRKDMDKVETFLRIVQCRSVEGSCGF

SEQ ID NO: 1824 - protein, 245 aa, Homo sapiens
MAAGSRTSLLLAFGLLCLSWLQEGSAFPTIPLSRLFDNAMLRARRLYQLAYDTYQEFEEAYILKEQKYSFLQNPQTSLCFSESIPTPSNRVKTQQKSNLELLRISLLLIQSWLEPVQLLRSVFANSLVYGASDSNVYRHLKDLEEGIQTLIGWKMAAPGLGRSSISPTASLTQNRTTMTHCSRTTGCSTASGRTWTRSRHSCASCSAALWRAAVASSCPGGIPVTPPQCLSWSWKVLLQCPPALS

SEQ ID NO: 1825 - protein, 645 aa, Homo sapiens
MERQSRVMSEKDEYQFQHQGAVELLVFNFLLILTILTIWLFKNHRFRFLHETGGAMVYGLIMGLILRYATAPTDIESGTVYDCVKLTFSPSTLLVNITDQVYEYKYKREISQHNINPHQGNAILEKMTFDPEIFFNVLLPPIIFHAGYSLKKRHFFQNLGSILTYAFLGTAISCIVIGLIMYGFVKAMIHAGQLKNGDFHFTDCLFFGSLMSATDPVTVLAIFHELHVDPDLYTLLFGESVLNDAVAIVLTYSISIYSPKENPNAFDAAAFFQSVGNFLGIFAGSFAMGSAYAIITALLTKFTKLCEFPMLETGLFFLLSWSAFLSAEAAGLTGIVAVLFCGVTQAHYTYNNLSSDSKIRTKQLFEFMNFLAENVIFCYMGLALFTFQNHIFNALFILGAFLAIFVARACNIYPLSFLLNLGRKQKIPWNFQHMMMFSGLRGAIAFALAIRNTESQPKQMMFTTTLLLVFFTVWVFGGGTTPMLTWLQIRVGVDLDENLKEDPSSQHQEANNLDKNMTKAESARLFRMWYSFDHKYLKPILTHSGPPLTTTLPEWCGPISRLLTSPQAYGEQLKEDDVECIVNQDELAINYQEQASSPCSPPARLGLDQKASPQTPGKENIYEGDLGLGGYELKLEQTLGQSQLN

SEQ ID NO: 1826 - protein, 696 aa, Homo sapiens
MEASVILPILKKKLAFLSGGKDRRSGLILTIPLCLEQTNMDELSVTLDYLLSIPSEKCKARGFTVIVDGRKSQWNVVKTVVVMLQNVVPAEVSLVCVVKPDEFWDKKVTHFCFWKEKDRLGFEVILVSANKLTRYIEPCQLTEDFGGSLTYDHMDWLNKRLVFEKFTKESTSLLDELALINNGSDKGNQQEKERSVDLNFLPSVDPETVLQTGHELLSELQQRRFNGSDGGVSWSPMDDELLAQPQVMKLLDSLREQYTRYQEVCRQRSKRTQLEEIQQKVMQVVNWLEGPGSEQLRAQWGIGDSIRASQALQQKHEEIESQHSEWFAVYVELNQQIAALLNAGDEEDLVELKSLQQQLSDVCYRQASQLEFRQNLLQAALEFHGVAQDLSQQLDGLLGMLCVDVAPADGASIQQTLKLLEEKLKSVDVGLQGLREKGQGLLDQISNQASWAYGKDVTIENKENVDHIQGVMEDMQLRKQRCEDMVDVRRLKMLQMVQLFKCEEDAAQAVEWLSELLDALLKTHIRLGDDAQETKVLLEKHRKFVDVAQSTYDYGRQLLQATVVLCQSLRCTSRSSGDTLPRLNRVWKQFTIASEERVHRLEMAIAFHSNAEKILQDCPEEPEAINDEEQFDEIEAVGKSLLDRLTVPVVYPDGTEQYFGSPSDMASTAENIRDRMKLVNLKRQQLRHPEMVTTES

SEQ ID NO: 1827 - protein, 515 aa, Homo sapiens
MHTTESKNEHLEDENFQTSTTPQSLIDPNNTAQEETKTVLSDTEEIKPQTKKETYISCPLRGVLNVIITNGVILFVIWCMTWSILGSEALPGGNLFGLFIIFYSAIIGGKILQLIRIPLVPPLPPLLGMLLAGFTIRNVPFINEHVHVPNTWSSILRSIALTIILIRAGLGLDPQALRHLKVVCFRLAVGPCLMEASAAAVFSHFIMKFPWQWAFLLGFVLGAVSPAVVVPYMMVLQENGYGVEEGIPTLLMAASSMDDILAITGFNTCLSIVFSSGGILNNAIASIRNVCISLLAGIVLGFFVRYFPSEDQKKLTLKRGFLVLTMCVSAVLGSQRIGLHGSGGLCTLVLSFIAGTKWSQEKMKVQKIITTVWDIFQPLLFGLVGAEVSVSSLESNIVGISVATLSLALCVRILTTYLLMCFAGFSFKEKIFIALAWMPKATVQAVLGPLALETARVSAPHLEPYAKDVMTVAFLAILITAPNGALLMGILGPKMLTRHYDPSKIKLQLSTLEHH

SEQ ID NO: 1828 - protein, 243 aa, Homo sapiens
MMVLQENGYGVEEGIPTLLMAASSMDDILAITGFNTCLSIVFSSGGILNNAIASIRNVCISLLAGIVLGFFVRYFPSEDQKKLTLKRGFLVLTMCVSAVLGSQRIGLHGSGGLCTLVLSFIAGTKWSQEKMKVQKIITTVWDIFQPLLFGLVGAEVSVSSLESNIVGISVATLSLALCVRILTTYLLMCFAGFSFKEKIFIALAWMPKATVQINQAILLLFLLREEWTNCKVAKKCEYTKERQ

SEQ ID NO: 1829 - protein, 475 aa, Homo sapiens
MHTTESKNEHLEDENFQTSTTPQSLIDPNNTAQEETKTVLSDTEEIKPQTKKETYISCPLRGVLNVIITNGVILFVIWCMTWSILGSEALPGGNLFGLFIIFYSAIIGGKILQLIRIPLVPPLPPLLGMLLAGFTIRNVPFINEHVHVPNTWSSILRSIALTIILIRAGLGLDPQALRHLKVVCFRLAVGPCLMEASAAAVFSHFIMKFPWQWAFLLGFVLGAVSPAVVVPYMMVLQENGYGVEEGIPTLLMAASSMDDILAITGFNTCLSIVFSSGGILNNAIASIRNVCISLLAGIVLGFFVRYFPSEDQKKLTLKRGFLVLTMCVSAVLGSQRIGLHGSGGLCTLVLSFIAGTKWSQEKMKVQKIITTVWDIFQPLLFGLVGAEVSVSSLESNIVGISVATLSLALCVRILTTYLLMCFAGFSFKEKIFIALAWMPKATVQINQAILLLFLLREEWTNCKVAKKCEYTKERQ

SEQ ID NO: 1830 - protein, 73 aa, Homo sapiens
MHTTESKNEHLEDENFQTSTTPQSLIDPNNTAQEETKTVLSDTEEIKPQTKKETYISCPLRGVLNVIITNVLF

SEQ ID NO: 1831 - protein, 492 aa, Homo sapiens
MRLAAAANEAYTAPLAVSGLLGCKQCGGGRDQDEELGIRIPRPLGQGPSRFIPEKEILQVGSEDAQMHALFADSFAALGRLDNITLVMVFHPQYLESFLKTQHYLLQMDGPLPLHYRHYIGIMAAARHQCSYLVNLHVNDFLHVGGDPKWLNGLENAPQKLQNLGELNKVLAHRPWLITKEHIEGLLKAEEHSWSLAELVHAVVLLTHYHSLASFTFGCGISPEIHCDGGHTFRPPSVSNYCICDITNGNHSVDEMPVNSAENVSVSDSFFEVEALMEKMRQLQECRDEEEASQEEMASRFEIEKRESMFVFSSDDEEVTPARAVSRHFEDTSYGYKDFSRHGMHVPTFRVQDYCWEDHGYSLVNRLYPDVGQLIDEKFHIAYNLTYNTMAMHKDVDTSMLRRAIWNYIHCMFGIRYDDYDYGEINQLLDRSFKVYIKTVVCTPEKVTKRMYDSFWRQFKHSEKVHVNLLLIEARMQAELLYALRAITRYMT

SEQ ID NO: 1832 - protein, 551 aa, Homo sapiens
MAEGENEVRWDGLCSRDSTTRETALENIRQTILRKTEYLRSVKETPHRPSDGLSNTESSDGLNKLLAHLLMLSKRCPFKDVREKSEFILKSIQELGIRIPRPLGQGPSRFIPEKEILQVGSEDAQMHALFADSFAALGRLDNITLVMVFHPQYLESFLKTQHYLLQMDGPLPLHYRHYIGIMAAARHQCSYLVNLHVNDFLHVGGDPKWLNGLENAPQKLQNLGELNKVLAHRPWLITKEHIEGLLKAEEHSWSLAELVHAVVLLTHYHSLASFTFGCGISPEIHCDGGHTFRPPSVSNYCICDITNGNHSVDEMPVNSAENVSVSDSFFEVEALMEKMRQLQECRDEEEASQEEMASRFEIEKRESMFVFSSDDEEVTPARAVSRHFEDTSYGYKDFSRHGMHVPTFRVQDYCWEDHGYSLVNRLYPDVGQLIDEKFHIAYNLTYNTMAMHKDVDTSMLRRAIWNYIHCMFGIRYDDYDYGEINQLLDRSFKVYIKTVVCTPEKVTKRMYDSFWRQFKHSEKVHVNLLLIEARMQAELLYALRAITRYMT

SEQ ID NO: 1833 - protein, 426 aa, Homo sapiens
MHALFADSFAALGRLDNITLVMVFHPQYLESFLKTQHYLLQMDGPLPLHYRHYIGIMAAARHQCSYLVNLHVNDFLHVGGDPKWLNGLENAPQKLQNLGELNKVLAHRPWLITKEHIEGLLKAEEHSWSLAELVHAVVLLTHYHSLASFTFGCGISPEIHCDGGHTFRPPSVSNYCICDITNGNHSVDEMPVNSAENVSVSDSFFEVEALMEKMRQLQECRDEEEASQEEMASRFEIEKRESMFVFSSDDEEVTPARAVSRHFEDTSYGYKDFSRHGMHVPTFRVQDYCWEDHGYSLVNRLYPDVGQLIDEKFHIAYNLTYNTMAMHKDVDTSMLRRAIWNYIHCMFGIRYDDYDYGEINQLLDRSFKVYIKTVVCTPEKVTKRMYDSFWRQFKHSEKVHVNLLLIEARMQAELLYALRAITRYMT

SEQ ID NO: 1834 - protein, 424 aa, Homo sapiens
MPPFLITLFLFHSCCLRANGHLREGMTLLKTEFALHLYQSVAACRNETNFVISPAGVSLPLEILQFGAEGSTGQQLADALGYTVHDKRVKDFLHAVYATLPTSSQGTEMELACSLFVQVGTPLSPCFVEHVSWWANSSLEPADLSEPNSTAIQTSEGASRETAGGGPSEGPGGWPWEQVSAAFAQLVLVSTMSFQGTWRKRFSSTDTQILPFTCAYGLVLQVPMMHQTTEVNYGQFQDTAGHQVGVLELPYLGSAVSLFLVLPRDKDTPLSHIEPHLTASTIHLWTTSLRRARMDVFLPRFRIQNQFNLKSILNSWGVTDLFDPLKANLKGISGQDGFYVSEAIHKAKIEVLEEGTKASGATALLLLKRSRIPIFKADRPFIYFLREPNTGITVFFDRIQIIYQCLSSNKGSFVHYPLKNKHSF

SEQ ID NO: 1835 - protein, 404 aa, Homo sapiens
MPPFLITLFLFHSCCLRANGHLREGMTLLKTEFALHLYQSVAACRNETNFVISPAGVSLPLEILQFGAEGSTGQQLADALGYTVHDKRVKDFLHAVYATLPTSSQGTEMELACSLFVQVGTPLSPCFVEHVSWWANSSLEPADLSEPNSTAIQTSEGASRETAGGGPSEGPGGWPWEQVSAAFAQLVLVSTMSFQGTWRKRFSSTDTQILPFTCAYGLVLQVPMMHQTTEVNYGQFQDTAGHQVGVLELPYLGSAVSLFLVLPRDKDTPLSHIEPHLTASTIHLWTTSLRRARMDVFLPRFRIQNQFNLKSILNSWGVTDLFDPLKANLKGISGQDGFYVSEAIHKAKIEVLEEGTKASGATALLLLKRSRIPIFKADRPFIYFLREPNTGFVFSIGRVSNPLD

SEQ ID NO: 1836 - protein, 537 aa, Homo sapiens
MGDEDKRITYEDSEPSTGMNYTPSMHQEAQEETVMKLKGIDANEPTEGSILLKSSEKKLQETPTEANHVQRLRQMLACPPHGLLDRVITNVTIIVLLWAVVWSITGSECLPGGNLFGIIILFYCAIIGGKLLGLIKLPTLPPLPSLLGMLLAGFLIRNIPVINDNVQIKHKWSSSLRSIALSIILVRAGLGLDSKALKKLKGVCVRLSMGPCIVEACTSALLAHYLLGLPWQWGFILGFVLGAVSPAVVVPSMLLLQGGGYGVEKGVPTLLMAAGSFDDILAITGFNTCLGIAFSTGSTVFNVLRGVLEVVIGVATGSVLGFFIQYFPSRDQDKLVCKRTFLVLGLSVLAVFSSVHFGFPGSGGLCTLVMAFLAGMGWTSEKAEVEKIIAVAWDIFQPLLFGLIGAEVSIASLRPETVGLCVATVGIAVLIRILTTFLMVCFAGFNLKEKIFISFAWLPKATVQAAIGSVALDTARSHGEKQLEDYGMDVLTVAFLSILITAPIGSLLIGLLGPRLLQKVEHQNKDEEVQGETSVQV

SEQ ID NO: 1837 - protein, 454 aa, Homo sapiens
MGDEDKRITYEDSEPSTGMNYTPSMHQEAQEETVMKLKGIDANEPTEGSILLKSSEKKLQETPTEANHVQRLRQMLACPPHGLLDRVITNVTIIVLLWAVVWSITGSECLPGGNLFGIIILFYCAIIGGKLLGLIKLPTLPPLPSLLGMLLAGFLIRNIPVINDNVQIKHKWSSSLRSIALSIILVRAGLGLDSKALKKLKGVCVRLSMGPCIVEACTSALLAHYLLGLPWQWGFILGFVLGAVSPAVVVPSMLLLQGGGYGVEKGVPTLLMAAGSFDDILAITGFNTCLGIAFSTGSTVFNVLRGVLEVVIGVATGSVLGFFIQYFPSRDQDKLVCKRTFLVLGLSVLAVFSSVHFGFPGSGGLCTLVMAFLAGMGWTSEKAEVEKIIAVAWDIFQPLLFGLIGAEVSIASLRPETVGSADSITGNFGTERPKLLGPPSTQLRFHFFHIQLST

SEQ ID NO: 1838 - protein, 259 aa, Homo sapiens
MKLNERSVAHYALSDSPADHMGFLRTWGGPGTPPTPSGTGRRCWFVLKGNLLFSFESREGRAPLSLVVLEGCTVELAEAPVPEEFAFAICFDAPGVRPHLLAAEGPAAQEAWVKVLSRASFGYMRLVVRELESQLQDARQSLALQRRSSWKSVASRCKPQAPNHRAAGLENGHCLSKDSSPVGLVEEAGSRSAGWGLAEWELQGPASLLLGKGQSPVSPETSCFSTLHDWYGQEIVELRQCWQKRAQGSHSKCEEQDRP

SEQ ID NO: 1839 - protein, 1177 aa, Homo sapiens
MAGIFKEFFFSTEDLPEVILTLSLISSIGAFLNRHLEDFPIPVPVILFLLGCSFEVLSFTSSQVQRYANAIQWMSPDLFFRIFTPVVFFTTAFDMDTYMLQKLFWQILLISIPGFLVNYILVLWHLASVNQLLLKPTQWLLFSAILVSSDPMLTAAAIRDLGLSRSLISLINGESLMTSVISLITFTSIMDFDQRLQSKRNHTLAEEIVGGICSYIIASFLFGILSSKLIQFWMSTVFGDDVNHISLIFSILYLIFYICELVGMSGIFTLAIVGLLLNSTSFKAAIEETLLLEFWTFLSRIAFLMVFTFFGLLIPAHTYLYIEFVDIYYSLNIYLTLIVLRFLTLLLISPVLSRVGHEFSWRWIFIMVCSEMKGMPNINMALLLAYSDLYFGSDKEKSQILFHGVLVCLITLVVNRFILPVAVTILGLRDATSTKYKSVCCTFQHFQELTKSAASALKFDKDLANADWNMIEKAITLENPYMLNEEETTEHQKVKCPHCNKEIDEIFNTEAMELANRRLLSAQIASYQRQYRNEILSQSAVQVLVGAAESFGEKKGKCMSLDTIKNYSESQKTVTFARKLLLNWVYNTRKEKEGPSKYFFFRICHTIVFTEEFEHVGYLVILMNIFPFIISWISQLNVIYHSELKHTNYCFLTLYILEALLKIAAMRKDFFSHAWNIFELAITLIGILHVILIEIDTIKYIFNETEVIVFIKVVQFFRILRIFKLIAPKLLQIIDKRMSHQKTFWYGILKGYVQGEADIMTIIDQITSSKQIKQMLLKQVIRNMEHAIKELGYLEYDHPEIAVTVKTKEEINVMLNMATEILKAFGLKGIISKTEGAGINKLIMAKKKEVLDSQSIIRPLTVEEVLYHIPWLDKNKDYINFIQEKAKVVTFDCGNDIFEEGDEPKGIYIIISGMVKLEKSKPGLGIDQMVESKEKDFPIIDTDYMLSGEIIGEINCLTNEPMKYSATCKTVVETCFIPKTHLYDAFEQCSPLIKQKMWLKLGLAITARKIREHLSYEDWNYNMQLKLSNIYVVDIPMSTKTDIYDENLIYVILIHGAVEDCLLRKTYRAPFLIPITCHQIQSIEDFTKVVIIQTPINMKTFRRNIRKFVPKHKSYLTPGLIGSVGTLEEGIQEERNVKEDGAHSAATARSPQPCSLLGTKFNCKESPRINLRKVRKE

SEQ ID NO: 1840 - protein, 1129 aa, Homo sapiens
MAGIFKEFFFSTEDLPEVILTLSLISSIGAFLNRHLEDFPIPVPVILFLLGCSFEVLSFTSSQVQRYANAIQWMSPDLFFRIFTPVVFFTTAFDMDTYMLQKLFWQILLISIPGFLVNYILVLWHLASVNQLLLKPTQWLLFSAILVSSDPMLTAAAIRDLGLSRSLISLINGESLMTSVISLITFTSIMDFDQRLQSKRNHTLAEEIVGGICSYIIASFLFGILSSKLIQFWMSTVFGDDVNHISLIFSILYLIFYICELVGMSGIFTLAIVGLLLNSTSFKAAIEETLLLEFLTLLLISPVLSRVGHEFSWRWIFIMVCSEMKGMPNINMALLLAYSDLYFGSDKEKSQILFHGVLVCLITLVVNRFILPVAVTILGLRDATSTKYKSVCCTFQHFQELTKSAASALKFDKDLANADWNMIEKAITLENPYMLNEEETTEHQKVKCPHCNKEIDEIFNTEAMELANRRLLSAQIASYQRQYRNEILSQSAVQVLVGAAESFGEKKGKCMSLDTIKNYSESQKTVTFARKLLLNWVYNTRKEKEGPSKYFFFRICHTIVFTEEFEHVGYLVILMNIFPFIISWISQLNVIYHSELKHTNYCFLTLYILEALLKIAAMRKDFFSHAWNIFELAITLIGILHVILIEIDTIKYIFNETEVIVFIKVVQFFRILRIFKLIAPKLLQIIDKRMSHQKTFWYGILKGYVQGEADIMTIIDQITSSKQIKQMLLKQVIRNMEHAIKELGYLEYDHPEIAVTVKTKEEINVMLNMATEILKAFGLKGIISKTEGAGINKLIMAKKKEVLDSQSIIRPLTVEEVLYHIPWLDKNKDYINFIQEKAKVVTFDCGNDIFEEGDEPKGIYIIISGMVKLEKSKPGLGIDQMVESKEKDFPIIDTDYMLSGEIIGEINCLTNEPMKYSATCKTVVETCFIPKTHLYDAFEQCSPLIKQKMWLKLGLAITARKIREHLSYEDWNYNMQLKLSNIYVVDIPMSTKTDIYDENLIYVILIHGAVEDCLLRKTYRAPFLIPITCHQIQSIEDFTKVVIIQTPINMKTFRRNIRKFVPKHKSYLTPGLIGSVGTLEEGIQEERNVKEDGAHSAATARSPQPCSLLGTKFNCKESPRINLRKVRKE

SEQ ID NO: 1841 - protein, 1444 aa, Homo sapiens
MTDTSVLDQWKASFFVEDFLEKKTITRMVTQINCEFEEVVPSSNPDSQIEVEEVSLYTHMDYNEVFTPVSCLEKCSALQNQNQDLFIDDKGILFVSSRKHLPTLPTLLSRLKLFLVKDPLLDFKGQIFTEANFSRECFSLQETLEAFVKEDFCMDKVNFCQEKLEDTICLNEPSSFLIEYEFLIPPSLKPEIDIPSLSELKELLNPVPEIINYVDEKEKLFERDLTNKHGIEDIGDIKFSSTEILTIQSQSEPEECSKPGELEMPLTPLFLTCQHSSVNSLRTELQTFPLSPVCKINLLTAEESANEYYMMWQLERCRSPLNPFLLTVPRIQEPHSQYSVTDLKKIFSVKEESLVINLEKAEWWKQAGLNLKMMETLEHLNTYLCHDNLSSNDTKIEIFLPTKVLQLESCLEHKSHSSPIALIDEKSTNAHLSLPQKSPSLAKEVPDLCFSDDYFSDKGAAKEEKPKNDQEPVNRIIQKKENNDHFELDCTGPSIKSPSSSIIKKASFEHGKKQENDLDLLSDFIMLRNKYKTCTSKTEVTNSDEKHDKEACSLTLQEESPIVHINKTLEEINQERGTDSVIEIQASDSQCQAFCLLEAAASPILKNLVSLCTLPTANWKFATVIFDQTRFLLKEQEKVVSDAVRQGTIDEREMTFKHAALLHLLVTIRDVLLTCSLDTALGYLSKAKDIYNSILGPYLGDIWRQLEIVQFIRGKKPETNYKIQELQCQILSWMQSQQQIKVLIIIRMDSDGEKHFLIKILNKIEGLTLTVLHSNERKDFLESEGVLRGTSSCVVVHNQYIGADFPWSNFSFVVEYNYVEDSCWTKHCKELNIPYMAFKVILPDTVLERSTLLDRFGGFLLEIQIPYVFFASEGLLNTPDILQLLESNYNISLVERGCSESLKLFGSSECYVVVTIDEHTAIILQDLEELNYEKASDNIIMRLMALSLQYRYCWIILYTKETLNSEYLLTEKTLHHLALIYAALVSFGLNSEELDVKLIIAPGVEATALIIRQIADHSLMTSKRDPHEWLDKSWLKVSPSEEEMYLLDFPCINPLVAQLMLNKGPSLHWILLATLCQLQELLPEVPEKVLKHFCSITSLFKIGSSSITKSPQISSPQENRNQISTLSSQSSASDLDSVIQEHNEYYQYLGLGETVQEDKTTILNDNSSIMELKEISSFLPPVTSYNQTSYWKDSSCKSNIGQNTPFLINIESRRPAYNSFLNHSDSESDVFSLGLTQMNCETIKSPTDTQKRVSVVPRFINSQKRRTHEAKGFINKDVSDPIFSLEGTQSPLHWNFKKNIWEQENHPFNLQYGAQQTACNKLYSQKGNLFTDQQKCLSDESEGLTCESSKDETFWRELPSVPSLDLFRASDSNANQKEFNSLYFYQRAGKSLGQKRHHESSFNSGDKESLTGFMCSQLPQFKKRRLAYEKVPGRVDGQTRLRFF

SEQ ID NO: 1842 - protein, 488 aa, Homo sapiens
MFSALKYHAIDYLYENVVRKKFYRDALLLRIPSCLYQDESYHVAVTDNKFRRPWTRVSAVSVPGMTDTSVLDQWKASFFVEDFLEKKTITRMVTQINCEFEEVVPSSNPDSQIEVEEVSLYTHMDYNEVFTPVSCLEKCSALQNQNQDLFIDDKGILFVSSRKHLPTLPTLLSRLKLFLVKDPLLDFKGQIFTEANFSRECFSLQETLEAFVKEDFCMDKVNFCQEKLEDTICLNEPSSFLIEYEFLIPPSLKPEIDIPSLSELKELLNPVPEIINYVDEKEKLFERDLTNKHGIEDIGDIKFSSTEILTIQSQSEPEECSKPGELEMPLTPLFLTCQHSSVNSLRTELQTFPLSPVCKINLLTAEESANEYYMMWQLERCRSPLNPFLLTVPRIQEPHSQYSVTDLKKIFSVKEESLVINLEKAEWWKQAGLNLKMMETLEHLNTYLCHDNLSSNDTKIEIFLPTKVLQLECKYITVNISYVNIFRM

SEQ ID NO: 1843 - protein, 1405 aa, Homo sapiens
MSETLGDELEILRGKMMQRRPRSAEVKYFYFFKILLRLRLAILKYLFIDDKGILFVSSRKHLPTLPTLLSRLKLFLVKDPLLDFKGQIFTEANFSRECFSLQETLEAFVKEDFCMDKVNFCQEKLEDTICLNEPSSFLIEYEFLIPPSLKPEIDIPSLSELKELLNPVPEIINYVDEKEKLFERDLTNKHGIEDIGDIKFSSTEILTIQSQSEPEECSKPGELEMPLTPLFLTCQHSSVNSLRTELQTFPLSPVCKINLLTAEESANEYYMMWQLERCRSPLNPFLLTVPRIQEPHSQYSVTDLKKIFSVKEESLVINLEKAEWWKQAGLNLKMMETLEHLNTYLCHDNLSSNDTKIEIFLPTKVLQLESCLEHKSHSSPIALIDEKSTNAHLSLPQKSPSLAKEVPDLCFSDDYFSDKGAAKEEKPKNDQEPVNRIIQKKENNDHFELDCTGPSIKSPSSSIIKKASFEHGKKQENDLDLLSDFIMLRNKYKTCTSKTEVTNSDEKHDKEACSLTLQEESPIVHINKTLEEINQERGTDSVIEIQASDSQCQAFCLLEAAASPILKNLVSLCTLPTANWKFATVIFDQTRFLLKEQEKVVSDAVRQGTIDEREMTFKHAALLHLLVTIRDVLLTCSLDTALGYLSKAKDIYNSILGPYLGDIWRQLEIVQFIRGKKPETNYKIQELQCQILSWMQSQQQIKVLIIIRMDSDGEKHFLIKILNKIEGLTLTVLHSNERKDFLESEGVLRGTSSCVVVHNQYIGADFPWSNFSFVVEYNYVEDSCWTKHCKELNIPYMAFKVILPDTVLERSTLLDRFGGFLLEIQIPYVFFASEGLLNTPDILQLLESNYNISLVERGCSESLKLFGSSECYVVVTIDEHTAIILQDLEELNYEKASDNIIMRLMALSLQYRYCWIILYTKETLNSEYLLTEKTLHHLALIYAALVSFGLNSEELDVKLIIAPGVEATALIIRQIADHSLMTSKRDPHEWLDKSWLKVSPSEEEMYLLDFPCINPLVAQLMLNKGPSLHWILLATLCQLQELLPEVPEKVLKHFCSITSLFKIGSSSITKSPQISSPQENRNQISTLSSQSSASDLDSVIQEHNEYYQYLGLGETVQEDKTTILNDNSSIMELKEISSFLPPVTSYNQTSYWKDSSCKSNIGQNTPFLINIESRRPAYNSFLNHSDSESDVFSLGLTQMNCETIKSPTDTQKRVSVVPRFINSQKRRTHEAKGFINKDVSDPIFSLEGTQSPLHWNFKKNIWEQENHPFNLQYGAQQTACNKLYSQKGNLFTDQQKCLSDESEGLTCESSKDETFWRELPSVPSLDLFRASDSNANQKEFNSLYFYQRAGKSLGQKRHHESSFNSGDKESLTGFMCSQLPQFKKRRLAYEKVPGRVDGQTRLRFF

SEQ ID NO: 1844 - protein, 1707 aa, Homo sapiens
MDQEGGGDGQKAPSFQWRNYKLIVDPALDPALRRPSQKVYRYDGVHFSVNDSKYIPVEDLQDPRCHVRSKNRDFSLPVPKFKLDEFYIGQIPLKEVTFARLNDNVRETFLKDMCRKYGEVEEVEILLHPRTRKHLGLARVLFTSTRGAKETVKNLHLTSVMGNIIHAQLDIKGQQRMKYYELIVNGSYTPQTVPTGGKALSEKFQGSGAATETAESRRRSSSDTAAYPAGTTAVGTPGNGTPCSQDTSFSSSRQDTPSSFGQFTPQSSQGTPYTSRGSTPYSQDSAYSSSTTSTSFKPRRSENSYQDAFSRRHFSASSASTTASTAIAATTAATASSSASSSSLSSSSSSSSSSSSSQFRSSDANYPAYYESWNRYQRHTSYPPRRATREEPPGAPFAENTAERFPPSYTSYLPPEPSRPTDQDYRPPASEAPPPEPPEPGGGGGGGGPSPEREEVRTSPRPASPARSGSPAPETTNESVPFAQHSSLDSRIEMLLKEQRSKFSFLASDTEEEEENSSMVLGARDTGSEVPSGSGHGPCTPPPAPANFEDVAPTGSGEPGATRESPKANGQNQASPCSSGDDMEISDDDRGGSPPPAPTPPQQPPPPPPPPPPPPPYLASLPLGYPPHQPAYLLPPRPDGPPPPEYPPPPPPPPHIYDFVNSLELMDRLGAQWGGMPMSFQMQTQMLTRLHQLRQGKGLIAASAGPPGGAFGEAFLPFPPPQEAAYGLPYALYAQGQEGRGAYSREAYHLPMPMAAEPLPSSSVSGEEARLPPREEAELAEGKTLPTAGTVGRVLAMLVQEMKSIMQRDLNRKMVENVAFGAFDQWWESKEEKAKPFQNAAKQQAKEEDKEKTKLKEPGLLSLVDWAKSGGTTGIEAFAFGSGLRGALRLPSFKVKRKEPSEISEASEEKRPRPSTPAEEDEDDPEQEKEAGEPGRPGTKPPKRDEERGKTQGKHRKSFALDSEGEEASQESSSEKDEEDDEEDEEDEDREEAVDTTKKETEVSDGEDEESDSSSKCSLYADSDGENDSTSDSESSSSSSSSSSSSSSSSSSSSSSSSESSSEDEEEEERPAALPSASPPPREVPVPTPAPVEVPVPERVAGSPVTPLPEQEASPARPAGPTEESPPSAPLRPPEPPAGPPAPAPRPDERPSSPIPLLPPPKKRRKTVSFSAIEVVPAPEPPPATPPQAKFPGPASRKAPRGVERTIRNLPLDHASLVKSWPEEVSRGGRSRAGGRGRLTEEEEAEPGTEVDLAVLADLALTPARRGLPALPAVEDSEATETSDEAERPRPLLSHILLEHNYALAVKPTPPAPALRPPEPVPAPAALFSSPADEVLEAPEVVVAEAEEPKPQQLQQQREEGEEEGEEEGEEEEEESSDSSSSSDGEGALRRRSLRSHARRRRPPPPPPPPPPRAYEPRSEFEQMTILYDIWNSGLDSEDMSYLRLTYERLLQQTSGADWLNDTHWVHHTITNLTTPKRKRRPQDGPREHQTGSARSEGYYPISKKEKDKYLDVCPVSARQLEGVDTQGTNRVLSERRSEQRRLLSAIGTSAIMDSDLLKLNQLKFRKKKLRFGRSRIHEWGLFAMEPIAADEMVIEYVGQNIRQMVADMREKRYVQEGIGSSYLFRVDHDTIIDATKCGNLARFINHCCTPNCYAKVITIESQKKIVIYSKQPIGVDEEITYDYKFPLEDNKIPCLCGTESCRGSLN

SEQ ID NO: 1845 - protein, 332 aa, Homo sapiens
MKLGRAVLGLLLLAPSVVQAVEPISLGLALAGVLTGYIYPRLYCLFAECCGQKRSLSREALQKDLDDNLFGQHLAKKIILNAVFGFINNPKPKKPLTLSLHGWTGTGKNFVSKIIAENIYEGGLNSDYVHLFVATLHFPHASNITLYKDQLQLWIRGNVSACARSIFIFDEMDKMHAGLIDAIKPFLDYYDLVDGVSYQKAMFIFLSNAGAERITDVALDFWRSGKQREDIKLKDIEHALSVSVFNNKNSGFWHSSLIDRNLIDYFVPFLPLEYKHLKMCIRVEMQSRGYEIDEDIVSRVAEEMTFFPKEERVFSDKGCKTVFTKLDYYYDD

SEQ ID NO: 1846 - protein, 197 aa, Homo sapiens
MKLGRAVLGLLLLAPSVVQAVEPISLGLALAGVLTGYIYPRLYCLFAECCGQKRSLSREALQKDLDDNLFGQHLAKKIILNAVFGFINNPKPKKPLTLSLHGWTGTGKNFVSKIIAENIYEGGLNSDYVHLFVATLHFPHASNITLYKARMEVWNPFLDVIGFGVSLLWDEIWEFYVEMSEPGKRFMSQFPLERCRS

SEQ ID NO: 1847 - protein, 285 aa, Homo sapiens
MVMRPLWSLLLWEALLPITVTGAQVLSKVGGSVLLVAARPPGFQVREAIWRSLWPSEELLATFFRGSLETLYHSRFLGRAQLHSNLSLELGPLESGDSGNFSVLMVDTRGQPWTQTLQLKVYDAVPRPVVQVFIAVERDAQPSKTCQVFLSCWAPNISEITYSWRRETTMDFGMEPHSLFTDGQVLSISLGPGDRDVAYSCIVSNPVSWDLATVTPWDSCHHEAAPGKASYKDVLLVVVPVSLLLMLVTLFSAWHWCPCSGKKKKDVHADRVGPETENPLVQDLP

SEQ ID NO: 1848 - protein, 176 aa, Homo sapiens
MVMRPLWSLLLWEDAVPRPVVQVFIAVERDAQPSKTCQVFLSCWAPNISEITYSWRRETTMDFGMEPHSLFTDGQVLSISLGPGDRDVAYSCIVSNPVSWDLATVTPWDSCHHEAAPGKASYKDVLLVVVPVSLLLMLVTLFSAWHWCPCSGKKKKDVHADRVGPETENPLVQDLP

SEQ ID NO: 1849 - protein, 335 aa, Homo sapiens
MDPKGLLSLTFVLFLSLAFGASYGTGGRMMNCPKILRQLGSKVLLPLTYERINKSMNKSIHIVVTMAKSLENSVENKIVSLDPSEAGPPRYLGDRYKFYLENLTLGIRESRKEDEGWYLMTLEKNVSVQRFCLQLRLYEQVSTPEIKVLNKTQENGTCTLILGCTVEKGDHVAYSWSEKAGTHPLNPANSSHLLSLTLGPQHADNIYICTVSNPISNNSQTFSPWPGCRTDPSETKPWAVYAGLLGGVIMILIMVVILQLRRRGKTNHYQTTVEKKSLTIYAQVQKPGPLQKKLDSFPAQDPCTTIYVAATEPVPESVQETNSITVYASVTLPES

SEQ ID NO: 1850 - protein, 298 aa, Homo sapiens
MDPKGLLSLTFVLFLSLAFGASYGTGGRMMNCPKILRQLGSKVLLPLTYERINKSMNKSIHIVVTMAKSLENSVENKIVSLDPSEAGPPRYLGDRYKFYLENLTLGIRESRKEDEGWYLMTLEKNVSVQRFCLQLRLYEQVSTPEIKVLNKTQENGTCTLILGCTVEKGDHVAYSWSEKAGTHPLNPANSSHLLSLTLGPQHADNIYICTVSNPISNNSQTFSPWPGCRTDPSETKPWAVYAGLLGGVIMILIMVVILQLRRRGKTNHYQTTVEKKSLTIYAQVQKPGDTHHQTSDLF

SEQ ID NO: 1851 - protein, 305 aa, Homo sapiens
MDPKGLLSLTFVLFLSLAFGASYGTGGRMMNCPKILRQLGSKVLLPLTYERINKSMNKSIHIVVTMAKSLENSVENKIVSLDPSEAGPPRYLGDRYKFYLENLTLGIRESRKEDEGWYLMTLEKNVSVQRFCLQLRLYEQVSTPEIKVLNKTQENGTCTLILGCTVEKGDHVAYSWSEKAGTHPLNPANSSHLLSLTLGPQHADNIYICTVSNPISNNSQTFSPWPGCRTDPSGKTNHYQTTVEKKSLTIYAQVQKPGPLQKKLDSFPAQDPCTTIYVAATEPVPESVQETNSITVYASVTLPES

SEQ ID NO: 1852 - protein, 357 aa, Homo sapiens
MDPKGLLSLTFVLFLSLAFGASYGTGGRMMNCPKILRQLGSKVLLPLTYERINKSMNKSIHIVVTMAKSLENSVENKIVSLDPSEAGPPRYLGDRYKFYLENLTLGIRESRKEDEGWYLMTLEKNVSVQRFCLQLRLYEQVSTPEIKVLNKTQENGTCTLILGCTVEKGDHVAYSWSEKAGTHPLNPANSSHLLSLTLGPQHADNIYICTVSNPISNNSQTFSPWPGCRTDPSETKPWAVYAGLLGGVIMILIMVVILQLRRRATLTTTNQYWSQNVLTQDQERCPGCLPMVKRTITRQQWKKKALRSMPKSRNQVLFRRNLTPSQLRTLAPPYMLLPQSLSQSLSRKQIPSQSMLV

SEQ ID NO: 1853 - protein, 345 aa, Homo sapiens
MAQHHLWILLLCLQTWPEAAGKDSEIFTVNGILGESVTFPVNIQEPRQVKIIAWTSKTSVAYVTPGDSETAPVVTVTHRNYYERIHALGPNYNLVISDLRMEDAGDYKADINTQADPYTTTKRYNLQIYRRLGKPKITQSLMASVNSTCNVTLTCSVEKEEKNVTYNWSPLGEEGNVLQIFQTPEDQELTYTCTAQNPVSNNSDSISARQLCADIAMGFRTHHTGLLSVLAMFFLLVLILSSVFLFRLFKRRQGRIFPEGSCLNTFTKNPYAASKKTIYTYIMASRNTQPAESRIYDEILQSKVLPSKEEPVNTVYSEVQFADKMGKASTQDSKPPGTSSYEIVI

SEQ ID NO: 1854 - protein, 339 aa, Homo sapiens
MAQHHLWILLLCLQTWPEAAGKDSEIFTVNGILGESVTFPVNIQEPRQVKIIAWTSKTSVAYVTPGDSETAPVVTVTHRNYYERIHALGPNYNLVISDLRMEDAGDYKADINTQADPYTTTKRYNLQIYRRLGKPKITQSLMASVNSTCNVTLTCSVEKEEKNVTYNWSPLGEEGNVLQIFQTPEDQELTYTCTAQNPVSNNSDSISARQLCADIAMGFRTHHTGLLSVLAMFFLLVLILSSVFLFRLFKRRQGSCLNTFTKNPYAASKKTIYTYIMASRNTQPAESRIYDEILQSKVLPSKEEPVNTVYSEVQFADKMGKASTQDSKPPGTSSYEIVI

SEQ ID NO: 1855 - protein, 328 aa, Homo sapiens
MAQHHLWILLLCLQTWPEAAGKDSEIFTVNGILGESVTFPVNIQEPRQVKIIAWTSKTSVAYVTPGDSETAPVVTVTHRNYYERIHALGPNYNLVISDLRMEDAGDYKADINTQADPYTTTKRYNLQIYRRLGKPKITQSLMASVNSTCNVTLTCSVEKEEKNVTYNWSPLGEEGNVLQIFQTPEDQELTYTCTAQNPVSNNSDSISARQLCADIAMGFRTHHTGLLSVLAMFFLLVLILSSVFLFRLFKRRQDAASKKTIYTYIMASRNTQPAESRIYDEILQSKVLPSKEEPVNTVYSEVQFADKMGKASTQDSKPPGTSSYEIVI

SEQ ID NO: 1856 - protein, 280 aa, Homo sapiens
MAQHHLWILLLCLQTWPEAAGKDSEIFTVNGILGESVTFPVNIQEPRQVKIIAWTSKTSVAYVTPGDSETAPVVTVTHRNYYERIHALGPNYNLVISDLRMEDAGDYKADINTQADPYTTTKRYNLQIYRRLGKPKITQSLMASVNSTCNVTLTCSVEKEEKNVTYNWSPLGEEGNVLQIFQTPEDQELTYTCTAQNPVSNNSDSISARQLCADIAMGFRTHHTGLLSVLAMFFLLVLILSSVFLFRLFKRRQGRIFPEGKMWKLTFSPPGTEAIYPRFS

SEQ ID NO: 1857 - protein, 272 aa, Homo sapiens
MAQHHLWILLLCLQTWPEAAGKDSEIFTVNGILGESVTFPVNIQEPRQVKIIAWTSKTSVAYVTPGDSETAPVVTVTHRNYYERIHALGPNYNLVISDLRMEDAGDYKADINTQADPYTTTKRYNLQIYRRLGKPKITQSLMASVNSTCNVTLTCSVEKEEKNVTYNWSPLGEEGNVLQIFQTPEDQELTYTCTAQNPVSNNSDSISARQLCADIAMGFRTHHTGLLSVLAMFFLLVLILSSVFLFRLFKRRQGASLQGRASEHSLFRSAVC

SEQ ID NO: 1858 - protein, 241 aa, Homo sapiens
MAQHHLWILLLCLQTWPEAAGKDSEIFTVNGILGESVTFPVNIQEPRQVKIIAWTSKTSVAYVTPGDSETAPVVTVTHRNYYERIHALGPNYNLVISDLRMEDAGDYKADINTQADPYTTTKRYNLQIYRRLGKPKITQSLMASVNSTCNVTLTCSVEKEEKNVTYNWSPLGEEGNVLQIFQTPEDQELTYTCTAQNPVSNNSDSISARQLCAGNQLCPSLLVSLRDHSEELQGLNVGHIL

SEQ ID NO: 1859 - protein, 214 aa, Homo sapiens
MAQHHLWILLLCLQTCRLGKPKITQSLMASVNSTCNVTLTCSVEKEEKNVTYNWSPLGEEGNVLQIFQTPEDQELTYTCTAQNPVSNNSDSISARQLCADIAMGFRTHHTGLLSVLAMFFLLVLILSSVFLFRLFKRRQDAASKKTIYTYIMASRNTQPAESRIYDEILQSKVLPSKEEPVNTVYSEVQFADKMGKASTQDSKPPGTSSYEIVI

SEQ ID NO: 1860 - protein, 335 aa, Homo sapiens
MAGSPTCLTLIYILWQLTGSAASGPVKELVGSVGGAVTFPLKSKVKQVDSIVWTFNTTPLVTIQPEGGTIIVTQNRNRERVDFPDGGYSLKLSKLKKNDSGIYYVGIYSSSLQQPSTQEYVLHVYEHLSKPKVTMGLQSNKNGTCVTNLTCCMEHGEEDVIYTWKALGQAANESHNGSILPISWRWGESDMTFICVARNPVSRNFSSPILARKLCEGAADDPDSSMVLLCLLLVPLLLSLFVLGLFLWFLKRERQEEYIEEKKRVDICRETPNICPHSGENTEYDTIPHTNRTILKEDPANTVYSTVEIPKKMENPHSLLTMPDTPRLFAYENVI

SEQ ID NO: 1861 - protein, 228 aa, Homo sapiens
MAGSPTCLTLIYILWQLTEHLSKPKVTMGLQSNKNGTCVTNLTCCMEHGEEDVIYTWKALGQAANESHNGSILPISWRWGESDMTFICVARNPVSRNFSSPILARKLCEGAADDPDSSMVLLCLLLVPLLLSLFVLGLFLWFLKRERQEEYIEEKKRVDICRETPNICPHSGENTEYDTIPHTNRTILKEDPANTVYSTVEIPKKMENPHSLLTMPDTPRLFAYENVI

SEQ ID NO: 1862 - protein, 335 aa, Homo sapiens
MAGSPTCLTLIYILWQLTGSAASGPVKELVGSVGGAVTFPLKSKVKQVDSIVWTFNTTPLVTIQPEGGTIIVTQNRNRERVDFPDGGYSLKLSKLKKNDSGIYYVGIYSSSLQQPSTQEYVLHVYEHLSKPKVTMGLQSNKNGTCVTNLTCCMEHGEEDVIYTWKALGQAANESHNGSILPISWRWGESDMTFICVARNPVSRNFSSPILARKLCEGAADDPDSSMVLLCLLLVPLLLSLFVLGLFLWFLKRERQEENNPKGRSSKYGLLHCGNTEKDGKSPLTAHDARHTKAICLEDPANTVYSTVEIPKKMENPHSLLTMPDTPRLFAYENVI

SEQ ID NO: 1863 - protein, 165 aa, Homo sapiens
MAGSPTCLTLIYILWQLTGSAASGPVKELVGSVGGAVTFPLKSKVKQVDSIVWTFNTTPLVTIQPEGGTIIVTQNRNRERVDFPDGGYSLKLSKLKKNDSGIYYVGIYSSSLQQPSTQEYVLHVYENNPKGRSSKYGLLHCGNTEKDGKSPLTAHDARHTKAICL

SEQ ID NO: 1864 - protein, 296 aa, Homo sapiens
MAGSPTCLTLIYILWQLTGSAASGPVKELVGSVGGAVTFPLKSKVKQVDSIVWTFNTTPLVTIQPEGGTIIVTQNRNRERVDFPDGGYSLKLSKLKKNDSGIYYVGIYSSSLQQPSTQEYVLHVYEHLSKPKVTMGLQSNKNGTCVTNLTCCMEHGEEDVIYTWKALGQAANESHNGSILPISWRWGESDMTFICVARNPVSRNFSSPILARKLCEGAADDPDSSMVLLCLLLVPLLLSLFVLGLFLWFLKRERQEENNPKGRSSKYGLLHCGNTEKDGKSPLTAHDARHTKAICL

SEQ ID NO: 1865 - protein, 204 aa, Homo sapiens
MAGSPTCLTLIYILWQLTGSAASGPVKELVGSVGGAVTFPLKSKVKQVDSIVWTFNTTPLVTIQPEGGTIIVTQNRNRERVDFPDGGYSLKLSKLKKNDSGIYYVGIYSSSLQQPSTQEYVLHVYEYIEEKKRVDICRETPNICPHSGENTEYDTIPHTNRTILKEDPANTVYSTVEIPKKMENPHSLLTMPDTPRLFAYENVI

SEQ ID NO: 1866 - protein, 188 aa, Homo sapiens
MAGSPTCLTLIYILWQLTEHLSKPKVTMGLQSNKNGTCVTNLTCCMEHGEEDVIYTWKALGQAANESHNGSILPISWRWGESDMTFICVARNPVSRNFSSPILARKLCEEYIEEKKRVDICRETPNICPHSGENTEYDTIPHTNRTILKEDPANTVYSTVEIPKKMENPHSLLTMPDTPRLFAYENVI

SEQ ID NO: 1867 - protein, 477 aa, Homo sapiens
MPGSDTALTVDRTYSYPGRHHRCKSRVERHDMNTLSLPLNIRRGGSDTNLNFDVPDGILDFHKVKLTADSLKQKILKVTEQIKIEQTSRDGNVAEYLKLVNNADKQQAGRIKQVFEKKNQKSAHSIAQLQKKLEQYHRKLREIEQNGASRSSKDISKDHLKDIHRSLKDAHVKSRTAPHCMESSKSGMPGVSLTPPVFVFNKSREFANLIRNKFGSADNIAHLKNSLEEFRPEASARAYGGSATIVNKPKYGSDDECSSGTSGSADSNGNQSFGAGGASTLDSQGKLAVILEELREIKDTQAQLAEDIEALKVQFKREYGFISQTLQEERYRYERLEDQLHDLTDLHQHETANLKQELASIEEKVAYQAYERSRDIQEALESCQTRISKLELHQQEQQALQTDTVNAKVLLGRCINVILAFMTVILVCVSTIAKFVSPMMKSRCHILGTFFAVTLLAIFCKNWDHILCAIERMIIPR

SEQ ID NO: 1868 - protein, 2564 aa, Homo sapiens
MKQLQPQPPPKMGDFYDPEHPTPEEEENEAKIENVQKTGFIKGPMFKGVASSRFLPKGTKTKVNLEEQGRQKVSFSFSLTKKTLQNRFLTALGNEKQSDTPNPPAVPLQVDSTPKMKMEIGDTLSTAEESSPPKSRVELGKIHFKKHLLHVTSRPLLATTTAVASPPTHAAPLPAVIAESTTVDSPPSSPPPPPPPAQATTLSSPAPVTEPVALPHTPITVLMAAPVPLPVDVAVRSLKEPPIIIVPESLEADTKQDTISNSLEEHVTQILNEQADISSKKEDSHIGKDEEIPDSSKISLSCKKTGSKKKSSQSEGIFLGSESDEDSVRTSSSQRSHDLKFSASIEKERDFKKSSAPLKSEDLGKPSRSKTDRDDKYFSYSKLERDTRYVSSRCRSERERRRSRSHSRSERGSRTNLSYSRSERSHYYDSDRRYHRSSPYRERTRYSRPYTDNRARESSDSEEEYKKTYSRRTSSHSSSYRDLRTSSYSKSDRDCKTETSYLEMERRGKYSSKLERESKRTSENEAIKRCCSPPNELGFRRGSSYSKHDSSASRYKSTLSKPIPKSDKFKNSFCCTELNEEIKQSHSFSLQTPCSKGSELRMINKNPEREKAGSPAPSNRLNDSPTLKKLDELPIFKSEFITHDSHDSIKELDSLSKVKNDQLRSFCPIELNINGSPGAESDLATFCTSKTDAVLMTSDDSVTGSELSPLVKACMLSSNGFQNISRCKEKDLDDTCMLHKKSESPFRETEPLVSPHQDKLMSMPVMTVDYSKTVVKEPVDTRVSCCKTKDSDIYCTLNDSNPSLCNSEAENIEPSVMKISSNSFMNVHLESKPVICDSRNLTDHSKFACEEYKQSIGSTSSASVNHFDDLYQPIGSSGIASSLQSLPPGIKVDSLTLLKCGENTSPVLDAVLKSKKSSEFLKHAGKETIVEVGSDLPDSGKGFASRENRRNNGLSGKCLQEAQEEGNSILPERRGRPEISLDERGEGGHVHTSDDSEVVFSSCDLNLTMEDSDGVTYALKCDSSGHAPEIVSTVHEDYSGSSESSNDESDSEDTDSDDSSIPRNRLQSVVVVPKNSTLPMEETSPCSSRSSQSYRHYSDHWEDERLESRRHLYEEKFESIASKACPQTDKFFLHKGTEKNPEISFTQSSRKQIDNRLPELSHPQSDGVDSTSHTDVKSDPLGHPNSEETVKAKIPSRQQEELPIYSSDFEDVPNKSWQQTTFQNRPDSRLGKTELSFSSSCEIPHVDGLHSSEELRNLGWDFSQEKPSTTYQQPDSSYGACGGHKYQQNAEQYGGTRDYWQGNGYWDPRSGRPPGTGVVYDRTQGQVPDSLTDDREEEENWDQQDGSHFSDQSDKFLLSLQKDKGSVQAPEISSNSIKDTLAVNEKKDFSKNLEKNDIKDRGPLKKRRQEIESDSESDGELQDRKKVRVEVEQGETSVPPGSALVGPSCVMDDFRDPQRWKECAKQGKMPCYFDLIEENVYLTERKKNKSHRDIKRMQCECTPLSKDERAQGEIACGEDCLNRLLMIECSSRCPNGDYCSNRRFQRKQHADVEVILTEKKGWGLRAAKDLPSNTFVLEYCGEVLDHKEFKARVKEYARNKNIHYYFMALKNDEIIDATQKGNCSRFMNHSCEPNCETQKWTVNGQLRVGFFTTKLVPSGSELTFDYQFQRYGKEAQKCFCGSANCRGYLGGENRVSIRAAGGKMKKERSRKKDSVDGELEALMENGEGLSDKNQVLSLSRLMVRIETLEQKLTCLELIQNTHSQSCLKSFLERHGLSLLWIWMAELGDGRESNQKLQEEIIKTLEHLPIPTKNMLEESKVLPIIQRWSQTKTAVPPLSEGDGYSSENTSRAHTPLNTPDPSTKLSTEADTDTPKKLMFRRLKIISENSMDSAISDATSELEGKDGKEDLDQLENVPVEEEEELQSQQLLPQQLPECKVDSETNIEASKLPTSEPEADAEIEPKESNGTKLEEPINEETPSQDEEEGVSDVESERSQEQPDKTVDISDLATKLLDSWKDLKEVYRIPKKSQTEKENTTTERGRDAVGFRDQTPAPKTPNRSRERDPDKQTQNKEKRKRRSSLSPPSSAYERGTKRPDDRYDTPTSKKKVRIKDRNKLSTEERRKLFEQEVAQREAQKQQQQMQNLGMTSPLPYDSLGYNAPHHPFAGYPPGYPMQAYVDPSNPNAGKVLLPTPSMDPVCSPAPYDHAQPLVGHSTEPLSAPPPVPVVPHVAAPVEVSSSQYVAQSDGVVHQDSSVAVLPVPAPGPVQGQNYSVWDSNQQSVSVQQQYSPAQSQATIYYQGQTCPTVYGVTSPYSQTTPPIVQSYAQPSLQYIQGQQIFTAHPQGVVVQPAAAVTTIVAPGQPQPLQPSEMVVTNNLLDLPPPSPPKPKTIVLPPNWKTARDPEGKIYYYHVITRQTQWDPPTWESPGDDASLEHEAEMDLGTPTYDENPMKASKKPKTAEADTSSELAKKSKEVFRKEMSQFIVQCLNPYRKPDCKVGRITTTEDFKHLARKLTHGVMNKELKYCKNPEDLECNENVKHKTKEYIKKYMQKFGAVYKPKEDTELE

SEQ ID NO: 1869 - protein, 1714 aa, Homo sapiens
MKQLQPQPPPKMGDFYDPEHPTPEEEENEAKIENVQKTGFIKGPMFKGVASSRFLPKGTKTKVNLEEQGRQKVSFSFSLTKKTLQNRFLTALGNEKQSDTPNPPAVPLQVDSTPKMKMEIGDTLSTAEESSPPKSRVELGKIHFKKHLLHVTSRPLLATTTAVASPPTHAAPLPAVIAESTTVDSPPSSPPPPPPPAQATTLSSPAPVTEPVALPHTPITVLMAAPVPLPVDVAVRSLKEPPIIIVPESLEADTKQDTISNSLEEHVTQILNEQADISSKKEDSHIGKDEEIPDSSKISLSCKKTGSKKKSSQSEGIFLGSESDEDSVRTSSSQRSHDLKFSASIEKERDFKKSSAPLKSEDLGKPSRSKTDRDDKYFSYSKLERDTRYVSSRCRSERERRRSRSHSRSERGSRTNLSYSRSERSHYYDSDRRYHRSSPYRERTRYSRPYTDNRARESSDSEEEYKKTYSRRTSSHSSSYRDLRTSSYSKSDRDCKTETSYLEMERRGKYSSKLERESKRTSENEAIKRCCSPPNELGFRRGSSYSKHDSSASRYKSTLSKPIPKSDKFKNSFCCTELNEEIKQSHSFSLQTPCSKGSELRMINKNPEREKAGSPAPSNRLNDSPTLKKLDELPIFKSEFITHDSHDSIKELDSLSKVKNDQLRSFCPIELNINGSPGAESDLATFCTSKTDAVLMTSDDSVTGSELSPLVKACMLSSNGFQNISRCKEKDLDDTCMLHKKSESPFRETEPLVSPHQDKLMSMPVMTVDYSKTVVKEPVDTRVSCCKTKDSDIYCTLNDSNPSLCNSEAENIEPSVMKISSNSFMNVHLESKPVICDSRNLTDHSKFACEEYKQSIGSTSSASVNHFDDLYQPIGSSGIASSLQSLPPGIKVDSLTLLKCGENTSPVLDAVLKSKKSSEFLKHAGKETIVEVGSDLPDSGKGFASRENRRNNGLSGKCLQEAQEEGNSILPERRGRPEISLDERGEGGHVHTSDDSEVVFSSCDLNLTMEDSDGVTYALKCDSSGHAPEIVSTVHEDYSGSSESSNDESDSEDTDSDDSSIPRNRLQSVVVVPKNSTLPMEETSPCSSRSSQSYRHYSDHWEDERLESRRHLYEEKFESIASKACPQTDKFFLHKGTEKNPEISFTQSSRKQIDNRLPELSHPQSDGVDSTSHTDVKSDPLGHPNSEETVKAKIPSRQQEELPIYSSDFEDVPNKSWQQTTFQNRPDSRLGKTELSFSSSCEIPHVDGLHSSEELRNLGWDFSQEKPSTTYQQPDSSYGACGGHKYQQNAEQYGGTRDYWQGNGYWDPRSGRPPGTGVVYDRTQGQVPDSLTDDREEEENWDQQDGSHFSDQSDKFLLSLQKDKGSVQAPEISSNSIKDTLAVNEKKDFSKNLEKNDIKDRGPLKKRRQEIESDSESDGELQDRKKVRVEVEQGETSVPPGSALVGPSCVMDDFRDPQRWKECAKQGKMPCYFDLIEENVYLTERKKNKSHRDIKRMQCECTPLSKDERAQGEIACGEDCLNRLLMIECSSRCPNGDYCSNRRFQRKQHADVEVILTEKKGWGLRAAKDLPSNTFVLEYCGEVLDHKEFKARVKEYARNKNIHYYFMALKNDEIIDATQKGNCSRFMNHSCEPNCETQKWTVNGQLRVGFFTTKLVPSGSELTFDYQFQRYGKEAQKCFCGSANCRGYLGGENRVSIRAAGGKMKKERSRKKDS

SEQ ID NO: 1870 - protein, 1572 aa, Homo sapiens
MKQLQPQPPPKMGDFYDPEHPTPEEEENEAKIENVQKTGFIKGPMFKGVASSRFLPKGTKTKVNLEEQGRQKVSFSFSLTKKTLQNRFLTALGNEKQSDTPNPPAVPLQVDSTPKMKMEIGDTLSTAEESSPPKSRVELGKIHFKKHLLHVTSRPLLATTTAVASPPTHAAPLPAVIAESTTVDSPPSSPPPPPPPAQATTLSSPAPVTEPVALPHTPITVLMAAPVPLPVDVAVRSLKEPPIIIVPESLEADTKQDTISNSLEEHVTQILNEQADISSKKEDSHIGKDEEIPDSSKISLSCKKTGSKKKSSQSEGIFLGSESDEDSVRTSSSQRSHDLKFSASIEKERDFKKSSAPLKSEDLGKPSRSKTDRDDKYFSYSKLERDTRYVSSRCRSERERRRSRSHSRSERGSRTNLSYSRSERSHYYDSDRRYHRSSPYRERTRYSRPYTDNRARESSDSEEEYKKTYSRRTSSHSSSYRDLRTSSYSKSDRDCKTETSYLEMERRGKYSSKLERESKRTSENEAIKRCCSPPNELGFRRGSSYSKHDSSASRYKSTLSKPIPKSDKFKNSFCCTELNEEIKQSHSFSLQTPCSKGSELRMINKNPEREKAGSPAPSNRLNDSPTLKKLDELPIFKSEFITHDSHDSIKELDSLSKVKNDQLRSFCPIELNINGSPGAESDLATFCTSKTDAVLMTSDDSVTGSELSPLVKACMLSSNGFQNISRCKEKDLDDTCMLHKKSESPFRETEPLVSPHQDKLMSMPVMTVDYSKTVVKEPVDTRVSCCKTKDSDIYCTLNDSNPSLCNSEAENIEPSVMKISSNSFMNVHLESKPVICDSRNLTDHSKFACEEYKQSIGSTSSASVNHFDDLYQPIGSSGIASSLQSLPPGIKVDSLTLLKCGENTSPVLDAVLKSKKSSEFLKHAGKETIVEVGSDLPDSGKGFASRENRRNNGLSGKCLQEAQEEGNSILPERRGRPEISLDERGEGGHVHTSDDSEVVFSSCDLNLTMEDSDGVTYALKCDSSGHAPEIVSTVHEDYSGSSESSNDESDSEDTDSDDSSIPRNRLQSVVVVPKNSTLPMEETSPCSSRSSQSYRHYSDHWEDERLESRRHLYEEKFESIASKACPQTDKFFLHKGTEKNPEISFTQSSRKQIDNRLPELSHPQSDGVDSTSHTDVKSDPLGHPNSEETVKAKIPSRQQEELPIYSSDFEDVPNKSWQQTTFQNRPDSRLGKTELSFSSSCEIPHVDGLHSSEELRNLGWDFSQEKPSTTYQQPDSSYGACGGHKYQQNAEQYGGTRDYWQGNGYWDPRSGRPPGTGVVYDRTQGQVPDSLTDDREEEENWDQQDGSHFSDQSDKFLLSLQKDKGSVQAPEISSNSIKDTLAVNEKKDFSKNLEKNDIKDRGPLKKRRQEIESDSESDGELQDRKKVRVEVEQGETSVPPGSALVGPSCVMDDFRDPQRWKECAKQGKMPCYFDLIEENVYLTERKKNKSHRDIKRMQCECTPLSKDERAQGEIACGEDCLNRLLMIECSSRCPNGDYCSNRRFQRKQHADVEVILTEKKGWGLRAAKDLPS

SEQ ID NO: 1871 - protein, 141 aa, Homo sapiens
MEPSHKDAETAAAAAAVAAADPRGASSSSGVVVQVREKKGPLRAAIPYMPFPVAVICLFLNTFVPGLGTFVSAFTVLCGARTDLPDRHVCCVFWLNIAAALIQILTAIVMVGWIMSIFWGMDMVILAISQGYKEQGIPQQL

SEQ ID NO: 1872 - protein, 249 aa, Homo sapiens
MSLEDPFFVVRGEVQKAVNTARGLYQRWCELLQESAAVGREELDWTTNELRNGLRSIEWDLEDLEETIGIVEANPGKFKLPAGDLQERKVFVERMREAVQEMKDHMVSPTAVAFLERNNREILAGKPAAQKSPSDLLDASAVSATSRYIEEQQATQQLIMDEQDQQLEMVSGSIQVLKHMSGRVGEELDEQGIMLDAFAQEMDHTQSRMDGVLRKLAKVSHMTSDRRQWCAIAVLVGVLLLVLILLFSL

SEQ ID NO: 1873 - protein, 200 aa, Homo sapiens
MSLEDPFFVVRGEVQKAVNTARGLYQRWCELLQESAAVGREELDWTTNELRNGLRSIEWDLEDLEETIGIVEANPGKPAAQKSPSDLLDASAVSATSRYIEEQQATQQLIMDEQDQQLEMVSGSIQVLKHMSGRVGEELDEQGIMLDAFAQEMDHTQSRMDGVLRKLAKVSHMTSDRRQWCAIAVLVGVLLLVLILLFSL

SEQ ID NO: 1874 - protein, 353 aa, Homo sapiens
MPSPVGLLRALPLPWPQFLACTLRRLAGPRESTGPSQKPPPLCSVPCRVPAMTEEVAREALLSFVDSKCCYSSTVAGDLVIQELKRQTLCRYRLETFSESRISEWTFQPFTNHSVDGPQRGASPRLWDIKVQGPPMFQEDTRKFQVPHSSLVKECHKCHGRGRYKCSGCHGAGTVRCPSCCGAKRKAKQSRRCQLCAGSGRRRCSTCSGRGNKTCATCKGEKKLLHFIQLVIMWKNSLFEFVSEHRLNCPRELLAKAKGENLFKDENSVVYPIVDFPLRDISLASQRGIAEHSAALASRARVLQQRQTIELIPLTEVHYWYQGKTYVYYIYGTDHQVYAVDYPERYCCGCTIV

SEQ ID NO: 1875 - protein, 375 aa, Homo sapiens
MDRDLNEDDSVVDLSFEAESPLAPPTELLERLPSYDWLLQGGRGQIFFPPLEAPGRPQEQRSWPSFLEHRVPAMTEEVAREALLSFVDSKCCYSSTVAGDLVIQELKRQTLCRYRLETFSESRISEWTFQPFTNHSVDGPQRGASPRLWDIKVQGPPMFQEDTRKFQVPHSSLVKECHKCHGRGRYKCSGCHGAGTVRCPSCCGAKRKAKQSRRCQLCAGSGRRRCSTCSGRGNKTCATCKGEKKLLHFIQLVIMWKNSLFEFVSEHRLNCPRELLAKAKGENLFKDENSVVYPIVDFPLRDISLASQRGIAEHSAALASRARVLQQRQTIELIPLTEVHYWYQGKTYVYYIYGTDHQVYAVDYPERYCCGCTIV

SEQ ID NO: 1876 - protein, 634 aa, Homo sapiens
MAMWNRPCQRLPQQPLVAEPTAEGEPHLPTGRELTEANRFAYAALCGISLSQLFPEPEHSSFCTEFMAGLVQWLELSEAVLPTMTAFASGLGGEGADVFVQILLKDPILKDDPTVITQDLLSFSLKDGHYDARARVLVCHMTSLLQVPLEELDVLEEMFLESLKEIKEEESEMAEASRKKKENRRKWKRYLLIGLATVGGGTVIGVTGGLAAPLVAAGAATIIGSAGAAALGSAAGIAIMTSLFGAAGAGLTGYKMKKRVGAIEEFTFLPLTEGRQLHITIAVTGWLASGKYRTFSAPWAALAHSREQYCLAWEAKYLMELGNALETILSGLANMVAQEALKYTVLSGIVAALTWPASLLSVANVIDNPWGVCLHRSAEVGKHLAHILLSRQQGRRPVTLIGFSLGARVIYFCLQEMAQEKDCQGIIEDVILLGAPVEGEAKHWEPFRKVVSGRIINGYCRGDWLLSFVYRTSSVQLRVAGLQPVLLQDRRVENVDLTSVVSGHLDYAKQMDAILKAVGIRTKPGWDEKGLLLAPGCLPSEEPRQAAAAASSGETPHQVGQTQGPISGDTSKLAMSTDPSQAQVPVGLDQSEGASLPAAASPERPPICSHGMDPNPLGCPDCACKTQGPSTGLD

SEQ ID NO: 1877 - protein, 594 aa, Homo sapiens
MAMWNRPCQRLPQQPLVAEPTAEGEPHLPTGRELTEANRFAYAALCGISLSQLFPEPEHSSFCTEFMAGLVQWLELSEAVLPTMTAFASGLGGEGADVFVQILLKDPILKDDPTVITQDLLSFSLKDGHYDARARVLVCHMTSLLQVPLEELDVLEEMFLESLKEIKEEESEMAEASRKKKENRRKWKRYLLIGLATVGGGTVIGVTGGLAAPLVAAGAATIIGSAGAAALGSAAGIAIMTSLFGAAGAGLTGTFSAPWAALAHSREQYCLAWEAKYLMELGNALETILSGLANMVAQEALKYTVLSGIVAALTWPASLLSVANVIDNPWGVCLHRSAEVGKHLAHILLSRQQGRRPVTLIGFSLGARVIYFCLQEMAQEKDCQGIIEDVILLGAPVEGEAKHWEPFRKVVSGRIINGYCRGDWLLSFVYRTSSVQLRVAGLQPVLLQDRRVENVDLTSVVSGHLDYAKQMDAILKAVGIRTKPGWDEKGLLLAPGCLPSEEPRQAAAAASSGETPHQVGQTQGPISGDTSKLAMSTDPSQAQVPVGLDQSEGASLPAAASPERPPICSHGMDPNPLGCPDCACKTQGPSTGLD

SEQ ID NO: 1878 - protein, 288 aa, Homo sapiens
MKDRTQELRTAKDSDDDDDVAVTVDRDRFMDEFFEQVEEIRGFIDKIAENVEEVKRKHSAILASPNPDEKTKEELEELMSDIKKTANKVRSKLKSIEQSIEQEEGLNRSSADLRIRKTQHSTLSRKFVEVMSEYNATQSDYRERCKGRIQRQLEITGRTTTSEELEDMLESGNPAIFASGIIMDSSISKQALSEIETRHSEIIKLENSIRELHDMFMDMAMLVESQGEMIDRIEYNVEHAVDYVERAVSDTKKAVKYQSKARRKKIMIIICCVILGIVIASTVGGIFA

SEQ ID NO: 1879 - protein, 260 aa, Homo sapiens
MKDRTQELRTAKDSDDDDDVAVTVDRDRFMDEFFEQVEEIRGFIDKIAENVEEVKRKHSAILASPNPDEKTKEELEELMSDIKKTANKVRSKLKSIEQSIEQEEGLNRSSADLRIRKTQHSTLSRKFVEVMSEYNATQSDYRERCKGRIQRQLEITGRTTTSEELEDMLESGNPAIFASGIIMDSSISKQALSEIETRHSEIIKLENSIRELHDMFMDMAMLVESQPQGAFLKSCPEPQPNREEGALWSSGAPGPAGRDD

SEQ ID NO: 1880 - protein, 251 aa, Homo sapiens
MKDRTQELRTAKDSDDDDDVAVTVDRDRFMDEFFEQVEEIRGFIDKIAENVEEVKRKHSAILASPNPDEKTKEELEELMSDIKKTANKVRSKLKSIEQSIEQEEGLNRSSADLRIRKTQHSTLSRKFVEVMSEYNATQSDYRERCKGRIQRQLEITGRTTTSEELEDMLESGNPAIFASGIIMDSSISKQALSEIETRHSEIIKLENSIRELHDMFMDMAMLVESQTMWRGPCLTPRRPSSTRARRAGRKS

SEQ ID NO: 1881 - protein, 201 aa, Homo sapiens
MVTLAELLVLLAALLATVSGYFVSIDAHAEECFFERVTSGTKMGLIFEVAEGGFLDIDVEITGPDNKGIYKGDRESSGKYTFAAHMDGTYKFCFSNRMSTMTPKIVMFTIDIGEAPKGQDMETEAHQNKLEEMINELAVAMTAVKHEQEYMEVRERIHRAINDNTNSRVVLWSFFEALVLVAMTLGQIYYLKRFFEVRRVV

SEQ ID NO: 1882 - protein, 227 aa, Homo sapiens
MAGVGAGPLRAMGRQALLLLALCATGAQGLYFHIGETEKRCFIEEIPDETMVIGNYRTQMWDKQKEVFLPSTPGLGMHVEVKDPDGKVVLSRQYGSEGRFTFTSHTPGDHQICLHSNSTRMALFAGGKLRVHLDIQVGEHANNYPEIAAKDKLTELQLRARQLLDQVEQIQKEQDYQRYREERFRLTSESTNQRVLWWSIAQTVILILTGIWQMRHLKSFFEAKKLV

SEQ ID NO: 1883 - protein, 211 aa, Homo sapiens
MAGVGAGPLRAMGRQALLLLALCATGAQGLYFHIGETEKRCFIEEIPDETMVIGNYRTLGMHVEVKDPDGKVVLSRQYGSEGRFTFTSHTPGDHQICLHSNSTRMALFAGGKLRVHLDIQVGEHANNYPEIAAKDKLTELQLRARQLLDQVEQIQKEQDYQRYREERFRLTSESTNQRVLWWSIAQTVILILTGIWQMRHLKSFFEAKKLV

SEQ ID NO: 1884 - protein, 186 aa, Homo sapiens
MAGVGAGPLRAMGRQALLLLALCATGAQGLYFHIGETEKRCFIEEIPDETMVIGNYRTQMWDKQKEVFLPSTPGLGMHVEVKDPDGKVVLSRQYGSEGRFTFTSHTPGDHQICLHSNSTRMALFAGGKLRVHLDIQVGEHANNYPEIAAKDKLTELQLRARQLLDQVEQIQKEQDYQRASAYLLVI

SEQ ID NO: 1885 - protein, 209 aa, Homo sapiens
MEGGGGSGNKTTGGLAGFFGAGGAGYSHADLAGVPLTGMNPLSPYLNVDPRYLVQDTDEFILPTGANKTRGRFELAFFTIGGCCMTGAAFGAMNGLRLGLKETQNMAWSKPRNVQILNMVTRQGALWANTLGSLALLYSAFGVIIEKTRGAEDDLNTVAAGTMTGMLYKCTGGLRGIARGGLTGLTLTSLYALYNNWEHMKGSLLQQSL

SEQ ID NO: 1886 - protein, 284 aa, Homo sapiens
MAESEAETPSTPGEFESKYFEFHGVRLPPFCRGKMEEIANFPVRPSDVWIVTYPKSGTSLLQEVVYLVSQGADPDEIGLMNIDEQLPVLEYPQPGLDIIKELTSPRLIKSHLPYRFLPSDLHNGDSKVIYMARNPKDLVVSYYQFHRSLRTMSYRGTFQEFCRRFMNDKLGYGSWFEHVQEFWEHRMDSNVLFLKYEDMHRDLVTMVEQLARFLGVSCDKAQLEALTEHCHQLVDQCCNAEALPVGRGRVGLWKDIFTVSMNEKFDLVYKQKMGKCDLTFDFYL

SEQ ID NO: 1887 - protein, 260 aa, Homo sapiens
MAESEAETPSTPGEFESKYFEFHGVRLPPFCRGKMEEIANFPVRPSDVWIVTYPKSGTSLLQEVVYLVSQGADPDEIGLMNIDEQLPVLEYPQPGLDIIKELTSPRLIKSHLPYRFLPSDLHNGDSKVIYMARNPKDLVVSYYQFHRSLRTMSYRGTFQEFCRRFMNDKLGYGSWFEHVQEFWEHRMDSNVLFLKYEDMHRDLVTMVEQLARFLGVSCDKAQLEALTEHCHQLVDQCCNAEALPVGRAHCVFARKIFLSW

SEQ ID NO: 1888 - protein, 245 aa, Homo sapiens
MALALCLQVLCSLCGWLSLYISFCHLNKHRSYEWSCRLVTFTHGVLSIGLSAYIGFIDGPWPFTHPGSPNTPLQVHVLCLTLGYFIFDLGWCVYFQSEGALMLAHHTLSILGIIMALVLGESGTEVNAVLFGSELTNPLLQMRWFLRETGHYHSFTGDVVDFLFVALFTGVRIGVGACLLFCEMVSPTPKWFVKAGGVAMYAVSWCFMFSIWRFAWRKSIKKYHAWRSRRSEERQLKHNGHLKIH

SEQ ID NO: 1889 - protein, 126 aa, Homo sapiens
MALALCLQVLCSLCGWLSLYISFCHLNKHRSYEWSCRLVTFTHGVLSIGLSAYIGFIDGPWPFTHPGSPNTPLQVHVLCLTLGYFIFDLGCIWRFAWRKSIKKYHAWRSRRSEERQLKHNGHLKIH

SEQ ID NO: 1890 - protein, 267 aa, Homo sapiens
MTQCCFLRVHPLFFWFWSFHHRMALALCLQVLCSLCGWLSLYISFCHLNKHRSYEWSCRLVTFTHGVLSIGLSAYIGFIDGPWPFTHPGSPNTPLQVHVLCLTLGYFIFDLGWCVYFQSEGALMLAHHTLSILGIIMALVLGESGTEVNAVLFGSELTNPLLQMRWFLRETGHYHSFTGDVVDFLFVALFTGVRIGVGACLLFCEMVSPTPKWFVKAGGVAMYAVSWCFMFSIWRFAWRKSIKKYHAWRSRRSEERQLKHNGHLKIH

SEQ ID NO: 1891 - protein, 148 aa, Homo sapiens
MTQCCFLRVHPLFFWFWSFHHRMALALCLQVLCSLCGWLSLYISFCHLNKHRSYEWSCRLVTFTHGVLSIGLSAYIGFIDGPWPFTHPGSPNTPLQVHVLCLTLGYFIFDLGCIWRFAWRKSIKKYHAWRSRRSEERQLKHNGHLKIH

SEQ ID NO: 1892 - protein, 592 aa, Homo sapiens
MAPPVAERGLKSVVWQKIKATVFDDCKKEGEWKIMLLDEFTTKLLASCCKMTDLLEEGITVVENIYKNREPVRQMKALYFITPTSKSVDCFLHDFASKSENKYKAAYIYFTDFCPDNLFNKIKASCSKSIRRCKEINISFIPHESQVYTLDVPDAFYYCYSPDPGNAKGKDAIMETMADQIVTVCATLDENPGVRYKSKPLDNASKLAQLVEKKLEDYYKIDEKSLIKGKTHSQLLIIDRGFDPVSTVLHELTFQAMAYDLLPIENDTYKYKTDGKEKEAILEEEDDLWVRIRHRHIAVVLEEIPKLMKEISSTKKATEGKTSLSALTQLMKKMPHFRKQITKQVVHLNLAEDCMNKFKLNIEKLCKTEQDLALGTDAEGQKVKDSMRVLLPVLLNKNHDNCDKIRAILLYIFSINGTTEENLDRLIQNVKIENESDMIRNWSYLGVPIVPQSQQGKPLRKDRSAEETFQLSRWTPFIKDIMEDAIDNRLDSKEWPYCSQCPAVWNGSGAVSARQKPRANYLEDRKNGSKLIVFVIGGITYSEVRCAYEVSQAHKSCEVIIGSTHVLTPKKLLDDIKMLNKPKDKVSLIKDE

SEQ ID NO: 1893 - protein, 1287 aa, Homo sapiens
MEPIYPFARPQMNTRFPSSRMVPFHFPPSKCALWNPTPTGDFIYLHLSYYRNPKLVVTEKTIRLAYRHAKQNKKNSSCFLLGSLTADEDEEGVTLTVDRFDPGREVPECLEITPTASLPGDFLIPCKVHTQELCSREMIVHSVDDFSSALKALQCHICSKDSLDCGKLLSLRVHITSRESLDSVEFDLHWAAVTLANNFKCTPVKPIPIIPTALARNLSSNLNISQVQGTYKYGYLTMDETRKLLLLLESDPKVYSLPLVGIWLSGITHIYSPQVWACCLRYIFNSSVQERVFSESGNFIIVLYSMTHKEPEFYECFPCDGKIPDFRFQLLTSKETLHLFKNVEPPDKNPIRCELSAESQNAETEFFSKASKNFSIKRSSQKLSSGKMPIHDHDSGVEDEDFSPRPIPSPHPVSQKISKIQPSVPELSLVLDGNFIESNPLPTPLEMVNNENPPLINHLEHLKPLQPQLYDEKHSPEVEAGEPSLRGIPNQLNQDKPALLRHCKVRQPPAYKKGNPHTRNSIKPSSHNGPSHDIFEKLQTVSAGNVQNEEYPIRPSTLNSRQSSLAPQSQPHDFVFSPHNSGRPMELQIPTPPLPSYCSTNVCRCCQHHSHIQYSPLNSWQGANTVGSIQDVQSEALQKHSLFHPSGCPALYCNAFCSSSSPIALRPQGDMGSCSPHSNIEPSPVARPPSHMDLCNPQPCTVCMHTPKTESDNGMMGLSPDAYRFLTEQDRQLRLLQAQIQRLLEAQSLMPCSPKTTAVEDTVQAGRQMELVSVEAQSSPGLHMRKGVSIAVSTGASLFWNAAGEDQEPDSQMKQDDTKISSEDMNFSVDINNEVTSLPGSASSLKAVDIPSFEESNIAVEEEFNQPLSVSNSSLVVRKEPDVPVFFPSGQLAESVSMCLQTGPTGGASNNSETSEEPKIEHVMQPLLHQPSDNQKIYQDLLGQVNHLLNSSSKETEQPSTKAVIISHECTRTQNVYHTKKKTHHSRLVDKDCVLNATLKQLRSLGVKIDSPTKVKKNAHNVDHASVLACISPEAVISGLNCMSFANVGMSGLSPNGVDLSMEANAIALKYLNENQLSQLSVTRSNQNNCDPFSLLHINTDRSTVGLSLISPNNMSFATKKYMKRYGLLQSSDNSEDEEEPPDNADSKSEYLLNQNLRSIPEQLGGQKEPSKNDHEIINCSNCESVGTNADTPVLRNITNEVLQTKAKQQLTEKPAFLVKNLKPSPAVNLRTGKAEFTQHPEKENEGDITIFPESLQPSETLKQMNSMNSVGTFLDVKRLRQLPKLF

SEQ ID NO: 1894 - protein, 1288 aa, Homo sapiens
MEPIYPFARPQMNTRFPSSRMVPFHFPPSKCALWNPTPTGDFIYLHLSYYRNPKLVVTEKTIRLAYRHAKQNKKNSSCFLLGSLTADEDEEGVTLTVDRFDPGREVPECLEITPTASLPGDFLIPCKVHTQELCSREMIVHSVDDFSSALKALQCHICSKDSLDCGKLLSLRVHITSRESLDSVEFDLHWAAVTLANNFKCTPVKPIPIIPTALARNLSSNLNISQVQGTYKYGYLTMDETRKLLLLLESDPKVYSLPLVGIWLSGITHIYSPQVWACCLRYIFNSSVQERVFSESGNFIIVLYSMTHKEPEFYECFPCDGKIPDFRFQLLTSKETLHLFKNVEPPDKNPIRCELSAESQNAETEFFSKASKNFSIKRSSQKLSSGKMPIHDHDSGVEDEDFSPRPIPSPHPVSQKISKIQPSVPELSLVLDGNFIESNPLPTPLEMVNNENPPLINHLEHLKPLQPQLYDEKHSPEVEAGEPSLRGIPNQLNQDKPALLRHCKVRQPPAYKKGNPHTRNSIKPSSHNGPSHDIFEKLQTVSAGNVQNEEYPIRPSTLNSRQSSLAPQSQPHDFVFSPHNSGRPMELQIPTPPLPSYCSTNVCRCCQHHSHIQYSPLNSWQGANTVGSIQDVQSEALQKHSLFHPSGCPALYCNAFCSSSSPIALRPQGDMGSCSPHSNIEPSPVARPPSHMDLCNPQPCTVCMHTPKTESDNGMMGLSPDAYRFLTEQDRQLRLLQAQIQRLLEAQSLMPCSPKTTAVEDTVQAGRQMELVSVEAQSSPGLHMRKGVSIAVSTGASLFWNAAGEDQEPDSQMKQDDTKISSEDMNFSVDINNEVTSLPGSASSLKAVDIPSFEESNIAVEEEFNQPLSVSNSSSLVVRKEPDVPVFFPSGQLAESVSMCLQTGPTGGASNNSETSEEPKIEHVMQPLLHQPSDNQKIYQDLLGQVNHLLNSSSKETEQPSTKAVIISHECTRTQNVYHTKKKTHHSRLVDKDCVLNATLKQLRSLGVKIDSPTKVKKNAHNVDHASVLACISPEAVISGLNCMSFANVGMSGLSPNGVDLSMEANAIALKYLNENQLSQLSVTRSNQNNCDPFSLLHINTDRSTVGLSLISPNNMSFATKKYMKRYGLLQSSDNSEDEEEPPDNADSKSEYLLNQNLRSIPEQLGGQKEPSKNDHEIINCSNCESVGTNADTPVLRNITNEVLQTKAKQQLTEKPAFLVKNLKPSPAVNLRTGKAEFTQHPEKENEGDITIFPESLQPSETLKQMNSMNSVGTFLDVKRLRQLPKLF

SEQ ID NO: 1895 - protein, 1151 aa, Homo sapiens
MRKFNIRKVLDGLTAGSSSASQQQQQQHPPGNREPEIQETLQSEHFQLCKTVRHGFPYQPSALAFDPVQKILAVGTQTGALRLFGRPGVECYCQHDSGAAVIQLQFLINEGALVSALADDTLHLWNLRQKRPAILHSLKFCRERVTFCHLPFQSKWLYVGTERGNIHIVNVESFTLSGYVIMWNKAIELSSKSHPGPVVHISDNPMDEGKLLIGFESGTVVLWDLKSKKADYRYTYDEAIHSVAWHHEGKQFICSHSDGTLTIWNVRSPAKPVQTITPHGKQLKDGKKPEPCKPILKVEFKTTRSGEPFIILSGGLSYDTVGRRPCLTVMHGKSTAVLEMDYSIVDFLTLCETPYPNDFQEPYAVVVLLEKDLVLIDLAQNGYPIFENPYPLSIHESPVTCCEYFADCPVDLIPALYSVGARQKRQGYSKKEWPINGGNWGLGAQSYPEIIITGHADGSVKFWDASAITLQVLYKLKTSKVFEKSRNKDDRPNTDIVDEDPYAIQIISWCPESRMLCIAGVSAHVIIYRFSKQEVITEVIPMLEVRLLYEINDVETPEGEQPPPLPTPVGGSNPQPIPPQSHPSTSSSSSDGLRDNVPCLKVKNSPLKQSPGYQTELVIQLVWVGGEPPQQITSLAVNSSYGLVVFGNCNGIAMVDYLQKAVLLNLGTIELYGSNDPYRREPRSPRKSRQPSGAGLCDISEGTVVPEDRCKSPTSGSSSPHNSDDEQKMNNFIEKVKTKSRKFSKMVANDIAKMSRKLSLPTDLKPDLDVKDNSFSRSRSSSVTSIDKESREAISALHFCETFTRKTDSSPSPCLWVGTTLGTVLVIALNLPPGGEQRLLQPVIVSPSGTILRLKGAILRMAFLDTTGCLIPPAYEPWREHNVPEEKDEKEKLKKRRPVSVSPSSSQEISENQYAVICSEKQAKVISLPTQNCAYKQNITETSFVLRGDIVALSNSICLACFCANGHIMTFSLPSLRPLLDVYYLPLTNMRIARTFCFTNNGQALYLVSPTEIQRLTYSQETCENLQEMLGELFTPVETPEAPNRGFFKGLFGGGAQSLDREELFGESSSGKASRSLAQHIPGPGGIEGVKGAASGVVGELARARLALDERGQKLGDLEERTAAMLSSAESFSKHAHEIMLKYKDKKWYQF

SEQ ID NO: 1896 - protein, 1115 aa, Homo sapiens
MRKFNIRKVLDGLTAGSSSASQQQQQQHPPGNREPEIQETLQSEHFQLCKTVRHGFPYQPSALAFDPVQKILAVGTQTGALRLFGRPGVECYCQHDSGAAVIQLQFLINEGALVSALADDTLHLWNLRQKRPAILHSLKFCRERVTFCHLPFQSKWLYVGTERGNIHIVNVESFTLSGYVIMWNKAIELSSKSHPGPVVHISDNPMDEGKLLIGFESGTVVLWDLKSKKADYRYTYDEAIHSVAWHHEGKQFICSHSDGTLTIWNVRSPAKPVQTITPHGKQLKDGKKPEPCKPILKVEFKTTRSGEPFIILSGGLSYDTVGRRPCLTVMHGKSTAVLEMDYSIVDFLTLCETPYPNDFQEPYAVVVLLEKDLVLIDLAQNGYPIFENPYPLSIHESPVTCCEYFADCPVDLIPALYSVGARQKRQGYSKKEWPINGGNWGLGAQSYPEIIITGHADGSVKFWDASAITLQVLYKLKTSKVFEKSRNKDDRPNTDIVDEDPYAIQIISWCPESRMLCIAGVSAHVIIYRFSKQEVITEVIPMLEVRLLYEINDVETPEGEQPPPLPTPVGGSNPQPIPPQSHPSTSSSSSDGLRDNVPCLKVKNSPLKQSPGYQTELVIQLVWVGGEPPQQITSLAVNSSYGLVVFGNCNGIAMVDYLQKAVLLNLGTIELYGSNDPYRREPRSPRKSRQPSGAGLCDISEGTVVPEDRCKSPTSAKMSRKLSLPTDLKPDLDVKDNSFSRSRSSSVTSIDKESREAISALHFCETFTRKTDSSPSPCLWVGTTLGTVLVIALNLPPGGEQRLLQPVIVSPSGTILRLKGAILRMAFLDTTGCLIPPAYEPWREHNVPEEKDEKEKLKKRRPVSVSPSSSQEISENQYAVICSEKQAKVISLPTQNCAYKQNITETSFVLRGDIVALSNSICLACFCANGHIMTFSLPSLRPLLDVYYLPLTNMRIARTFCFTNNGQALYLVSPTEIQRLTYSQETCENLQEMLGELFTPVETPEAPNRGFFKGLFGGGAQSLDREELFGESSSGKASRSLAQHIPGPGGIEGVKGAASGVVGELARARLALDERGQKLGDLEERTAAMLSSAESFSKHAHEIMLKYKDKKWYQF

SEQ ID NO: 1897 - protein, 1098 aa, Homo sapiens
MRKFNIRKVLDGLTAGSSSASQQQQQQHPPGNREPEIQETLQSEHFQLCKTVRHGFPYQPSALAFDPVQKILAVGTQTGALRLFGRPGVECYCQHDSGAAVIQLQFLINEGALVSALADDTLHLWNLRQKRPAILHSLKFCRERVTFCHLPFQSKWLYVGTERGNIHIVNVESFTLSGYVIMWNKAIELSSKSHPGPVVHISDNPMDEGKLLIGFESGTVVLWDLKSKKADYRYTYDEAIHSVAWHHEGKQFICSHSDGTLTIWNVRSPAKPVQTITPHGKQLKDGKKPEPCKPILKVEFKTTRSGEPFIILSGGLSYDTVGRRPCLTVMHGKSTAVLEMDYSIVDFLTLCETPYPNDFQEPYAVVVLLEKDLVLIDLAQNGYPIFENPYPLSIHESPVTCCEYFADCPVDLIPALYSVGARQKRQGYSKKEWPINGGNWGLGAQSYPEIIITGHADGSVKFWDASAITLQVLYKLKTSKVFEKSRNKDDRPNTDIVDEDPYAIQIISWCPESRMLCIAGVSAHVIIYRFSKQEVITEVIPMLEVRLLYEINDVETPEGEQPPPLPTPVGGSNPQPIPPQSHPSTSSSSSDGLRDNVPCLKVKNSPLKQSPGYQTELVIQLVWVGGEPPQQITSLAVNSSYGLVVFGNCNGIAMVDYLQKAVLLNLGTIELYGSNDPYRREPRSPRKSRQPSGAGLCDISEGTVVPEDRCKSPTSDVKDNSFSRSRSSSVTSIDKESREAISALHFCETFTRKTDSSPSPCLWVGTTLGTVLVIALNLPPGGEQRLLQPVIVSPSGTILRLKGAILRMAFLDTTGCLIPPAYEPWREHNVPEEKDEKEKLKKRRPVSVSPSSSQEISENQYAVICSEKQAKVISLPTQNCAYKQNITETSFVLRGDIVALSNSICLACFCANGHIMTFSLPSLRPLLDVYYLPLTNMRIARTFCFTNNGQALYLVSPTEIQRLTYSQETCENLQEMLGELFTPVETPEAPNRGFFKGLFGGGAQSLDREELFGESSSGKASRSLAQHIPGPGGIEGVKGAASGVVGELARARLALDERGQKLGDLEERTAAMLSSAESFSKHAHEIMLKYKDKKWYQF

SEQ ID NO: 1898 - protein, 150 aa, Homo sapiens
MSGWIATSKTRMQDFWSLLTFSSDLVDVKDSGDYPLTAPGLSWKKFQGSFCEFVGTLVCRCQYILLHDDFPMDNLISLLTGFSDSQVCAFCHTSTLAAMKLMTSLVRVALQLSLHEDINQRQYEAERNKGPGQRAPERLESLLEKHKELH

SEQ ID NO: 1899 - protein, 79 aa, Homo sapiens
MARSRLTATSVSQVQENGFVKKLEPKSGWMTFLEVTGKICEMLFCPEAILLTRKDTPYCETGLIFLTLTKTIANTYFYF

SEQ ID NO: 1900 - protein, 594 aa, Homo sapiens
MAPIGLKAVVGEKIMHDVIKKVKKKGEWKVLVVDQLSMRMLSSCCKMTDIMTEGITIVEDINKRREPLPSLEAVYLITPSEKSVHSLISDFKDPPTAKYRAAHVFFTDSCPDALFNELVKSRAAKVIKTLTEINIAFLPYESQVYSLDSADSFQSFYSPHKAQMKNPILERLAEQIATLCATLKEYPAVRYRGEYKDNALLAQLIQDKLDAYKADDPTMGEGPDKARSQLLILDRGFDPSSPVLHELTFQAMSYDLLPIENDVYKYETSGIGEARVKEVLLDEDDDLWIALRHKHIAEVSQEVTRSLKDFSSSKRMNTGEKTTMRDLSQMLKKMPQYQKELSKYSTHLHLAEDCMKHYQGTVDKLCRVEQDLAMGTDAEGEKIKDPMRAIVPILLDANVSTYDKIRIILLYIFLKNGITEENLNKLIQHAQIPPEDSEIITNMAHLGVPIVTDSTLRRRSKPERKERISEQTYQLSRWTPIIKDIMEDTIEDKLDTKHYPYISTRSSASFSTTAVSARYGHWHKNKAPGEYRSGPRLIIFILGGVSLNEMRCAYEVTQANGKWEVLIGSTHILTPQKLLDTLKKLNKTDEEISS

SEQ ID NO: 1901 - protein, 603 aa, Homo sapiens [sequence omitted]

SEQ ID NO: 1902 - protein, 416 aa, Homo sapiens
MAHSPVAVQVPGMQNNIADPEELFTKLERIGKGSFGEVFKGIDNRTQQVVAIKIIDLEEAEDEIEDIQQEITVLSQCDSSYVTKYYGSYLKGSKLWIIMEYLGGGSALDLLRAGPFDEFQIATMLKEILKGLDYLHSEKKIHRDIKAANVLLSEQGDVKLADFGVAGQLTDTQIKRNTFVGTPFWMAPEVIQQSAYDSKADIWSLGITAIELAKGEPPNSDMHPMRVLFLIPKNNPPTLVGDFTKSFKEFIDACLNKDPSFRPTAKELLKHKFIVKNSKKTSYLTELIDRFKRWKAEGHSDDESDSEGSDSESTSRENNTHPEWSFTTVRKKPDPKKVQNGAEQDLVQTLSCLSMIITPAFAELKQQDENNASRNQAIEELEKSIAVAEAACPGITDKMVKKLIEKFQKCSADESP

SEQ ID NO: 1903 - protein, 339 aa, Homo sapiens
MAHSPVAVQVPGMQGSKLWIIMEYLGGGSALDLLRAGPFDEFQIATMLKEILKGLDYLHSEKKIHRDIKAANVLLSEQGDVKLADFGVAGQLTDTQIKRNTFVGTPFWMAPEVIQQSAYDSKADIWSLGITAIELAKGEPPNSDMHPMRVLFLIPKNNPPTLVGDFTKSFKEFIDACLNKDPSFRPTAKELLKHKFIVKNSKKTSYLTELIDRFKRWKAEGHSDDESDSEGSDSESTSRENNTHPEWSFTTVRKKPDPKKVQNGAEQDLVQTLSCLSMIITPAFAELKQQDENNASRNQAIEELEKSIAVAEAACPGITDKMVKKLIEKFQKCSADESP

SEQ ID NO: 1904 - protein, 354 aa, Homo sapiens
MAHSPVAVQVPGMQNNIADPEELFTKLERIGKGSFGEVFKGIDNRTQQVVAIKIIDLEEAEDEIEDIQQEITVLSQCDSSYVTKYYGSYLKGSKLWIIMEYLGGGSALDLLRAGPFDEFQIATMLKEILKGLDYLHSEKKIHRDIKAANVLLSEQGDVKLADFGVAGQLTDTQIKRNTFVGTPFWMAPEVIQQSAYDSKRPTAKELLKHKFIVKNSKKTSYLTELIDRFKRWKAEGHSDDESDSEGSDSESTSRENNTHPEWSFTTVRKKPDPKKVQNGAEQDLVQTLSCLSMIITPAFAELKQQDENNASRNQAIEELEKSIAVAEAACPGITDKMVKKLIEKFQKCSADESP

SEQ ID NO: 1905 - protein, 794 aa, Homo sapiens
MAGWIQAQQLQGDALRQMQVLYGQHFPIEVRHYLAQWIESQPWDAIDLDNPQDRAQATQLLEGLVQELQKKAEHQVGEDGFLLKIKLGHYATQLQKTYDRCPLELVRCIRHILYNEQRLVREANNCSSPAGILVDAMSQKHLQINQTFEELRLVTQDTENELKKLQQTQEYFIIQYQESLRIQAQFAQLAQLSPQERLSRETALQQKQVSLEAWLQREAQTLQQYRVELAEKHQKTLQLLRKQQTIILDDELIQWKRRQQLAGNGGPPEGSLDVLQSWCEKLAEIIWQNRQQIRRAEHLCQQLPIPGPVEEMLAEVNATITDIISALVTSTFIIEKQPPQVLKTQTKFAATVRLLVGGKLNVHMNPPQVKATIISEQQAKSLLKNENTRNECSGEILNNCCVMEYHQATGTLSAHFRNMSLKRIKRADRRGAESVTEEKFTVLFESQFSVGSNELVFQVKTLSLPVVVIVHGSQDHNATATVLWDNAFAEPGRVPFAVPDKVLWPQLCEALNMKFKAEVQSNRGLTKENLVFLAQKLFNNSSSHLEDYSGLSVSWSQFNRENLPGWNYTFWQWFDGVMEVLKKHHKPHWNDGAILGFVNKQQAHDLLINKPDGTFLLRFSDSEIGGITIAWKFDSPERNLWNLKPFTTRDFSIRSLADRLGDLSYLIYVFPDRPKDEVFSKYYTPVLAKAVDGYVKPQIKQVVPEFVNASADAGGSSATYMDQAPSPAVCPQAPYNMYPQNPDHVLDQDGEFDLDETMDVARHVEELLRRPMDSLDSRLSPPAGLFTSARGSLS

SEQ ID NO: 1906 - protein, 764 aa, Homo sapiens
MAGWIQAQQLQGDALRQMQVLYGQHFPIEVRHYLAQWIESQPWDAIDLDNPQDRAQATQLLEGLVQELQKKAEHQVGEDGFLLKIKLGHYATQLQCSSPAGILVDAMSQKHLQINQTFEELRLVTQDTENELKKLQQTQEYFIIQYQESLRIQAQFAQLAQLSPQERLSRETALQQKQVSLEAWLQREAQTLQQYRVELAEKHQKTLQLLRKQQTIILDDELIQWKRRQQLAGNGGPPEGSLDVLQSWCEKLAEIIWQNRQQIRRAEHLCQQLPIPGPVEEMLAEVNATITDIISALVTSTFIIEKQPPQVLKTQTKFAATVRLLVGGKLNVHMNPPQVKATIISEQQAKSLLKNENTRNECSGEILNNCCVMEYHQATGTLSAHFRNMSLKRIKRADRRGAESVTEEKFTVLFESQFSVGSNELVFQVKTLSLPVVVIVHGSQDHNATATVLWDNAFAEPGRVPFAVPDKVLWPQLCEALNMKFKAEVQSNRGLTKENLVFLAQKLFNNSSSHLEDYSGLSVSWSQFNRENLPGWNYTFWQWFDGVMEVLKKHHKPHWNDGAILGFVNKQQAHDLLINKPDGTFLLRFSDSEIGGITIAWKFDSPERNLWNLKPFTTRDFSIRSLADRLGDLSYLIYVFPDRPKDEVFSKYYTPVLAKAVDGYVKPQIKQVVPEFVNASADAGGSSATYMDQAPSPAVCPQAPYNMYPQNPDHVLDQDGEFDLDETMDVARHVEELLRRPMDSLDSRLSPPAGLFTSARGSLS

SEQ ID NO: 1907 - protein, 2551 aa, Homo sapiens
MMLQHLVIFCLGLVVQNFCSPAETTGQARRCDRKSLLTIRTECRSCALNLGVKCPDGYTMITSGSVGVRDCRYTFEVRTYSLSLPGCRHICRKDYLQPRCCPGRWGPDCIECPGGAGSPCNGRGSCAEGMEGNGTCSCQEGFGGTACETCADDNLFGPSCSSVCNCVHGVCNSGLDGDGTCECYSAYTGPKCDKPIPECAALLCPENSRCSPSTEDENKLECKCLPNYRGDGKYCDPINPCLRKICHPHAHCTYLGPNRHSCTCQEGYRGDGQVCLPVDPCQINFGNCPTKSTVCKYDGPGQSHCECKEHYQNFVPGVGCSMTDICKSDNPCHRNANCTTVAPGRTECICQKGYVGDGLTCYGNIMERLRELNTEPRGKWQGRLTSFISLLDKAYAWPLSKLGPFTVLLPTDKGLKGFNVNELLVDNKAAQYFVKLHIIAGQMNIEYMNNTDMFYTLTGKSGEIFNSDKDNQIKLKLHGGKKKVKIIQGDIIASNGLLHILDRAMDKLEPTFESNNEQTIMTMLQPRYSKFRSLLEETNLGHALDEDGVGGPYTIFVPNNEALNNMKDGTLDYLLSPEGSRKLLELVRYHIVPFTQLEVATLISTPHIRSMANQLIQFNTTDNGQILANDVAMEEIEITAKNGRIYTLTGVLIPPSIVPILPHRCDETKREMKLGTCVSCSLVYWSRCPANSEPTALFTHRCVYSGRFGSLKSGCARYCNATVKIPKCCKGFYGPDCNQCPGGFSNPCSGNGQCADSLGGNGTCICEEGFQGSQCQFCSDPNKYGPRCNKKCLCVHGTCNNRIDSDGACLTGTCRDGSAGRLCDKQTSACGPYVQFCHIHATCEYSNGTASCICKAGYEGDGTLCSEMDPCTGLTPGGCSRNAECIKTGTGTHTCVCQQGWTGNGRDCSEINNCLLPSAGGCHDNASCLYVGPGQNECECKKGFRGNGIDCEPITSCLEQTGKCHPLASCQSTSSGVWSCVCQEGYEGDGFLCYGNAAVELSFLSEAAIFNRWINNASLQPTLSATSNLTVLVPSQQATEDMDQDEKSFWLSQSNIPALIKYHMLLGTYRVADLQTLSSSDMLATSLQGNFLHLAKVDGNITIEGASIVDGDNAATNGVIHIINKVLVPQRRLTGSLPNLLMRLEQMPDYSIFRGYIIQYNLANAIEAADAYTVFAPNNNAIENYIREKKVLSLEEDVLRYHVVLEEKLLKNDLHNGMHRETMLGFSYFLSFFLHNDQLYVNEAPINYTNVATDKGVIHGLGKVLEIQKNRCDNNDTTIIRGRCRTCSSELTCPFGTKSLGNEKRRCIYTSYFMGRRTLFIGCQPKCVRTVITRECCAGFFGPQCQPCPGNAQNVCFGNGICLDGVNGTGVCECGEGFSGTACETCTEGKYGIHCDQACSCVHGRCNQGPLGDGSCDCDVGWRGVHCDNATTEDNCNGTCHTSANCLTNSDGTASCKCAAGFQGNGTICTAINACEISNGGCSAKADCKRTTPGRRVCTCKAGYTGDGIVCLEINPCLENHGGCDKNAECTQTGPNQAACNCLPAYTGDGKVCTLINVCLTKNGGCSEFAICNHTGQVERTCTCKPNYIGDGFTCRGSIYQELPKNPKTSQYFFQLQEHFVKDLVGPGPFTVFAPLSAAFDEEARVKDWDKYGLMPQVLRYHVVACHQLLLENLKLISNATSLQGEPIVISVSQSTVYINNKAKIISSDIISTNGIVHIIDKLLSPKNLLITPKDNSGRILQNLTTLATNNGYIKFSNLIQDSGLLSVITDPIHTPVTLFWPTDQALHALPAEQQDFLFNQDNKDKLKEYLKFHVIRDAKVLAVDLPTSTAWKTLQGSELSVKCGAGRDIGDLFLNGQTCRIVQRELLFDLGVAYGIDCLLIDPTLGGRCDTFTTFDASGECGSCVNTPSCPRWSKPKGVKQKCLYNLPFKRNLEGCRERCSLVIQIPRCCKGYFGRDCQACPGGPDAPCNNRGVCLDQYSATGECKCNTGFNGTACEMCWPGRFGPDCLPCGCSDHGQCDDGITGSGQCLCETGWTGPSCDTQAVLPAVCTPPCSAHATCKENNTCECNLDYEGDGITCTVVDFCKQDNGGCAKVARCSQKGTKVSCSCQKGYKGDGHSCTEIDPCADGLNGGCHEHATCKMTGPGKHKCECKSHYVGDGLNCEPEQLPIDRCLQDNGQCHADAKCVDLHFQDTTVGVFHLRSPLGQYKLTFDKAREACANEAATMATYNQLSYAQKAKYHLCSAGWLETGRVAYPTAFASQNCGSGVVGIVDYGPRPNKSEMWDVFCYRMKDVNCTCKVGYVGDGFSCSGNLLQVLMSFPSLTNFLTEVLAYSNSSARGRAFLEHLTDLSIRGTLFVPQNSGLGENETLSGRDIEHHLANVSMFFYNDLVNGTTLQTRLGSKLLITASQDPLQPTETRFVDGRAILQWDIFASNGIIHVISRPLKAPPAPVTLTHTGLGAGIFFAIILVTGAVALAAYSYFRINRRTIGFQHFESEEDINVAALGKQQPENISNPLYESTTSAPPEPSYDPFTDSEERQLEGNDPLRTL

SEQ ID NO: 1908 - protein, 100 aa, Homo sapiens
MWGFLVLKARWLVTPVRTLATEAGQKPSLRGLLDVGNIQHRAARARGLTRGVIRVSPQERSQQNQSAPKGPTPSTRPKPRTLGPQAHSLALQSVDLLFRP

SEQ ID NO: 1909 - protein, 313 aa, Homo sapiens
MPGLLLCEPTELYNILNQATKLSRLTDPNYLCLLDVRSKWEYDESHVITALRVKKKNNEYLLPESVDLECVKYCVVYDNNSSTLEILLKDDDDDSDSDGDGKDLVPQAAIEYGRILTRLTHHPVYILKGGYERFSGTYHFLRTQKIIWMPQELDAFQPYPIEIVPGKVFVGNFSQACDPKIQKDLKIKAHVNVSMDTGPFFAGDADKLLHIRIEDSPEAQILPFLRHMCHFIEIHHHLGSVILIFSTQGISRSCAAIIAYLMHSNEQTLQRSWAYVKKCKNNMCPNRGLVSQLLEWEKTILGDSITNIMDPLY

SEQ ID NO: 1910 - protein, 247 aa, Homo sapiens
MPGLLLCEPTELYNILNQATKLSRLTDPNYLCLLDVRSKWEYDESHVITALRVKKKNNEYLLPESVDLECVKYCVVYDNNSSTLEILLKDDDDDSDSDGDGKDLVPQAAIEYGRILTRLTHHPVYILKGGYERFSGTYHFLRTQKIIWMPQELDAFQPYPIEIVPGKVFVGNFSQACDPKIQKDLKIKAHVNVSMDTGPFFAGDADKLLHIRIEDSPEAQILPFLRHMCHFIGYQPQLCRHHSLPHA

SEQ ID NO: 1911 - protein, 318 aa, Homo sapiens
MPGLLLCEPTELYNILNQATKLSRLTDPNYLCLLDVRSKWEYDESHVITALRVKKKNNEYLLPESVDLECVKYCVVYDNNSSTLEILLKDDDDDSDSDGDGKDLVPQAAIEYGRILTRLTHHPVYILKGGYERFSGTYHFLRTQKIIWMPQELDAFQPYPIEIVPGKVFVGNFSQACDPKIQKDLKIKAHVNVSMDTGPFFAGDADKLLHIRIEDSPEAQILPFLRHMCHFIEVLGLCQEVQKQHVSKSGIGEPAAGMGEDYPWRFHHKHHGSALLIFSEAHRRVLKSLTWGHFVGGGPECVYPGLSGRRRPLLPESL

SEQ ID NO: 1912 - protein, 217 aa, Homo sapiens
MPGLLLCEPTELYNILNQATKLSRLTDPNYLCLLDVRSKWEYDESHVITALRVKKELDAFQPYPIEIVPGKVFVGNFSQACDPKIQKDLKIKAHVNVSMDTGPFFAGDADKLLHIRIEDSPEAQILPFLRHMCHFIEIHHHLGSVILIFSTQGISRSCAAIIAYLMHSNEQTLQRSWAYVKKCKNNMCPNRGLVSQLLEWEKTILGDSITNIMDPLY

SEQ ID NO: 1913 - protein, 111 aa, Homo sapiens
MPGLLLCEPTELYNILNQATKLSRLTDPNYLCLLDVRSKWEYDESHVITALRVKKKNNEYLLPESVDLECVKYCVVYDNNSSTLEILLKDDDDDSDSDGDGKGTGCISAIP

SEQ ID NO: 1914 - protein, 424 aa, Homo sapiens
MSDHGDVSLPPEDRVRALSQLGSAVEVNEDIPPRRYFRSGVEIIRMASIYSEEGNIEHAFILYNKYITLFIEKLPKHRDYKSAVIPEKKDTVKKLKEIAFPKAEELKAELLKRYTKEYTEYNEEKKKEAEELARNMAIQQELEKEKQRVAQQKQQQLEQEQFHAFEEMIRNQELEKERLKIVQEFGKVDPGLGGPLVPDLEKPSLDVFPTLTVSSIQPSDCHTTVRPAKPPVVDRSLKPGALSNSESIPTIDGLRHVVVPGRLCPQFLQLASANTARGVETCGILCGKLMRNEFTITHVLIPKQSAGSDYCNTENEEELFLIQDQQGLITLGWIHTHPTQTAFLSSVDLHTHCSYQMMLPESVAIVCSPKFQETGFFKLTDHGLEEISSCRQKGFHPHSKDPPLFCSCSHVTVVDRAVTITDLR

SEQ ID NO: 1915 - protein, 348 aa, Homo sapiens
MSDHGDVSLPPEDRVRALSQLGSAVEVNEDIPPRRYFRSGVEIIRMASIYSEEGNIEHAFILYNKYITLFIEKLPKHRDYKSAVIPEKKDTVKKLKEIAFPKAEELKAELLKRYTKEYTEYNEEKKKEAEELARNMAIQQELEKEKQRVAQQKQQQLEQEQFHAFEEMIRNQELEKERLKIVQEFGKVDPGLGGPLVPDLEKPSLDVFPTLTVSSIQPSDCHTTVRPAKPPVVDRSLKPGALSNSESIPTIDGLRHVVVPGRLCPQFLQLASANTARGVETCGILCGKLMRNEFTITHVLIPKQSAGSDYCNTENEEELFLIQDQQGLITLGWIHVETLWSLKSLHAP

SEQ ID NO: 1916 - protein, 346 aa, Homo sapiens
MTATLAAAADIATMVSGSSGLAAARLLSRSFLLPQNGIRHCSYTASRQHLYVDKNTKIICQGFTGKQGTFHSQQALEYGTKLVGGTTPGKGGQTHLGLPVFNTVKEAKEQTGATASVIYVPPPFAAAAINEAIEAEIPLVVCITEGIPQQDMVRVKHKLLRQEKTRLIGPNCPGVINPGECKIGIMPGHIHKKGRIGIVSRSGTLTYEAVHQTTQVGLGQSLCVGIGGDPFNGTDFIDCLEIFLNDSATEGIILIGEIGGNAEENAAEFLKQHNSGPNSKPVVSFIAGLTAPPGRRMGHAGAIIAGGKGGAKEKISALQSAGVVVSMSPAQLGTTIYKEFEKRKML

SEQ ID NO: 1917 - protein, 1315 aa, Homo sapiens
MEKYHVLEMIGEGSFGRVYKGRRKYSAQVVALKFIPKLGRSEKELRNLQREIEIMRGLRHPNIVHMLDSFETDKEVVVVTDYAEGELFQILEDDGKLPEDQVQAIAAQLVSALYYLHSHRILHRDMKPQNILLAKGGGIKLCDFGFARAMSTNTMVLTSIKGTPLYMSPELVEERPYDHTADLWSVGCILYELAVGTPPFYATSIFQLVSLILKDPVRWPSTISPCFKNFLQGLLTKDPRQRLSWPDLLYHPFIAGHVTIITEPAGPDLGTPFTSRLPPELQVLKDEQAHRLAPKGNQSRILTQAYKRMAEEAMQKKHQNTGPALEQEDKTSKVAPGTAPLPRLGATPQESSLLAGILASELKSSWAKSGTGEVPSAPRENRTTPDCERAFPEERPEVLGQRSTDVVDLENEEPDSDNEWQHLLETTEPVPIQLKAPLTLLCNPDFCQRIQSQLHEAGGQILKGILEGASHILPAFRVLSSLLSSCSDSVALYSFCREAGLPGLLLSLLRHSQESNSLQQQSWYGTFLQDLMAVIQAYFACTFNLERSQTSDSLQVFQEAANLFLDLLGKLLAQPDDSEQTLRRDSLMCFTVLCEAMDGNSRAISKAFYSSLLTTQQVVLDGLLHGLTVPQLPVHTPQGAPQVSQPLREQSEDIPGAISSALAAICTAPVGLPDCWDAKEQVCWHLANQLTEDSSQLRPSLISGLQHPILCLHLLKVLYSCCLVSEGLCRLLGQEPLALESLFMLIQGKVKVVDWEESTEVTLYFLSLLVFRLQNLPCGMEKLGSDVATLFTHSHVVSLVSAAACLLGQLGQQGVTFDLQPMEWMAAATHALSAPAEVRLTPPGSCGFYDGLLILLLQLLTEQGKASLIRDMSSSEMWTVLWHRFSMVLRLPEEASAQEGELSLSSPPSPEPDWTLISPQGMAALLSLAMATFTQEPQLCLSCLSQHGSILMSILKHLLCPSFLNQLRQAPHGSEFLPVVVLSVCQLLCFPFALDMDADLLIGVLADLRDSEVAAHLLQVCCYHLPLMQVELPISLLTRLALMDPTSLNQFVNTVSASPRTIVSFLSVALLSDQPLLTSDLLSLLAHTARVLSPSHLSFIQELLAGSDESYRPLRSLLGHPENSVRAHTYRLLGHLLQHSMALRGALQSQSGLLSLLLLGLGDKDPVVRCSASFAVGNAAYQAGPLGPALAAAVPSMTQLLGDPQAGIRRNVASALGNLGPEGLGEELLQCEVPQRLLEMACGDPQPNVKEAALIALRSLQQEPGIHQVLVSLGASEKLSLLSLGNQSLPHSSPRPASAKHCRKLIHLLRPAHSM

SEQ ID NO: 1918 - protein, 1294 aa, Homo sapiens
MEKYHVLEMIGEGSFGRVYKGRRKYSAQVVALKFIPKLGRSEKELRNLQREIEIMRGLRHPNIVHMLDSFETDKEVVVVTDYAEGELFQILEDDGKLPEDQVQAIAAQLVSALYYLHSHRILHRDMKPQNILLAKGGGIKLCDFGFARAMSTNTMVLTSIKGTPLYMSPELVEERPYDHTADLWSVGCILYELAVGTPPFYATSIFQLVSLILKDPVRWPSTISPCFKNFLQGLLTKDPRQRLSWPDLLYHPFIAGHVTIITEPAGPDLGTPFTSRLPPELQVLKDEQAHRLAPKGNQSRILTQAYKRMAEEAMQKKHQNTGPALEQEDKTSKVAPGTAPLPRLGATPQESSLLAGILASELKSSWAKSGTGEVPSAPRENRTTPDCERAFPEERPEVLGQRSTDVVDLENEEPDSDNEWQHLLETTEPVPIQLKAPLTLLCNPDFCQRIQSQLHEAGGQILKGILEGASHILPAFRVLSSLLSSCSDSVALYSFCREAGLPGLLLSLLRHSQESNSLQQQSWYGTFLQDLMAVIQAYFACTFNLERSQTSDSLQVFQEAANLFLDLLGKLLAQPDDSEQTLRRDSLMCFTVLCEAMDGNSRAISKAFYSSLLTTQQVVLDGLLHGLTVPQLPVHTPQGAPQVSQPLREQSEDIPGAISSALAAICTAPVGLPDCWDAKEQVCWHLANQLTEDSSQLRPSLISGLQHPILCLHLLKVLYSCCLVSEGLCRLLGQEPLALESLFMLIQGKVKVVDWEESTEVTLYFLSLLVFRLQNLPCGMEKLGSDVATLFTHSHVVSLVSAAACLLGQLGQQGVTFDLQPMEWMAAATHALSAPAELLTEQGKASLIRDMSSSEMWTVLWHRFSMVLRLPEEASAQEGELSLSSPPSPEPDWTLISPQGMAALLSLAMATFTQEPQLCLSCLSQHGSILMSILKHLLCPSFLNQLRQAPHGSEFLPVVVLSVCQLLCFPFALDMDADLLIGVLADLRDSEVAAHLLQVCCYHLPLMQVELPISLLTRLALMDPTSLNQFVNTVSASPRTIVSFLSVALLSDQPLLTSDLLSLLAHTARVLSPSHLSFIQELLAGSDESYRPLRSLLGHPENSVRAHTYRLLGHLLQHSMALRGALQSQSGLLSLLLLGLGDKDPVVRCSASFAVGNAAYQAGPLGPALAAAVPSMTQLLGDPQAGIRRNVASALGNLGPEGLGEELLQCEVPQRLLEMACGDPQPNVKEAALIALRSLQQEPGIHQVLVSLGASEKLSLLSLGNQSLPHSSPRPASAKHCRKLIHLLRPAHSM

SEQ ID NO: 1919 - protein, 194 aa, Homo sapiens
MPSSPLRVAVVCSSNQNRSMEAHNILSKRGFSVRSFGTGTHVKLPGPAPDKPNVYDFKTTYDQMYNDLLRKDKELYTQNGILHMLDRNKRIKPRPERFQNCKDLFDLILTCEERVYDQVVEDLNSREQETCQPVHVVNVDIQDNHEEATLGAFLICELCQCIQHTEDMENEIDELLQEFEEKSGRTFLHTVCFY

SEQ ID NO: 1920 - protein, 153 aa, Homo sapiens
MPSSPLRVAVVCSSNQNRSMEAHNILSKRGFSVRSFGTGTHVKLPGPAPDKPNVYDFKTTYDQMYNDLLRKDKELYPSGLPFKNPPCGPPWKVLRVARAQEACHPVQCTHWLLCLCESLVSIPGARRIVHGLVPVPPMAVGVVRRTDTVWGSP

SEQ ID NO: 1921 - protein, 190 aa, Homo sapiens
MSSSALTCGSTLEKSGDTWEMKALDSSRLVPWPPRGLGSSTQHPNKPHCALASCQGPGVLPGAASALPELTFQGDVCQSETCQRYLQAAISLDIAVSQINLLGRPSSPPALLIQQGSCEQVIHNSTPQFLGMEDGDNERTTGWLWRLCEDIDAEPSSTGCSRSNQLTFTEGCFVRSLSTVYSNTHIHTHL

SEQ ID NO: 1922 - protein, 418 aa, Homo sapiens
MSLLDCFCTSRTQVESLRPEKQSETSIHQYLVDEPTLSWSRPSTRASEVLCSTNVSHYELQVEIGRGFDNLTSVHLARHTPTGTLVTIKITNLENCNEERLKALQKAVILSHFFRHPNITTYWTVFTVGSWLWVISPFMAYGSASQLLRTYFPEGMSETLIRNILFGAVRGLNYLHQNGCIHRSIKASHILISGDGLVTLSGLSHLHSLVKHGQRHRAVYDFPQFSTSVQPWLSPELLRQDLHGYNVKSDIYSVGITACELASGQVPFQDMHRTQMLLQKLKGPPYSPLDISIFPQSESRMKNSQSGVDSGIGESVLVSSGTHTVNSDRLHTPSSKTFSPAFFSLVQLCLQQDPEKRPSASSLLSHVFFKQMKEESQDSILSLLPPAYNKPSISLPPVLPWTEPECDFPDEKDSYWEF

SEQ ID NO: 1923 - protein, 377 aa, Homo sapiens
MSLLDCFCTSRTQVESLRPEKQSETSIHQYLVDEPTLSWSRPSTRASEVLCSTNVSHYELQVEIGRGFDNLTSVHLARHTPTGTLVTIKITNLENCNEERLKALQKAVILSHFFRHPNITTYWTVFTVGSWLWVISPFMAYGSASQLLRTYFPEGMSETLIRNILFGAVRGLNYLHQNGCIHRSIKASHILISGDGLVTLSGLSHLHSLVKHGQRHRAVYDFPQFSTSVQPWLSPELLRQDLHGYNVKSDIYSVGITACELASGQVPFQDMHRTQMLLQKLKGPPYSPLDISIFPQSESRMKNSQSGVDSGIGESVLVSSGTHTVNSDRLHTPSSKTFSPAFFSLVQLCLQQDPEKRPSASSLLSHVFFKQPYFEFL

SEQ ID NO: 1924 - protein, 280 aa, Homo sapiens
MAYGSASQLLRTYFPEGMSETLIRNILFGAVRGLNYLHQNGCIHRSIKASHILISGDGLVTLSGLSHLHSLVKHGQRHRAVYDFPQFSTSVQPWLSPELLRQDLHGYNVKSDIYSVGITACELASGQVPFQDMHRTQMLLQKLKGPPYSPLDISIFPQSESRMKNSQSGVDSGIGESVLVSSGTHTVNSDRLHTPSSKTFSPAFFSLVQLCLQQDPEKRPSASSLLSHVFFKQMKEESQDSILSLLPPAYNKPSISLPPVLPWTEPECDFPDEKDSYWEF

SEQ ID NO: 1925 - protein, 183 aa, Homo sapiens
MGVRVHVVAASALLYFILLSGTRCEENCGNPEHCLTTDWVHLWYIWLLVVIGALLLLCGLTSLCFRCCCLSRQQNGEDGGPPPCEVTVIAFDHDSTLQSTITSLQSVFGPAARRILAVAHSHSSLGQLPSSLDTLPGYEEALHMSRFTVAMCGQKAPDLPPVPEEKQLPPTEKESTRIVDSWN

SEQ ID NO: 1926 - protein, 163 aa, Homo sapiens
MSWRPQPCCISSCCLTTDWVHLWYIWLLVVIGALLLLCGLTSLCFRCCCLSRQQNGEDGGPPPCEVTVIAFDHDSTLQSTITSLQSVFGPAARRILAVAHSHSSLGQLPSSLDTLPGYEEALHMSRFTVAMCGQKAPDLPPVPEEKQLPPTEKESTRIVDSWN

SEQ ID NO: 1927 - protein, 797 aa, Homo sapiens
MDELAGGGGGGPGMAAPPRQQQGPGGNLGLSPGGNGAAGGGGPPASEGAGPAAGPELSRPQQYTIPGILHYIQHEWARFEMERAHWEVERAELQARIAFLQGERKGQENLKKDLVRRIKMLEYALKQERAKYHKLKYGTELNQGDLKMPTFESEETKDTEAPTAPQNSQLTWKQGRQLLRQYLQEVGYTDTILDVRSQRVRSLLGLSNSEPNGSVETKNLEQILNGGESPKQKGQEIKRSSGDVLETFNFLENADDSDEDEENDMIEGIPEGKDKHRMNKHKIGNEGLAADLTDDPDTEEALKEFDFLVTAEDGEGAGEARSSGDGTEWDKDDLSPTAEVWDVDQGLISKLKEQYKKERKGKKGVKRANRTKLYDMIADLGDDELPHIPSGIINQSRSASTRMTDHEGARAEEAEPITFPSGGGKSFIMGSDDVLLSVLGLGDLADLTVTNDADYSYDLPANKDAFRKTWNPKYTLRSHFDGVRALAFHPVEPVLVTASEDHTLKLWNLQKTVPAKKSASLDVEPIYTFRAHIGPVLSLAISSNGEQCFSGGIDATIQWWNMPSPSVDPYDTYEPNVLAGTLVGHTDAVWGLAYSGIKNQLLSCSADGTVRLWNPQEKLPCICTYNGDKKHGIPTSVDFIGCDPAHMVTSFNTGSAVIYDLETSQSLVILSSQVDSGLQSNNHINRVVSHPTLPVTITAHEDRHIKFFDNKTGKMIHSMVAHLDAVTSLAVDPNGIYLMSGSHDCSIRLWNLDSKTCVQEITAHRKKLDESIYDVAFHSSKAYIASAGADALAKVFV

SEQ ID NO: 1928 - protein, 713 aa, Homo sapiens
MDELAGGGGGGPGMAAPPRQQQGPGGNLGLSPGGNGAAGGGGPPASEGAGPAAGPELSRPQQYTIPGILHYIQHEWARFEMERAHWEVERAELQARIAFLQGERKGQENLKKDLVRRIKMLEYALKQERAKYHKLKYGTELNQGDLKMPTFESEETKDTEAPTAPQNSQLTWKQGRQLLRQYLQEVGYTDTILDVRSQRVRSLLGLSNSEPNGSVETKNLEQILNGGESPKQKGQEIKRSSGDVLETFNFLENADDSDEDEENDMIEGIPEGKDKHRMNKHKIGNEGLAADLTDDPDTEEALKEFDFLVTAEDGEGAGEARSSGDGTEWAEPITFPSGGGKSFIMGSDDVLLSVLGLGDLADLTVTNDADYSYDLPANKDAFRKTWNPKYTLRSHFDGVRALAFHPVEPVLVTASEDHTLKLWNLQKTVPAKKSASLDVEPIYTFRAHIGPVLSLAISSNGEQCFSGGIDATIQWWNMPSPSVDPYDTYEPNVLAGTLVGHTDAVWGLAYSGIKNQLLSCSADGTVRLWNPQEKLPCICTYNGDKKHGIPTSVDFIGCDPAHMVTSFNTGSAVIYDLETSQSLVILSSQVDSGLQSNNHINRVVSHPTLPVTITAHEDRHIKFFDNKTGKMIHSMVAHLDAVTSLAVDPNGIYLMSGSHDCSIRLWNLDSKTCVQEITAHRKKLDESIYDVAFHSSKAYIASAGADALAKVFV

SEQ ID NO: 1929 - protein, 525 aa, Homo sapiens [sequence omitted]

SEQ ID NO: 1930 - protein, 342 aa, Homo sapiens
MPLFTANPFEQDVEKATNEYNTTEDWSLIMDICDKVGSTPNGAKDCLKAIMKRVNHKVPHVALQALTLLGACVANCGKIFHLEVCSRDFATEVRAVIKNKAHPKVCEKLKSLMVEWSEEFQKDPQFSLISATIKSMKEEGITFPPAGSQTVSAAAKNGTSSNKNKEDEDIAKAIELSLQEQKQQHTETKSLYPSSEIQLNNKVARKVRALYDFEAVEDNELTFKHGEIIIVLDDSDANWWKGENHRGIGLFPSNFVTTNLNIETEAAAVDKLNVIDDDVEEIKKSEPEPVYIDEDKMDRALQVLQSIDPTDSKPDSQDLLDLEDICQQMGPMIDEKLEEIDR

SEQ ID NO: 1931 - protein, 773 aa, Homo sapiens
MIRDLSKMYPQTRHPAPHQPAQPFKFTISESCDRIKEEFQFLQAQYHSLKLECEKLASEKTEMQRHYVMYYEMSYGLNIEMHKQAEIVKRLNAICAQVIPFLSQEHQQQVVQAVERAKQVTMAELNAIIGQQLQAQHLSHGHGLPVPLTPHPSGLQPPAIPPIGSSAGLLALSSALGGQSHLPIKDEKKHHDNDHQRDRDSIKSSSVSPSASFRGAEKHRNSADYSSESKKQKTEEKEIAARYDSDGEKSDDNLVVDVSNEDPSSPRGSPAHSPRENGLDKTRLLKKDAPISPASIASSSSTPSSKSKELSLNEKSTTPVSKSNTPTPRTDAPTPGSNSTPGLRPVPGKPPGVDPLASSLRTPMAVPCPYPTPFGIVPHAGMNGELTSPGAAYAGLHNISPQMSAAAAAAAAAAAYGRSPVVGFDPHHHMRVPAIPPNLTGIPGGKPAYSFHVSADGQMQPVPFPPDALIGPGIPRHARQINTLNHGEVVCAVTISNPTRHVYTGGKGCVKVWDISHPGNKSPVSQLDCLNRDNYIRSCRLLPDGRTLIVGGEASTLSIWDLAAPTPRIKAELTSSAPACYALAISPDSKVCFSCCSDGNIAVWDLHNQTLVRQFQGHTDGASCIDISNDGTKLWTGGLDNTVRSWDLREGRQLQQHDFTSQIFSLGYCPTGEWLAVGMENSNVEVLHVTKPDKYQLHLHESCVLSLKFAHCGKWFVSTGKDNLLNAWRTPYGASIFQSKESSSVLSCDISVDDKYIVTGSGDKKATVYEVIY

SEQ ID NO: 1932 - protein, 704 aa, Homo sapiens
MIRDLSKMYPQTRHPAPHQPAQPFKFTISESCDRIKEEFQFLQAQYHSLKLECEKLASEKTEMQRHYVMYYEMSYGLNIEMHKQAEIVKRLNAICAQVIPFLSQEHQQQVVQAVERAKQVTMAELNAIIGQQLQAQHLSHGHGLPVPLTPHPSGLQPPAIPPIGSSAGLLALSSALGGQSHLPIKDEKKHHDNDHQRDRDSIKSSSVSPSASFRGAEKHRNSADYSSESKKQKTEEKEIAARYNEKSTTPVSKSNTPTPRTDAPTPGSNSTPGLRPVPGKPPGVDPLASSLRTPMAVPCPYPTPFGIVPHAGMNGELTSPGAAYAGLHNISPQMSAAAAAAAAAAAYGRSPVVGFDPHHHMRVPAIPPNLTGIPGGKPAYSFHVSADGQMQPVPFPPDALIGPGIPRHARQINTLNHGEVVCAVTISNPTRHVYTGGKGCVKVWDISHPGNKSPVSQLDCLNRDNYIRSCRLLPDGRTLIVGGEASTLSIWDLAAPTPRIKAELTSSAPACYALAISPDSKVCFSCCSDGNIAVWDLHNQTLVRQFQGHTDGASCIDISNDGTKLWTGGLDNTVRSWDLREGRQLQQHDFTSQIFSLGYCPTGEWLAVGMENSNVEVLHVTKPDKYQLHLHESCVLSLKFAHCGKWFVSTGKDNLLNAWRTPYGASIFQSKESSSVLSCDISVDDKYIVTGSGDKKATVYEVIY

SEQ ID NO: 1933 - protein, 805 aa, Homo sapiens
MIRDLSKMYPQTRHPAPHQPAQPFKFTISESCDRIKEEFQFLQAQYHSLKLECEKLASEKTEMQRHYVMYYEMSYGLNIEMHKQAEIVKRLNAICAQVIPFLSQEHQQQVVQAVERAKQVTMAELNAIIGQQLQAQHLSHGHGLPVPLTPHPSGLQPPAIPPIGSSAGLLALSSALGGQSHLPIKDEKKHHDNDHQRDRDSIKSSSVSPSASFRGAEKHRNSADYSSESKKQKTEEKEIAARYDSDGEKSDDNLVVDVSNEDPSSPRGSPAHSPRENGLDKTRLLKKDAPISPASIASSSSTPSSKSKELSLKRDMGKLSETRLSEDEQCTLGLQRWFCRLWFMNEKSTTPVSKSNTPTPRTDAPTPGSNSTPGLRPVPGKPPGVDPLASSLRTPMAVPCPYPTPFGIVPHAGMNGELTSPGAAYAGLHNISPQMSAAAAAAAAAAAYGRSPVVGFDPHHHMRVPAIPPNLTGIPGGKPAYSFHVSADGQMQPVPFPPDALIGPGIPRHARQINTLNHGEVVCAVTISNPTRHVYTGGKGCVKVWDISHPGNKSPVSQLDCLNRDNYIRSCRLLPDGRTLIVGGEASTLSIWDLAAPTPRIKAELTSSAPACYALAISPDSKVCFSCCSDGNIAVWDLHNQTLVRQFQGHTDGASCIDISNDGTKLWTGGLDNTVRSWDLREGRQLQQHDFTSQIFSLGYCPTGEWLAVGMENSNVEVLHVTKPDKYQLHLHESCVLSLKFAHCGKWFVSTGKDNLLNAWRTPYGASIFQSKESSSVLSCDISVDDKYIVTGSGDKKATVYEVIY

SEQ ID NO: 1934 - protein, 748 aa, Homo sapiens
MIRDLSKMYPQTRHPAPHQPAQPFKFTISESCDRIKEEFQFLQAQYHSLKLECEKLASEKTEMQRHYVMYYEMSYGLNIEMHKQAEIVKRLNAICAQVIPFLSQEQQLQAQHLSHGHGLPVPLTPHPSGLQPPAIPPIGSSAGLLALSSALGGQSHLPIKDEKKHHDNDHQRDRDSIKSSSVSPSASFRGAEKHRNSADYSSESKKQKTEEKEIAARYDSDGEKSDDNLVVDVSNEDPSSPRGSPAHSPRENGLDKTRLLKKDAPISPASIASSSSTPSSKSKELSLNEKSTTPVSKSNTPTPRTDAPTPGSNSTPGLRPVPGKPPGVDPLASSLRTPMAVPCPYPTPFGIVPHAGMNGELTSPGAAYAGLHNISPQMSAAAAAAAAAAAYGRSPVVGFDPHHHMRVPAIPPNLTGIPGGKPAYSFHVSADGQMQPVPFPPDALIGPGIPRHARQINTLNHGEVVCAVTISNPTRHVYTGGKGCVKVWDISHPGNKSPVSQLDCLNRDNYIRSCRLLPDGRTLIVGGEASTLSIWDLAAPTPRIKAELTSSAPACYALAISPDSKVCFSCCSDGNIAVWDLHNQTLVRQFQGHTDGASCIDISNDGTKLWTGGLDNTVRSWDLREGRQLQQHDFTSQIFSLGYCPTGEWLAVGMENSNVEVLHVTKPDKYQLHLHESCVLSLKFAHCGKWFVSTGKDNLLNAWRTPYGASIFQSKESSSVLSCDISVDDKYIVTGSGDKKATVYEVIY

SEQ ID NO: 1935 - protein, 167 aa, Homo sapiens
MIITTWIVYILARKGVGLPFLPITSSDIDVVESEAVSVLHHWLKKTEEEASRGIKEKLSINHPSQGVREKMSTDSPPTHGQDIHVTRDVVKHHLSKSDLLANQSQEVLEERTRIQFIRWSHTRIFQVPSEMTEDIMRDRIEQVRRSISRLTDVSAQDFSMRPSSSDC

SEQ ID NO: 1936 - protein, 139 aa, Homo sapiens
MVTHAAGARTFCEEQKKGSTYSVPKSKEKLMEKHSQEARQADRESEKPVDSLHPGAGTAKHPPPAASLEEKPDVKQKSSRKKVVVPQIIITRASNETLVSCSSSGSDQQRTIREPEDWGPYRRHRNPSTADAYNSHLKE

SEQ ID NO: 1937 - protein, 140 aa, Homo sapiens
MGLSKSKEKPRKGEEQKKGSTYSVPKSKEKLMEKHSQEARQADRESEKPVDSLHPGAGTAKHPPPAASLEEKPDVKQKSSRKKVVVPQIIITRASNETLVSCSSSGSDQQRTIREPEDWGPYRRHRNPSTADAYNSHLKE

SEQ ID NO: 1938 - protein, 469 aa, Homo sapiens
MDNRNTQMYTEEEKTVNPFLPSTPGPKKAKGGGEAVETHPAPGPLPPPEVRDIGERREPDRAQQQPQKPAVAAGTQSLGNFRQGFMKCLLEVEKMEASHRRASKARSQTAQKSPRTLTPVPTSAPSLPQTPASVPASGPSWARLPAPGPEPAPMGAPVPTSMPCPVLLGPALDLGWRRMELLHQSSERTLSYAKARQEPEEQSLQKLYQNREKSEEQLTLKQEEAFRSYFEIFNGPGEVDAQSLKNILLLMGFSVTLAQVEDALMSADVNGDGRVDFKDFLAVMTDTRRFFCSVEQNALSDMAPHNPHTLLFEILSLLVEMLALPEAVLEEITNYYQKKLKEGTCKAQEMEAAVGRLRLQKLPYNPQQEESSEVPERKVLSILSRLKQQNYAPNLQSPYAQVPCILLCPQLDKKMVRRQPSNHYALDQCTPPGLDPDIRSPFFQSGSQGNREHNSDSRKWLSSVPARTH

SEQ ID NO: 1939 - protein, 446 aa, Homo sapiens
MAQPGAVEHACHPSTLGGQGGGSLEEVRDIGERREPDRAQQQPQKPAVAAGTQSLGNFRQGFMKCLLEVEKMEASHRRASKARSQTAQKSPRTLTPVPTSAPSLPQTPASVPASGPSWARLPAPGPEPAPMGAPVPTSMPCPVLLGPALDLGWRRMELLHQSSERTLSYAKARQEPEEQSLQKLYQNREKSEEQLTLKQEEAFRSYFEIFNGPGEVDAQSLKNILLLMGFSVTLAQVEDALMSADVNGDGRVDFKDFLAVMTDTRRFFCSVEQNALSDMAPHNPHTLLFEILSLLVEMLALPEAVLEEITNYYQKKLKEGTCKAQEMEAAVGRLRLQKLPYNPQQEESSEVPERKVLSILSRLKQQNYAPNLQSPYAQVPCILLCPQLDKKMVRRQPSNHYALDQCTPPGLDPDIRSPFFQSGSQGNREHNSDSRKWLSSVPARTH

SEQ ID NO: 1940 - protein, 1700 aa, Homo sapiens
MDGNSLLSVPSNLESSRMYDVLEPQQGRGCGSSGSGPGNSITACKKVLRSNSLLESTDYWLQNQRMPCQIGFVEDKSENCASVCFVNLDVNKDECSTEHLQQKLVNVSPDLPKLISSMNVQQPKENEIVVLSGLASGNLQADFEVSQCPWLPDICLVQCARGNRPNSTNCIIFEINKFLIGLELVQERQLHLETNILKLEDDTNCSLSSIEEDFLTASEHLEEESEVDESRNDYENINVSANVLESKQLKGATQVEWNCNKEKWLYALEDKYINKYPTPLIKTERSPENLTKNTALQSLDPSAKPSQWKREAVGNGRQATHYYHSEAFKGQMEKSQALYIPKDAYFSMMDKDVPSACAVAEQRSNLNPGDHEDTRNALPPRQDGEVTTGKYATNLAESVLQDAFIRLSQSQSTLPQESAVSVSVGSSLLPSCYSTKDTVVSRSWNELPKIVVVQSPDGSDAAPQPGISSWPEMEVSVETSSILSGENSSRQPQSALEVALACAATVIGTISSPQATERLKMEQVVSNFPPGSSGALQTQAPQGLKEPSINEYSFPSALCGMTQVASAVAVCGLGEREEVTCSVAPSGSLPPAAEASEAMPPLCGLASMELGKEAIAKGLLKEAALVLTRPNTYSSIGDFLDSMNRRIMETASKSQTLCSENVVRNELAHTLSNVILRHSIDEVHHKNMIIDPNDNRHSSEILDTLMESTNQLLLDVICFTFKKMSHIVRLGECPAVLSKETIRRRETEPSCQPSDPGASQAWTKATESSSSSPLSNSHNTSLVINNLVDGMYSKQDKGGVRPGLFKNPTLQSQLSRSHRVPDSSTATTSSKEIYLKGIAGEDTKSPHHSENECRASSEGQRSPTVSQSRSGSQEAEESIHPNTQEKYNCATSRINEVQVNLSLLGDDLLLPAQSTLQTKHPDIYCITDFAEELADTVVSMATEIAAICLDNSSGKQPWFCAWKRGSEFLMTPNVPCRSLKRKKESQGSGTAVRKHKPPRLSEIKRKTDEHPELKEKLMNRVVDESMNLEDVPDSVNLFANEVAAKIMNLTEFSMVDGMWQAQGYPRNRLLSGDRWSRLKASSCESIPEEDSEARAYVNSLGLMSTLSQPVSRASSVSKQSSCESITDEFSRFMVNQMENEGRGFELLLDYYAGKNASSILNSAMQQACRKSDHLSVRPSCPSKQSSTESITEEFYRYMLRDIERDSRESASSRRSSQDWTAGLLSPSLRSPVCHRQSSMPDSRSPCSRLTVNVPIKANSLDGFAQNCPQDFLSVQPVSSASSSGLCKSDSCLYRRGGTDHITNMLIHETWASSIEALMRKNKIIVDDAEEADTEPVSGGSPSQAEKCANRLAASRMCSGPTLLVQESLDCPRKDSVTECKQPPVSSLSKTASLTNHSPLDSKKETSSCQDPVPINHKRRSLCSREVPLIQIETDQREACAGEPEPFLSKSSLLEEAEGHSNDKNIPDVVRGGDTAVSACQIHSDSLDTRDVPEAEASTEARAPDEAPNPPSSSEESTGSWTQLANEEDNPDDTSSFLQLSERSMSNGNSSATSSLGIMDLDIYQESMPSSPMINELVEEKKILKGQSESTEAPASGPPTGTASPQRSLLVINFDLEPECPDAELRATLQWIAASELGIPTIYFKKSQENRIEKFLDVVQLVHRKSWKVGDIFHAVVQYCKMHEEQKDGRLSLFDWLLELG

SEQ ID NO: 1941 - protein, 1671 aa, Homo sapiens
MDGNSLLSVPSNLESSRMYDVLEPQQGRGCGSSGSGPGNSITACKKVLRSNSLLESTDYWLQNQRMPCQIGFVEDKSENCASVCFVNLDVNKDECSTEHLQQKLVNVSPDLPKLISSMNVQQPKENEIVVLSGLASGNLQADFEVSQCPWLPDICLVQCARGNRPNSTNCIIFEINKFLIGLELVQERQLHLETNILKLEDDTNCSLSSIEEDFLTASEHLEEESEVDESRNDYENINVSANVLESKQLKGATQVEWNCNKEKWLYALEDKYINKYPTPLIKTERSPENLTKNTALQSLDPSAKPSQWKREAVGNGRQATHYYHSEAFKGQMEKSQALYIPKDAYFSMMDKDVPSACAVAEQRSNLNPGDHEDTRNALPPRQDGEVTTGKYATNLAESVLQDAFIRLSQSQSTLPQESAVSVSVGSSLLPSCYSTKDTVVSRSWNELPKIVVVQSPDGSDAAPQPGISSWPEMEVSVETSSILSGENSSRQPQSALEVALACAATVIGTISSPQATERLKMEQVVSNFPPGSSGALQTQAPQGLKEPSINEYSFPSALCGMTQVASAVAVCGLGEREEVTCSVAPSGSLPPAAEASEAMPPLCGLASMELGKEAIAKGLLKEAALVLTRPNTYSSIGDFLDSMNRRIMETASKSQTLCSENVVRNELAHTLSNVILRHSIDEVHHKNMIIDPNDNRHSSEILDTLMESTNQLLLDVICFTFKKMSHIVRLGECPAVLSKETIRRRETEPSCQPSDPGASQAWTKATESSSSSPLSNSHNTSLVINNLVDGMYSKQDKGGVRPGLFKNPTLQSQLSRSHRVPDSSTATTSSKEIYLKGIAGEDTKSPHHSENECRASSEGQRSPTVSQSRSGSQEAEESIHPNTQEKYNCATSRINEVQVNLSLLGDDLLLPAQSTLQTKHPDIYCITDFAEELADTVVSMATEIAAICLDNSSGKQPWFCAWKRGSEFLMTPNVPCRSLKRKKESQGSGTAVRKHKPPRLSEIKRKTDEHPELKEKLMNRVVDESMNLEDVPDSVNLFANEVAAKIMNLTEFSMVDGMWQAQGYPRNRLLSGDRWSRLKASSCESIPEEDSEARAYVNSLGLMSTLSQPVSRASSVSKQSSCESITDEFSRFMVNQMENEGRGFELLLDYYAGKNASSILNSAMQQACRKSDHLSVRPSCPSKQSSTESITEEFYRYMLRDIERDSRESASSRRSSQDWTAGLLSPSLRSPVCHRQSSMPDSRSPCSRLTVNVPIKANSLDGFAQNCPQDFLSVQPVSSASSSGLCKSDSCLYRRGGTDHITNMLIHETWASSIEALMRKNKIIVDDAEEADTEPVSGGSPSQAEKCANRLAASRMCSGPTLLVQESLDCPRKDSVTECKQPPVSSLSKTASLTNHSPLDSKKETSSCQDPVPINHKRRSLCSREVPLIQIETDQREACAGEPEPFLSKSSLLEEAEGHSNDKNIPDVVRGGDTAVSACQIHSDSLDTRDVPEAEASTEARAPDEAPNPPSSSEESTGSWTQLANEEDNPDDTSSFLQLSERSMSELVEEKKILKGQSESTEAPASGPPTGTASPQRSLLVINFDLEPECPDAELRATLQWIAASELGIPTIYFKKSQENRIEKFLDVVQLVHRKSWKVGDIFHAVVQYCKMHEEQKDGRLSLFDWLLELG

SEQ ID NO: 1942 - protein, 1087 aa, Homo sapiens
MSDSEDSNFSEEEDSERSSDGEEAEVDEERRSAAGSEKEEEPEDEEEEEEEEEYDEEEEEEDDDRPPKKPRHGGFILDEADVDDEYEDEDQWEDGAEDILEKEEIEASNIDNVVLDEDRSGARRLQNLWRDQREEELGEYYMKKYAKSSVGETVYGGSDELSDDITQQQLLPGVKDPNLWTVKCKIGEERATAISLMRKFIAYQFTDTPLQIKSVVAPEHVKGYIYVEAYKQTHVKQAIEGVGNLRLGYWNQQMVPIKEMTDVLKVVKEVANLKPKSWVRLKRGIYKDDIAQVDYVEPSQNTISLKMIPRIDYDRIKARMSLKDWFAKRKKFKRPPQRLFDAEKIRSLGGDVASDGDFLIFEGNRYSRKGFLFKSFAMSAVITEGVKPTLSELEKFEDQPEGIDLEVVTESTGKEREHNFQPGDNVEVCEGELINLQGKILSVDGNKITIMPKHEDLKDMLEFPAQELRKYFKMGDHVKVIAGRFEGDTGLIVRVEENFVILFSDLTMHELKVLPRDLQLCSETASGVDVGGQHEWGELVQLDPQTVGVIVRLERETFQVLNMYGKVVTVRHQAVTRKKDNRFAVALDSEQNNIHVKDIVKVIDGPHSGREGEIRHLFRSFAFLHCKKLVENGGMFVCKTRHLVLAGGSKPRDVTNFTVGGFAPMSPRISSPMHPSAGGQRGGFGSPGGGSGGMSRGRGRRDNELIGQTVRISQGPYKGYIGVVKDATESTARVELHSTCQTISVDRQRLTTVGSRRPGGMTSTYGRTPMYGSQTPMYGSGSRTPMYGSQTPLQDGSRTPHYGSQTPLHDGSRTPAQSGAWDPNNPNTPSRAEEEYEYAFDDEPTPSPQAYGGTPNPQTPGYPDPSSPQVNPQYNPQTPGTPAMYNTDQFSPYAAPSPQGSYQPSPSPQSYHQVAPSPAGYQNTHSPASYHPTPSPMAYQASPSPSPVGYSPMTPGAPSPGGYNPHTPGSGIEQNSSDWVTTDIQVKVRDTYLDTQVVGQTGVIRSVTGGMCSVYLKDSEKVVSISSEHLEPITPTKNNKVKVILGEDREATGVLLSIDGEDGIVRMDLDEQLKILNLRFLGKLLEA

SEQ ID NO: 1943 - protein, 1083 aa, Homo sapiens
MSDSEDSNFSEEEDSERSSDGEEAEVDEERRSAAGSEKEEEPEDEEEEEEEEEYDEEEEEEDDDRPPKKPRHGGFILDEADVDDEYEDEDQWEDGAEDILEKASNIDNVVLDEDRSGARRLQNLWRDQREEELGEYYMKKYAKSSVGETVYGGSDELSDDITQQQLLPGVKDPNLWTVKCKIGEERATAISLMRKFIAYQFTDTPLQIKSVVAPEHVKGYIYVEAYKQTHVKQAIEGVGNLRLGYWNQQMVPIKEMTDVLKVVKEVANLKPKSWVRLKRGIYKDDIAQVDYVEPSQNTISLKMIPRIDYDRIKARMSLKDWFAKRKKFKRPPQRLFDAEKIRSLGGDVASDGDFLIFEGNRYSRKGFLFKSFAMSAVITEGVKPTLSELEKFEDQPEGIDLEVVTESTGKEREHNFQPGDNVEVCEGELINLQGKILSVDGNKITIMPKHEDLKDMLEFPAQELRKYFKMGDHVKVIAGRFEGDTGLIVRVEENFVILFSDLTMHELKVLPRDLQLCSETASGVDVGGQHEWGELVQLDPQTVGVIVRLERETFQVLNMYGKVVTVRHQAVTRKKDNRFAVALDSEQNNIHVKDIVKVIDGPHSGREGEIRHLFRSFAFLHCKKLVENGGMFVCKTRHLVLAGGSKPRDVTNFTVGGFAPMSPRISSPMHPSAGGQRGGFGSPGGGSGGMSRGRGRRDNELIGQTVRISQGPYKGYIGVVKDATESTARVELHSTCQTISVDRQRLTTVGSRRPGGMTSTYGRTPMYGSQTPMYGSGSRTPMYGSQTPLQDGSRTPHYGSQTPLHDGSRTPAQSGAWDPNNPNTPSRAEEEYEYAFDDEPTPSPQAYGGTPNPQTPGYPDPSSPQVNPQYNPQTPGTPAMYNTDQFSPYAAPSPQGSYQPSPSPQSYHQVAPSPAGYQNTHSPASYHPTPSPMAYQASPSPSPVGYSPMTPGAPSPGGYNPHTPGSGIEQNSSDWVTTDIQVKVRDTYLDTQVVGQTGVIRSVTGGMCSVYLKDSEKVVSISSEHLEPITPTKNNKVKVILGEDREATGVLLSIDGEDGIVRMDLDEQLKILNLRFLGKLLEA

SEQ ID NO: 1944 - protein, 570 aa, Homo sapiens
MANPKEKTAMCLVNELARFNRVQPQYKLLNERGPAHSKMFSVQLSLGEQTWESEGSSIKKAQQAVANKALTESTLPKPVQKPPKSNVNNNPGSITPTVELNGLAMKRGEPAIYRPLDPKPFPNYRANYNFRGMYNQRYHCPVPKIFYVQLTVGNNEFFGEGKTRQAARHNAAMKALQALQNEPIPERSPQNGESGKDVDDDKDANKSEISLVFEIALKRNMPVSFEVIKESGPPHMKSFVTRVSVGEFSAEGEGNSKKLSKKRAATTVLQELKKLPPLPVVEKPKLFFKKRPKTIVKAGPEYGQGMNPISRLAQIQQAKKEKEPDYVLLSERGMPRRREFVMQVKVGNEVATGTGPNKKIAKKNAAEAMLLQLGYKASTNLQDQLEKTGENKGWSGPKPGFPEPTNNTPKGILHLSPDVYQEMEASRHKVISGTTLGYLSPKDMNQPSSSFFSISPTSNSSATIARELLMNGTSSTAEAIGLKGSSPTPPCSPVQPSKQLEYLARIQGFQAALSALKQFSEQGLDPIDGAMNIEKGSLEKQAKHLREKADNNQAPPGSIAQDCKKSNSAV

SEQ ID NO: 1945 - protein, 538 aa, Homo sapiens
MLQINQMFSVQLSLGEQTWESEGSSIKKAQQAVANKALTESTLPKPVQKPPKSNVNNNPGSITPTVELNGLAMKRGEPAIYRPLDPKPFPNYRANYNFRGMYNQRYHCPVPKIFYVQLTVGNNEFFGEGKTRQAARHNAAMKALQALQNEPIPERSPQNGESGKDVDDDKDANKSEISLVFEIALKRNMPVSFEVIKESGPPHMKSFVTRVSVGEFSAEGEGNSKKLSKKRAATTVLQELKKLPPLPVVEKPKLFFKKRPKTIVKAGPEYGQGMNPISRLAQIQQAKKEKEPDYVLLSERGMPRRREFVMQVKVGNEVATGTGPNKKIAKKNAAEAMLLQLGYKASTNLQDQLEKTGENKGWSGPKPGFPEPTNNTPKGILHLSPDVYQEMEASRHKVISGTTLGYLSPKDMNQPSSSFFSISPTSNSSATIARELLMNGTSSTAEAIGLKGSSPTPPCSPVQPSKQLEYLARIQGFQAALSALKQFSEQGLDPIDGAMNIEKGSLEKQAKHLREKADNNQAPPGSIAQDCKKSNSAV

SEQ ID NO: 1946 - protein, 479 aa, Homo sapiens
MLQINQMFSVQLSLGEQTWESEGSSIKKAQQAVANKALTESTLPKPVQKPPKSNVNNNPGSITPTVELNGLAMKRGEPAIYRPLDPKPFPNYRANYNFRGMYNQRYHCPVPKIFYVQLTVGNNEFFGEGKTRQAARHNAAMKALQALQNEPIPERSPQNGESGKDVDDDKDANKSEISLVFEIALKRNMPVSFEVIKESGPPHMKSFVTRVSVGEFSAEGEGNSKKLSKKRAATTVLQELKKLPPLPVVEKPKLFFKKRPKTIVKAGPEYGQGMNPISRLAQIQQAKKEKEPDYVLLSERGMPRRREFVMQVKVGNEVATGTGPNKKIAKKNAAEAMLLQLGYKASTNLQDQLEKTGENKGWSGPKPGFPEPTNNTPKGILHLSPDVYQEMEASRHKVISGTTLGYLSPKDMNQPSSSFFSISPTSNSSATIARELLMNGTSSTAEAIGLKGSSPTPPCSPVQPSKQLEYLARIQGFQV

SEQ ID NO: 1947 - protein, 291 aa, Homo sapiens
MPVSFEVIKESGPPHMKSFVTRVSVGEFSAEGEGNSKKLSKKRAATTVLQELKKLPPLPVVEKPKLFFKKRPKTIVKAGPEYGQGMNPISRLAQIQQAKKEKEPDYVLLSERGMPRRREFVMQVKVGNEVATGTGPNKKIAKKNAAEAMLLQLGYKASTNLQDQLEKTGENKGWSGPKPGFPEPTNNTPKGILHLSPDVYQEMEASRHKVISGTTLGYLSPKDMNQPSSSFFSISPTSNSSATIARELLMNGTSSTAEAIGLKGSSPTPPCSPVQPSKQLEYLARIQGFQV

SEQ ID NO: 1948 - protein, 105 aa, Homo sapiens
MLQINQMFSVQLSLGEQTWESEGSSIKKAQQAVANKALTESTLPKPVQKPPKSNVNNNPGSITPTVELNGLAMKRGEPAIYRPLDPKPFPNYRANYNFRGMYNQR

SEQ ID NO: 1949 - protein, 398 aa, Homo sapiens
MKALQALQNEPIPERSPQNGESGKDVDDDKDANKSEISLVFEIALKRNMPVSFEVIKESGPPHMKSFVTRVSVGEFSAEGEGNSKKLSKKRAATTVLQELKKLPPLPVVEKPKLFFKKRPKTIVKAGPEYGQGMNPISRLAQIQQAKKEKEPDYVLLSERGMPRRREFVMQVKVGNEVATGTGPNKKIAKKNAAEAMLLQLGYKASTNLQDQLEKTGENKGWSGPKPGFPEPTNNTPKGILHLSPDVYQEMEASRHKVISGTTLGYLSPKDMNQPSSSFFSISPTSNSSATIARELLMNGTSSTAEAIGLKGSSPTPPCSPVQPSKQLEYLARIQGFQAALSALKQFSEQGLDPIDGAMNIEKGSLEKQAKHLREKADNNQAPPGSIAQDCKKSNSAV

SEQ ID NO: 1950 - protein, 504 aa, Homo sapiens
MKRGEPAIYRPLDPKPFPNYRANYNFRGMYNQRYHCPVPKIFYVQLTVGNNEFFGEGKTRQAARHNAAMKALQALQNEPIPERSPQNGESGKDVDDDKDANKSEISLVFEIALKRNMPVSFEVIKESGPPHMKSFVTRVSVGEFSAEGEGNSKKLSKKRAATTVLQELKKLPPLPVVEKPKLFFKKRPKTIVKAGPEYGQGMNPISRLAQIQQAKKEKEPDYVLLSERGMPRRREFVMQVKVGNEVATGTGPNKKIAKKNAAEAMLLQLGYKASTNLQDQLEKTGENKGWSGPKPGFPEPTNNTPKGILHLSPDVYQEMEASRHKVISGTTLGYLSPKDMNQPSSSFFSISPTSNSSATIARELLMNGTSSTAEAIGLKGSSPTPPCSPVQPSKQLEYLARIQGFQVHYCDRQSGKECVTCLTLAPVQMTFHAIGSSIEASHDQAALSALKQFSEQGLDPIDGAMNIEKGSLEKQAKHLREKADNNQAPPGSIAQDCKKSNSAV

SEQ ID NO: 1951 - protein, 473 aa, Homo sapiens
MFSVQLSLGEQTWESEGSSIKKAQQAVANKALTESTLPKPVQKPPKSNVNNNPGSITPTVELNGLAMKRGEPAIYRPLDPKPFPNYRANYNFRGMYNQRYHCPVPKIFYVQLTVGNNEFFGEGKTRQAARHNAAMKALQALQNEPIPERSPQNGESGKDVDDDKDANKSEISLVFEIALKRNMPVSFEVIKESGPPHMKSFVTRVSVGEFSAEGEGNSKKLSKKRAATTVLQELKKLPPLPVVEKPKLFFKKRPKTIVKAGPEYGQGMNPISRLAQIQQAKKEKEPDYVLLSERGMPRRREFVMQVKVGNEVATGTGPNKKIAKKNAAEAMLLQLGYKASTNLQDQLEKTGENKGWSGPKPGFPEPTNNTPKGILHLSPDVYQEMEASRHKVISGTTLGYLSPKDMNQPSSSFFSISPTSNSSATIARELLMNGTSSTAEAIGLKGSSPTPPCSPVQPSKQLEYLARIQGFQV

SEQ ID NO: 1952 - protein, 739 aa, Homo sapiens
MAPQKHGGGGGGGSGPSAGSGGGGFGGSAAVAAATASGGKSGGGSCGGGGSYSASSSSSAAAAAGAAVLPVKKPKMEHVQADHELFLQAFEKPTQIYRFLRTRNLIAPIFLHRTLTYMSHRNSRTNIKRKTFKVDDMLSKVEKMKGEQESHSLSAHLQLTFTGFFHKNDKPSPNSENEQNSVTLEVLLVKVCHKKRKDVSCPIRQVPTGKKQVPLNPDLNQTKPGNFPSLAVSSNEFEPSNSHMVKSYSLLFRVTRPGRREFNGMINGETNENIDVNEELPARRKRNREDGEKTFVAQMTVFDKNRRLQLLDGEYEVAMQEMEECPISKKRATWETILDGKRLPPFETFSQGPTLQFTLRWTGETNDKSTAPIAKPLATRNSESLHQENKPGSVKPTQTIAVKESLTTDLQTRKEKDTPNENRQKLRIFYQFLYNNNTRQQTEARDDLHCPWCTLNCRKLYSLLKHLKLCHSRFIFNYVYHPKGARIDVSINECYDGSYAGNPQDIHRQPGFAFSRNGPVKRTPITHILVCRPKRTKASMSEFLESEDGEVEQQRTYSSGHNRLYFHSDTCLPLRPQEMEVDSEDEKDPEWLREKTITQIEEFSDVNEGEKEVMKLWNLHVMKHGFIADNQMNHACMLFVENYGQKIIKKNLCRNFMLHLVSMHDFNLISIMSIDKAVTKLREMQQKLEKGESASPANEEITEEQNGTANGFSEINSKEKALETDSVSGVSKQSKKQKL

SEQ ID NO: 1953 - protein, 742 aa, Homo sapiens
MEEGFRDRAAFIRGAKDIAKEVKKHAAKKVVKGLDRVQDEYSRRSYSRFEEEDDDDDFPAPSDGYYRGEGTQDEEEGGASSDATEGHDEDDEIYEGEYQGIPRAESGGKGERMADGAPLAGVRGGLSDGEGPPGGRGEAQRRKEREELAQQYEAILRECGHGRFQWTLYFVLGLALMADGVEVFVVGFVLPSAEKDMCLSDSNKGMLGLIVYLGMMVGAFLWGGLADRLGRRQCLLISLSVNSVFAFFSSFVQGYGTFLFCRLLSGVGIGGSIPIVFSYFSEFLAQEKRGEHLSWLCMFWMIGGVYAAAMAWAIIPHYGWSFQMGSAYQFHSWRVFVLVCAFPSVFAIGALTTQPESPRFFLENGKHDEAWMVLKQVHDTNMRAKGHPERVFSVTHIKTIHQEDELIEIQSDTGTWYQRWGVRALSLGGQVWGNFLSCFGPEYRRITLMMMGVWFTMSFSYYGLTVWFPDMIRHLQAVDYASRTKVFPGERVEHVTFNFTLENQIHRGGQYFNDKFIGLRLKSVSFEDSLFEECYFEDVTSSNTFFRNCTFINTVFYNTDLFEYKFVNSRLINSTFLHNKEGCPLDVTGTGEGAYMVYFVSFLGTLAVLPGNIVSALLMDKIGRLRMLAGSSVMSCVSCFFLSFGNSESAMIALLCLFGGVSIASWNALDVLTVELYPSDKRTTAFGFLNALCKLAAVLGISIFTSFVGITKAAPILFASAALALGSSLALKLPETRGQVLQ

SEQ ID NO: 1954 - protein, 682 aa, Homo sapiens
MEEGFRDRAAFIRGAKDIAKEVKKHAAKKVVKGLDRVQDEYSRRSYSRFEEEDDDDDFPAPSDGYYRGEGTQDEEEGGASSDATEGHDEDDEIYEGEYQGIPRAESGGKGERMADGAPLAGVRGGLSDGEGPPGGRGEAQRRKEREELAQQYEAILRECGHGRFQWTLYFVLGLALMADGVEVFVVGFVLPSAEKDMCLSDSNKGMLGLIVYLGMMVGAFLWGGLADRLGRRQCLLISLSVNSVFAFFSSFVQGYGTFLFCRLLSGVGIGGSIPIVFSYFSEFLAQEKRGEHLSWLCMFWMIGGVYAAAMAWAIIPHYGWSFQMGSAYQFHSWRVFVLVCAFPSVFAIGALTTQPESPRFFLENGKHDEAWMVLKQVHDTNMRAKGHPERVFSVTHIKTIHQEDELIEIQSDTGTWYQRWGVRALSLGGQVWGNFLSCFGPEYRRITLMMMGVWFTMSFSYYGLTVWFPDMIRHLQAVDYASRTKVFPGERVEHVTFNFTLENQIHRGGQYFNDKFIGLRLKSVSFEDSLFEECYFEDVTSSNTFFRNCTFINTVFYNTDLFEYKFVNSRLINSTFLHNKEGCPLDVTGTGEGAYMVYFVSFLGTLAVLPGNIVSALLMDKIGRLRMLAGSSVMSCVSCFFLSFGNSESAMIALLCLFGGVSIASWNALDVLTVELYPSDKR

SEQ ID NO: 1955 - protein, 173 aa, Homo sapiens
DKQLDADVSPKPTIFLPSIAETKLQKAGTYLCLLEKFFPDVIKIHWQEKKSNTILGSQEGNTMKTNDTYMKFSWLTVPEKSLDKEHRCIVRHENNKNGVDQEIIFPPIKTDVITMDPKDNCSKDANDTLLLQLTNTSAYYMYLLLLLKSVVYFAIITCCLLRRTAFCCNGEKS

SEQ ID NO: 1956 - protein, 247 aa, Homo sapiens
MLQNSAVLLVLVISASATHEAEQNDSVSPRKSRVAAQNSAEVVRCLNSALQVGCGAFACLENSTCDTDGMYDICKSFLYSAAKFDTQGKAFVKESLKCIANGVTSKVFLAIRRCSTFQRMIAEVQEECYSKLNVCSIAKRNPEAITEVVQLPNHFSNRYYNRLVRSLLECDEDTVSTIRDSLMEKIGPNMASLFHILQTDHCAQTHPRADFNRRRTNEPQKLKVLLRNLRGEEDSPSHIKRTSHESA

SEQ ID NO: 1957 - protein, 178 aa, Homo sapiens
MYDICKSFLYSAAKFDTQGKAFVKESLKCIANGVTSKVFLAIRRCSTFQRMIAEVQEECYSKLNVCSIAKRNPEAITEVVQLPNHFSNRYYNRLVRSLLECDEDTVSTIRDSLMEKIGPNMASLFHILQTDHCAQTHPRADFNRRRTNEPQKLKVLLRNLRGEEDSPSHIKRTSHESA

SEQ ID NO: 1958 - protein, 2390 aa, Homo sapiens
MSSTLSPTDFDSLEIQGQYSDINNRWDLPDSDWDNDSSSARLFERSRIKALADEREAVQKKTFTKWVNSHLARVTCRVGDLYSDLRDGRNLLRLLEVLSGEILPKPTKGRMRIHCLENVDKALQFLKEQKVHLENMGSHDIVDGNHRLTLGLVWTIILRFQIQDISVETEDNKEKKSAKDALLLWCQMKTAGYPNVNVHNFTTSWRDGLAFNAIVHKHRPDLLDFESLKKCNAHYNLQNAFNLAEKELGLTKLLDPEDVNVDQPDEKSIITYVATYYHYFSKMKALAVEGKRIGKVLDHAMEAERLVEKYESLASELLQWIEQTIVTLNDRQLANSLSGVQNQLQSFNSYRTVEKPPKFTEKGNLEVLLFTIQSKLRANNQKVYTPREGRLISDINKAWERLEKAEHERELALRTELIRQEKLEQLAARFDRKAAMRETWLSENQRLVSQDNFGLELAAVEAAVRKHEAIETDIVAYSGRVQAVDAVAAELAAERYHDIKRIAARQHNVARLWDFLRQMVAARRERLLLNLELQKVFQDLLYLMDWMEEMKGRLQSQDLGRHLAGVEDLLQLHELVEADIAVQAERVRAVSASALRFCNPGKEYRPCDPQLVSERVAKLEQSYEALCELAAARRARLEESRRLWRFLWEVGEAEAWVREQQHLLASADTGRDLTGALRLLNKHTALRGEMSGRLGPLKLTLEQGQQLVAEGHPGASQASARAAELQAQWERLEALAEERAQRLAQAASLYQFQADANDMEAWLVDALRLVSSPELGHDEFSTQALARQHRALEEEIRSHRPTLDALREQAAALPPTLSRTPEVQSRVPTLERHYEELQARAGERARALEAALALYTMLSEAGACGLWVEEKEQWLNGLALPERLEDLEVVQQRFETLEPEMNTLAAQITAVNDIAEQLLKANPPGKDRIVNTQEQLNHRWQQFRRLADGKKAALTSALSIQNYHLECTETQAWMREKTKVIESTQGLGNDLAGVLALQRKLAGTERDLEAIAARVGELTREANALAAGHPAQAVAINARLREVQTGWEDLRATMRRREESLGEARRLQDFLRSLDDFQAWLGRTQTAVASEEGPATLPEAEALLAQHAALRGEVERAQSEYSRLRALGEEVTRDQADPQCLFLRQRLEALGTGWEELGRMWESRQGRLAQAHGFQGFLRDARQAEGVLSSQEYVLSHTEMPGTLQAADAAIKKLEDFMSTMDANGERIHGLLEAGRQLVSEGNIHADKIREKADSIERRHKKNQDAAQQFLGRLRDNREQQHFLQDCHELKLWIDEKMLTAQDVSYDEARNLHTKWQKHQAFMAELAANKDWLDKVDKEGRELTLEKPELKALVSEKLRDLHRRWDELETTTQAKARSLFDANRAELFAQSCCALESWLESLQAQLHSDDYGKDLTSVNILLKKQQMLEWEMAVREKEVEAIQAQAKALAQEDQGAGEVERTSRAVEEKFRALCQPMRERCRRLQASREQHQFHRDVEDEILWVTERLPMASSMEHGKDLPSVQLLMKKNQTLQKEIQGHEPRIADLRERQRALGAAAAGPELAELQEMWKRLGHELELRGKRLEDALRAQQFYRDAAEAEAWMGEQELHMMGQEKAKDELSAQAEVKKHQVLEQALADYAQTIHQLAASSQDMIDHEHPESTRISIRQAQVDKLYAGLKELAGERRERLQEHLRLCQLRRELDDLEQWIQEREVVAASHELGQDYEHVTMLRDKFREFSRDTSTIGQERVDSANALANGLIAGGHAARATVAEWKDSLNEAWADLLELLDTRGQVLAAAYELQRFLHGARQALARVQHKQQQLPDGTGRDLNAAEALQRRHCAYEHDIQALSPQVQQVQDDGHRLQKAYAGDKAEEIGRHMQAVAEAWAQLQGSSAARRQLLLDTTDKFRFFKAVRELMLWMDEVNLQMDAQERPRDVSSADLVIKNQQGIKAEIEARADRFSSCIDMGKELLARSHYAAEEISEKLSQLQARRQETAEKWQEKMDWLQLVLEVLVFGRDAGMAEAWLCSQEPLVRSAELGCTVDEVESLIKRHEAFQKSAVAWEERFCALEKLTALEEREKERKRKREEEERRKQPPAPEPTASVPPGDLVGGQTASDTTWDGTQPRPPPSTQAPSVNGVCTDGEPSQPLLGQQRLEHSSFPEGPGPGSGDEANGPRGERQTRTRGPAPSAMPQSRSTESAHAATLPPRGPEPSAQEQMEGMLCRKQEMEAFGKKAANRSWQNVYCVLRRGSLGFYKDAKAASAGVPYHGEVPVSLARAQGSVAFDYRKRKHVFKLGLQDGKEYLFQAKDEAEMSSWLRVVNAAIATASSASGEPEEPVVPSTTRGMTRAMTMPPVSPVGAEGPVVLRSKDGREREREKRFSFFKKNK

SEQ ID NO: 1959 - protein, 2365 aa, Homo sapiens
MSSTLSPTDFDSLEIQGQYSDINNRWDLPDSDWDNDSSSARLFERSRIKALADEREAVQKKTFTKWVNSHLARVTCRVGDLYSDLRDGRNLLRLLEVLSGEILPKPTKGRMRIHCLENVDKALQFLKEQKVHLENMGSHDIVDGNHRLTLGLVWTIILRFQIQDISVETEDNKEKKSAKDALLLWCQMKTAGYPNVNVHNFTTSWRDGLAFNAIVHKHRPDLLDFESLKKCNAHYNLQNAFNLAEKELGLTKLLDPEDVNVDQPDEKSIITYVATYYHYFSKMKALAVEGKRIGKVLDHAMEAERLVEKYESLASELLQWIEQTIVTLNDRQLANSLSGVQNQLQSFNSYRTVEKPPKFTEKGNLEVLLFTIQSKLRANNQKVYTPREGRLISDINKAWERLEKAEHERELALRTELIRQEKLEQLAARFDRKAAMRETWLSENQRLVSQDNFGLELAAVEAAVRKHEAIETDIVAYSGRVQAVDAVAAELAAERYHDIKRIAARQHNVARLWDFLRQMVAARRERLLLNLELQKVFQDLLYLMDWMEEMKGRLQSQDLGRHLAGVEDLLQLHELVEADIAVQAERVRAVSASALRFCNPGKEYRPCDPQLVSERVAKLEQSYEALCELAAARRARLEESRRLWRFLWEVGEAEAWVREQQHLLASADTGRDLTGALRLLNKHTALRGEMSGRLGPLKLTLEQGQQLVAEGHPGASQASARAAELQAQWERLEALAEERAQRLAQAASLYQFQADANDMEAWLVDALRLVSSPELGHDEFSTQALARQHRALEEEIRSHRPTLDALREQAAALPPTLSRTPEVQSRVPTLERHYEELQARAGERARALEAALALYTMLSEAGACGLWVEEKEQWLNGLALPERLEDLEVVQQRFETLEPEMNTLAAQITAVNDIAEQLLKANPPGKDRIVNTQEQLNHRWQQFRRLADGKKAALTSALSIQNYHLECTETQAWMREKTKVIESTQGLGNDLAGVLALQRKLAGTERDLEAIAARVGELTREANALAAGHPAQAVAINARLREVQTGWEDLRATMRRREESLGEARRLQDFLRSLDDFQAWLGRTQTAVASEEGPATLPEAEALLAQHAALRGEVERAQSEYSRLRALGEEVTRDQADPQCLFLRQRLEALGTGWEELGRMWESRQGRLAQAHGFQGFLRDARQAEGVLSSQEYVLSHTEMPGTLQAADAAIKKLEDFMSTMDANGERIHGLLEAGRQLVSEGNIHADKIREKADSIERRHKKNQDAAQQFLGRLRDNREQQHFLQDCHELKLWIDEKMLTAQDVSYDEARNLHTKWQKHQAFMAELAANKDWLDKVDKEGRELTLEKPELKALVSEKLRDLHRRWDELETTTQAKARSLFDANRAELFAQSCCALESWLESLQAQLHSDDYGKDLTSVNILLKKQQMLEWEMAVREKEVEAIQAQAKALAQEDQGAGEVERTSRAVEEKFRALCQPMRERCRRLQASREQHQFHRDVEDEILWVTERLPMASSMEHGKDLPSVQLLMKKNQTLQKEIQGHEPRIADLRERQRALGAAAAGPELAELQEMWKRLGHELELRGKRLEDALRAQQFYRDAAEAEAWMGEQELHMMGQEKAKDELSAQAEVKKHQVLEQALADYAQTIHQLAASSQDMIDHEHPESTRISIRQAQVDKLYAGLKELAGERRERLQEHLRLCQLRRELDDLEQWIQEREVVAASHELGQDYEHVTMLRDKFREFSRDTSTIGQERVDSANALANGLIAGGHAARATVAEWKDSLNEAWADLLELLDTRGQVLAAAYELQRFLHGARQALARVQHKQQQLPDGTGRDLNAAEALQRRHCAYEHDIQALSPQVQQVQDDGHRLQKAYAGDKAEEIGRHMQAVAEAWAQLQGSSAARRQLLLDTTDKFRFFKAVRELMLWMDEVNLQMDAQERPRDVSSADLVIKNQQGIKAEIEARADRFSSCIDMGKELLARSHYAAEEISEKLSQLQARRQETAEKWQEKMDWLQLVLEVLVFGRDAGMAEAWLCSQEPLVRSAELGCTVDEVESLIKRHEAFQKSAVAWEERFCALEKLTALEEREKERKRKREEEERRKQPPAPEPTASVPPGDLVGGQTASDTTWDGTQPRPPPSTQAPSVNGVCTDGEPSQPLLGQQRLEHSSFPEGPGPGSGDEANGPRGERQTRTRGPAPSAMPQSRSTESAHAATLPPRGPEPSAQEQMEGMLCRKQEMEAFGKKAANRSWQNVYCVLRRGSLGFYKDAKAASAGVPYHGEVPVSLARAQGSVAFDYRKRKHVFKLGLQDGKEYLFQAKDEVSCPSCSSLSVPFQKLPAADSPSFPVLPLFPGLVLCGKTGCVRRPHQAALPV

SEQ ID NO: 1960 - protein, 192 aa, Homo sapiens
MKKVKKKRSEARRHRDSTSQHASSNSTSQQPSPESTPQQPSPESTPQQPSPESTPQHSSLETTSRQPAFQALPAPEIRRSSCCLLSPDANVKAAPQSRKAGPLIRAGPHSCSCATCPCSSACWRRLGLCHSRIFDVLLPRDWQMAPGRGLPNLLTFYRKSSRKPSSHRNACPPSPRNCGCGSGGSRSCLLHH

SEQ ID NO: 1961 - protein, 410 aa, Homo sapiens
MAAVGAEARGAWCVPCLVSLDTLQELCRKEKLTCKSIGITKRNLNNYEVEYLCDYKVVKDMEYYLVKWKGWPDSTNTWEPLQNLKCPLLLQQFSNDKHNYLSQVKKGKAITPKDNNKTLKPAIAEYIVKKAKQRIALQRWQDELNRRKNHKGMIFVENTVDLEGPPSDFYYINEYKPAPGISLVNEATFGCSCTDCFFQKCCPAEAGVLLAYNKNQQIKIPPGTPIYECNSRCQCGPDCPNRIVQKGTQYSLCIFRTSNGRGWGVKTLVKIKRMSFVMEYVGEVITSEEAERRGQFYDNKGITYLFDLDYESDEFTVDAARYGNVSHFVNHSCDPNLQVFNVFIDNLDTRLPRIALFSTRTINAGEELTFDYQMKGSGDISSDSIDHSPAKKRVRTVCKCGAVTCRGYLN

SEQ ID NO: 1962 - protein, 350 aa, Homo sapiens
MEYYLVKWKGWPDSTNTWEPLQNLKCPLLLQQFSNDKHNYLSQVKKGKAITPKDNNKTLKPAIAEYIVKKAKQRIALQRWQDELNRRKNHKGMIFVENTVDLEGPPSDFYYINEYKPAPGISLVNEATFGCSCTDCFFQKCCPAEAGVLLAYNKNQQIKIPPGTPIYECNSRCQCGPDCPNRIVQKGTQYSLCIFRTSNGRGWGVKTLVKIKRMSFVMEYVGEVITSEEAERRGQFYDNKGITYLFDLDYESDEFTVDAARYGNVSHFVNHSCDPNLQVFNVFIDNLDTRLPRIALFSTRTINAGEELTFDYQMKGSGDISSDSIDHSPAKKRVRTVCKCGAVTCRGYLN

SEQ ID NO: 1963 - protein, 230 aa, Homo sapiens
MAAVGAEARGAWCVPCLVSLDTLQELCRKEKLTCKSIGITKRNLNNYEVEYLCDYKVVKDMEYYLVKWKGWPDSTNTWEPLQNLKCPLLLQQFSNDKHNYLSQVITSEEAERRGQFYDNKGITYLFDLDYESDEFTVDAARYGNVSHFVNHSCDPNLQVFNVFIDNLDTRLPRIALFSTRTINAGEELTFDYQMKGSGDISSDSIDHSPAKKRVRTVCKCGAVTCRGYLN

SEQ ID NO: 1964 - protein, 746 aa, Homo sapiens
MLVLGLLVAGAADGCELVPRHLRGRRATGSAATAASSPAAAAGDSPALMTDPCMSLSPPCFTEEDRFSLEALQTIHKQMDDDKDGGIEVEESDEFIREDMKYKDATNKHSHLHREDKHITIEDLWKRWKTSEVHNWTLEDTLQWLIEFVELPQYEKNFRDNNVKGTTLPRIAVHEPSFMISQLKISDRSHRQKLQLKALDVVLFGPLTRPPHNWMKDFILTVSIVIGVGGCWFAYTQNKTSKEHVAKMMKDLESLQTAEQSLMDLQERLEKAQEENRNVAVEKQNLERKMMDEINYAKEEACRLRELREGAECELSRRQYAEQELEQVRMALKKAEKEFELRSSWSVPDALQKWLQLTHEVEVQYYNIKRQNAEMQLAIAKDEAEKIKKKRSTVFGTLHVAHSSSLDEVDHKILEAKKALSELTTCLRERLFRWQQIEKICGFQIAHNSGLPSLTSSLYSDHSWVVMPRVSIPPYPIAGGVDDLDEDTPPIVSQFPGTMAKPPGSLARSSSLCRSRRSIVPSSPQPQRAQLAPHAPHPSHPRHPHHPQHTPHSLPSPDPDILSVSSCPALYRNEEEEEAIYFSAEKQWEVPDTASECDSLNSSIGRKQSPPLSLEIYQTLSPRKISRDEVSLEDSSRGDSPVTVDVSWGSPDCVGLTETKSMIFSPASKVYNGILEKSCSMNQLSSGIPVPKPRHTSCSSAGNDSKPVQEAPSVARISSIPHDLCHNGEKSKKPSKIKSLFKKKSK

SEQ ID NO: 1965 - protein, 841 aa, Homo sapiens
MNAAGIRAPEAAGADGTRLAPGGSPCLRRRGRPEESPAAVVAPRGAGELQAAGAPLRFYPASPRRLHRASTPGPAWGWLLRRRRWAALLVLGLLVAGAADGCELVPRHLRGRRATGSAATAASSPAAAAGDSPALMTDPCMSLSPPCFTEEDRFSLEALQTIHKQMDDDKDGGIEVEESDEFIREDMKYKDATNKHSHLHREDKHITIEDLWKRWKTSEVHNWTLEDTLQWLIEFVELPQYEKNFRDNNVKGTTLPRIAVHEPSFMISQLKISDRSHRQKLQLKALDVVLFGPLTRPPHNWMKDFILTVSIVIGVGGCWFAYTQNKTSKEHVAKMMKDLESLQTAEQSLMDLQERLEKAQEENRNVAVEKQNLERKMMDEINYAKEEACRLRELREGAECELSRRQYAEQELEQVRMALKKAEKEFELRSSWSVPDALQKWLQLTHEVEVQYYNIKRQNAEMQLAIAKDEVAASYLIQAEKIKKKRSTVFGTLHVAHSSSLDEVDHKILEAKKALSELTTCLRERLFRWQQIEKICGFQIAHNSGLPSLTSSLYSDHSWVVMPRVSIPPYPIAGGVDDLDEDTPPIVSQFPGTMAKPPGSLARSSSLCRSRRSIVPSSPQPQRAQLAPHAPHPSHPRHPHHPQHTPHSLPSPDPDILSVSSCPALYRNEEEEEAIYFSAEKQWEVPDTASECDSLNSSIGRKQSPPLSLEIYQTLSPRKISRDEVSLEDSSRGDSPVTVDVSWGSPDCVGLTETKSMIFSPASKVYNGILEKSCSMNQLSSGIPVPKPRHTSCSSAGNDSKPVQEAPSVARISSIPHDLCHNGEKSKKPSKIKSLFKKKSK

SEQ ID NO: 1966 - protein, 599 aa, Homo sapiens
MLVLGLLVAGAADGCELVPRHLRGRRATGSAATAASSPAAAAGDSPALMTDPCMSLSPPCFTEEDRFSLEALQTIHKQMDDDKDGGIEVEESDEFIREDMKYKDATNKHSHLHREDKHITIEDLWKRWKTSEVHNWTLEDTLQWLIEFVELPQYEKNFRDNNVKGTTLPRIAVHEPSFMISQLKISDRSHRQKLQLKALDVVLFGPLTRPPHNWMKDFILTVSIVIGVGGCWFAYTQNKTSKEHVAKMMKDLESLQTAEQSLMDLQERLEKAQEENRNVAVEKQNLERKMMDEINYAKEEACRLRELREGAECELSRRQYAEQELEQVRMALKKAEKEFELRSSWSVPDALQKWLQLTHEVEVQYYNIKRQNAEMQLAIAKDEAEKIKKKRSTVFGTLHVAHSSSLDEVDHKILEAKKALSELTTCLRERLFRWQQIEKICGFQIAHNSGLPSLTSSLYSDHSWVVMPRVSIPPYPIAGGVDDLDEDTPPIVSQFPGTMAKPPGSLARSSSLCRSRRSIVPSSPQPQRAQLAPHAPHPSHPRHPHHPQHTPHSLPSPDPDILSVSSCPALYRNEEEEEAIYFSAEKQCIHLGLGACKSE

SEQ ID NO: 1967 - protein, 350 aa, Homo sapiens
MKPLVLLVALLLWPSSVPAYPSITVTPDEEQNLNHYIQVLENLVRSVPSGEPGREKKSNSPKHVYSIASKGSKFKELVTHGDASTENDVLTNPISEETTTFPTGGFTPEIGKKKHTESTPFWSIKPNNVSIVLHAEEPYIENEEPEPEPEPAAKQTEAPRMLPVVTESSTSPYVTSYKSPVTTLDKSTGIGISTESEDVPQLSGETAIEKPEEFGKHPESWNNDDILKKILDINSQVQQALLSDTSNPAYREDIEASKDHLKRSLALAAAAEHKLKTMYKSQLLPVGRTSNKIDDIETVINMLCNSRSKLYEYLDIKCVPPEMREKAATVFNTLKNMCRSRRVTALLKVY

SEQ ID NO: 1968 - protein, 464 aa, Homo sapiens
MGSPAHRPALLLLLPPLLLLLLLRVPPSRSFPGSGDSPLEDDEVGYSHPRYKDTPWCSPIKVKYGDVYCRAPQGGYYKTALGTRCDIRCQKGYELHGSSLLICQSNKRWSDKVICKQKRCPTLAMPANGGFKCVDGAYFNSRCEYYCSPGYTLKGERTVTCMDNKAWSGRPASCVDMEPPRIKCPSVKERIAEPNKLTVRVSWETPEGRDTADGILTDVILKGLPPGSNFPEGDHKIQYTVYDRAENKGTCKFRVKVRVKRCGKLNAPENGYMKCSSDGDNYGATCEFSCIGGYELQGSPARVCQSNLAWSGTEPTCAAMNVNVGVRTAAALLDQFYEKRRLLIVSTPTARNLLYRLQLGMLQQAQCGLDLRHITVVELVGVFPTLIGRIGAKIMPPALALQLRLLLRIPLYSFSMVLVDKHGMDKERYVSLVMPVALFNLIDTFPLRKEEMVLQAEMSQTCNT

SEQ ID NO: 1969 - protein, 451 aa, Homo sapiens
MDFDVGRTTHLSSSPCSASNGGESGQVSKRRCLIGESGHDTPWCSPIKVKYGDVYCRAPQGGYYKTALGTRCDIRCQKGYELHGSSLLICQSNKRWSDKVICKQKRCPTLAMPANGGFKCVDGAYFNSRCEYYCSPGYTLKGERTVTCMDNKAWSGRPASCVDMEPPRIKCPSVKERIAEPNKLTVRVSWETPEGRDTADGILTDVILKGLPPGSNFPEGDHKIQYTVYDRAENKGTCKFRVKVRVKRCGKLNAPENGYMKCSSDGDNYGATCEFSCIGGYELQGSPARVCQSNLAWSGTEPTCAAMNVNVGVRTAAALLDQFYEKRRLLIVSTPTARNLLYRLQLGMLQQAQCGLDLRHITVVELVGVFPTLIGRIGAKIMPPALALQLRLLLRIPLYSFSMVLVDKHGMDKERYVSLVMPVALFNLIDTFPLRKEEMVLQAEMSQTCNT

SEQ ID NO: 1970 - protein, 405 aa, Homo sapiens
MGSPAHRPALLLLLPPLLLLLLLRVPPSRSFPGSGDSPLEDDEVGYSHPRYKDTPWCSPIKVKYGDVYCRAPQGGYYKTALGTRCDIRCQKGYELHGSSLLICQSNKRWSDKVICKHMEPPRIKCPSVKERIAEPNKLTVRVSWETPEGRDTADGILTDVILKGLPPGSNFPEGDHKIQYTVYDRAENKGTCKFRVKVRVKRCGKLNAPENGYMKCSSDGDNYGATCEFSCIGGYELQGSPARVCQSNLAWSGTEPTCAAMNVNVGVRTAAALLDQFYEKRRLLIVSTPTARNLLYRLQLGMLQQAQCGLDLRHITVVELVGVFPTLIGRIGAKIMPPALALQLRLLLRIPLYSFSMVLVDKHGMDKERYVSLVMPVALFNLIDTFPLRKEEMVLQAEMSQTCNT

SEQ ID NO: 1971 - protein, 379 aa, Homo sapiens
MGSPAHRPALLLLLPPLLLLLLLRVPPSRSFPGSGDSPLEDDEVGYSHPRYKDTPWCSPIKVKYGDVYCRAPQGGYYKTALGTRCDIRCQKGYELHGSSLLICQSNKRWSDKVICKQKRCPTLAMPANGGFKCVDGAYFNSRCEYYCSPGYTLKGERTVTCMDNKAWSGRPASCVDMEPPRIKCPSVKERIAEPNKLTVRVSWETPEGRDTADGILTDVILKGLPPGSNFPEGDHKIQYTVYDRAENKGTCKFRVKVRVKRCGKLNAPENGYMKCSSDGDNYGATCEFSCIGGYELQGSPARVCQSNLAWSGTEPTCAAMNVNVGVRTAAALLDQFYEKRRLLIVSTPTARNLLYRLQLGMLQAVAANPTLLLQYGASG

SEQ ID NO: 1972 - protein, 444 aa, Homo sapiens
MGSPAHRPALLLLLPPLLLLLLLRVPPSRSFPDTPWCSPIKVKYGDVYCRAPQGGYYKTALGTRCDIRCQKGYELHGSSLLICQSNKRWSDKVICKQKRCPTLAMPANGGFKCVDGAYFNSRCEYYCSPGYTLKGERTVTCMDNKAWSGRPASCVDMEPPRIKCPSVKERIAEPNKLTVRVSWETPEGRDTADGILTDVILKGLPPGSNFPEGDHKIQYTVYDRAENKGTCKFRVKVRVKRCGKLNAPENGYMKCSSDGDNYGATCEFSCIGGYELQGSPARVCQSNLAWSGTEPTCAAMNVNVGVRTAAALLDQFYEKRRLLIVSTPTARNLLYRLQLGMLQQAQCGLDLRHITVVELVGVFPTLIGRIGAKIMPPALALQLRLLLRIPLYSFSMVLVDKHGMDKERYVSLVMPVALFNLIDTFPLRKEEMVLQAEMSQTCNT

SEQ ID NO: 1973 - protein, 44 aa, Homo sapiens
MADKPDMGEIASFDKAKLKKTETQEKNTLPTKETIEQEKRSEIS

SEQ ID NO: 1974 - protein, 156 aa, Homo sapiens
MAGQFRSYVWDPLLILSQIVLMQTVYYGSLGLWLALVDGLVRSSPSLDQMFDAEILGFSTPPGRLSMMSFILNALTCALGLLYFIRRGKQCLDFTVTVHFFHLLGCWFYSSRFPSALTWWLVQAVCIALMAVIGEYLCMRTELKEIPLNSAPKSNV

SEQ ID NO: 1975 - protein, 76 aa, Homo sapiens
MAGQFRSYVWDPLLILSQIVLMQTVYYGSLGLWLALVDGLVRSSPSLDQMFDAEILGFSTPPGRLSMMSFILNALT

SEQ ID NO: 1976 - protein, 869 aa, Homo sapiens
MDFPSSLRPALFLTGPLGLSDVPDLSFMCSWRDALTLPEAQPQNSENGALHVTKDLLWEPATPGPLPMLPPLIDPWDPGLTARDLLFRGGCRYRKRPRVVLDVTEQISRFLLDHGDVAFAPLGKLMLENFKLEGAGSRTKKKTVVSVKKLLQDLGGHQPWGCPWAYLSNRQRRFSILGGPILGTSVASHLAELLHEELVLRWEQLLLDEACTGGALAWVPGRTPQFGQLVYPAGGAQDRLHFQEVVLTPGDNPQFLGKPGRIQLQGPVRQVVTCTVQGESKALIYTFLPHWLTCYLTPGPFHPSSALLAVRSDYHCAVWKFGKQWQPTLLQAMQVEKGATGISLSPHLPGELAICSRSGAVCLWSPEDGLRQIYRDPETLVFRDSSSWRWADFTAHPRVLTVGDRTGVKMLDTQGPPGCGLLLFRLGAEASCQKGERVLLTQYLGHSSPKCLPPTLHLVCTQFSLYLVDERLPLVPMLKWNHGLPSPLLLARLLPPPRPSCVQPLLLGGQGGQLQLLHLAGEGASVPRLAGPPQSLPSRIDSLPAFPLLEPKIQWRLQERLKAPTIGLAAVVPPLPSAPTPGLVLFQLSAAGDVFYQQLRPQVDSSLRRDAGPPGDTQPDCHAPTASWTSQDTAGCSQWLKALLKVPLAPPVWTAPTFTHRQMLGSTELRREEEEGQRLGVLRKAMARGQLLLQRDLGSLPAAEPPPAPESGLEDKLSERLGEAWAGRGAAWWERQQGRTSEPGRQTRRPKRRTQLSSSFSLSGHVDPSEDTSSPHSPEWPPADALPLPPTTPPSQELTPDACAQGVPSEQRQMLRDYMAKLPPQRDTPGCATTPPHSQASSVRATRSQQHTPVLSSSQPLRKKPRMGF

SEQ ID NO: 1977 - protein, 775 aa, Homo sapiens
MLPPLIDPWDPGLTARDLLFRGGCRYRKRPRVVLDVTEQISRFLLDHGDVAFAPLGKLMLENFKLEGAGSRTKKKTVVSVKKLLQDLGGHQPWGCPWAYLSNRQRRFSILGGPILGTSVASHLAELLHEELVLRWEQLLLDEACTGGALAWVPGRTPQFGQLVYPAGGAQDRLHFQEVVLTPGDNPQFLGKPGRIQLQGPVRQVVTCTVQGETLLAVRSDYHCAVWKFGKQWQPTLLQAMQVEKGATGISLSPHLPGELAICSRSGAVCLWSPEDGLRQIYRDPETLVFRDSSSWRWADFTAHPRVLTVGDRTGVKMLDTQGPPGCGLLLFRLGAEASCQKGERVLLTQYLGHSSPKCLPPTLHLVCTQFSLYLVDERLPLVPMLKWNHGLPSPLLLARLLPPPRPSCVQPLLLGGQGGQLQLLHLAEGASVPRLAGPPQSLPSRIDSLPAFPLLEPKIQWRLQERLKAPTIGLAAVVPPLPSAPTPGLVLFQLSAAGDVFYQQLRPQVDSSLRRDAGPPGDTQPDCHAPTASWTSQDTAGCSQWLKALLKVPLAPPVWTAPTFTHRQMLGSTELRREEEEGQRLGVLRKAMARGQLLLQRDLGSLPAAEPPPAPESGLEDKLSERLGEAWAGRGAAWWERQQGRTSEPGRQTRRPKRRTQLSSSFSLSGHVDPSEDTSSPHSPEWPPADALPLPPTTPPSQELTPDACAQGVPSEQRQMLRDYMAKLPPQRDTPGCATTPPHSQASSVRATRSQQHTPVLSSSQPLRKKPRMGF

SEQ ID NO: 1978 - protein, 537 aa, Homo sapiens
MQVEKGATGISLSPHLPGELAICSRSGAVCLWSPEDGLRQIYRDPETLVFRDSSSWRWADFTAHPRVLTVGDRTGVKMLDTQGPPGCGLLLFRLGAEASCQKGERVLLTQYLGHSSPKCLPPTLHLVCTQFSLYLVDERLPLVPMLKWNHGLPSPLLLARLLPPPRPSCVQPLLLGGQGGQLQLLHLAGEGASVPRLAGPPQSLPSRIDSLPAFPLLEPKIQWRLQERLKAPTIGLAAVVPPLPSAPTPGLVLFQLSAAGDVFYQQLRPQVDSSLRRDAGPPGDTQPDCHAPTASWTSQDTAGCSQWLKALLKVPLAPPVWTAPTFTHRQMLGSTELRREEEEGQRLGVLRKAMARGQLLLQRDLGSLPAAEPPPAPESGLEDKLSERLGEAWAGRGAAWWERQQGRTSEPGRQTRRPKRRTQLSSSFSLSGHVDPSEDTSSPHSPEWPPADALPLPPTTPPSQELTPDACAQGVPSEQRQMLRDYMAKLPPQRDTPGCATTPPHSQASSVRATRSQQHTPVLSSSQPLRKKPRMGF

SEQ ID NO: 1979 - protein, 460 aa, Homo sapiens
MLDTQGPPGCGLLLFRLGAEASCQKGERVLLTQYLGHSSPKCLPPTLHLVCTQFSLYLVDERLPLVPMLKWNHGLPSPLLLARLLPPPRPSCVQPLLLGGQGGQLQLLHLAGEGASVPRLAGPPQSLPSRIDSLPAFPLLEPKIQWRLQERLKAPTIGLAAVVPPLPSAPTPGLVLFQLSAAGDVFYQQLRPQVDSSLRRDAGPPGDTQPDCHAPTASWTSQDTAGCSQWLKALLKVPLAPPVWTAPTFTHRQMLGSTELRREEEEGQRLGVLRKAMARGQLLLQRDLGSLPAAEPPPAPESGLEDKLSERLGEAWAGRGAAWWERQQGRTSEPGRQTRRPKRRTQLSSSFSLSGHVDPSEDTSSPHSPEWPPADALPLPPTTPPSQELTPDACAQGVPSEQRQMLRDYMAKLPPQRDTPGCATTPPHSQASSVRATRSQQHTPVLSSSQPLRKKPRMGF

SEQ ID NO: 1980 - protein, 843 aa, Homo sapiens
MDFPSSLRPALFLTGPLGLSDVPDLSFMCSWRDALTLPEAQPQNSENGALHVTKDLLWEPATPGPLPMLPPLIDPWDPGLTARDLLFRGGCRYRKRPRVVLDVTEQISRFLLDHGDVAFAPLGKLMLENFKLEGAGSRTKKKTVVSVKKLLQDLGGHQPWGCPWAYLSNRQRRFSILGGPILGTSVASHLAELLHEELVLRWEQLLLDEACTGGALAWVPGRTPQFGQLVYPAGGAQDRLHFQEVVLTPGDNPQFLGKPGRIQLQGPVRQVVTCTVQGETLLAVRSDYHCAVWKFGKQWQPTLLQAMQVEKGATGISLSPHLPGELAICSRSGAVCLWSPEDGLRQIYRDPETLVFRDSSSWRWADFTAHPRVLTVGDRTGVKMLDTQGPPGCGLLLFRLGAEASCQKGERVLLTQYLGHSSPKCLPPTLHLVCTQFSLYLVDERLPLVPMLKWNHGLPSPLLLARLLPPPRPSCVQPLLLGGQGGQLQLLHLAGEGASVPRLAGPPQSLPSRIDSLPAFPLLEPKIQWRLQERLKAPTIGLAAVVPPLPSAPTPGLVLFQLSAAGDVFYQQLRPQVDSSLRRDAGPPGDTQPDCHAPTASWTSQDTAGCSQWLKALLKVPLAPPVWTAPTFTHRQMLGSTELRREEEEGQRLGVLRKAMARGQLLLQRDLGSLPAAEPPPAPESGLEDKLSERLGEAWAGRGAAWWERQQGRTSEPGRQTRRPKRRTQLSSSFSLSGHVDPSEDTSSPHSPEWPPADALPLPPTTPPSQELTPDACAQGVPSEQRQMLRDYMAKLPPQRDTPGCATTPPHSQASSVRATRSQQHTPVLSSSQPLRKKPRMGF

SEQ ID NO: 1981 - protein, 1826 aa, Homo sapiens
MRPGCDLLLRAAATVTAAIMSDSDSEEDSSGGGPFTLAGILFGNISGAGQLEGESVLDDECKKHLAGLGALGLGSLITELTANEELTGTGGALVNDEGWIRSTEDAVDYSDINEVAEDESQRHQQTMGSLQPLYHSDYDEDDYDADCEDIDCKLMPPPPPPPGPMKKDKDQDAITCVSESGEDIILPSIIAPSFLASEKVDFSSYSDSESEMGPQEATQAESEDGKLTLPLAGIMQHDATKLLPSVTELFPEFRPGKVLRFLHLFGPGKNVPSVWRSARRKRKKHRELIQEEQIQEVECSVESEVSQKSLWNYDYAPPPPPEQCLADDEITMMVPVESKFSQSTGDVDKVTDTKPRVAEWRYGPARLWYDMLGVSEDGSGFDYGFKLRKTQHEPVIKSRMMEEFRKLEESNGTDLLADENFLMVTQLHWEDSIIWDGEDIKHKGTKPQGASLAGWLPSIKTRNVMAYNVQQGFAPTLDDDKPWYSIFPIDNEDLVYGRWEDNIIWDAQAMPRLLEPPVLALDPNDENLILEIPDEKEEATSNSPSKESKKESSLKKSRILLGKTGVIREEPQQNMSQPEVKDPWNLSNDEYYFPKQQGLRGTFGGNIIQHSIPAMELWQPFFPTHMGPIKIRQFHRPPLKKYSFGALSQPGPHSVQPLLKHIKKKAKMREQERQASGGGELFFMRTPQDLTGKDGDLILAEYSEENGPLMMQVGMATKIKNYYKRKPGKDPGAPDCKYGETVYCHTSPFLGSLHPGQLLQALENNLFRAPVYLHKMPETDFLIIRTRQGYYIRELVDIFVVGQQCPLFEVPGPNSRRANMHIRDFLQVFIYRLFWKSKDRPRRIRMEDIKKAFPSHSESSIRKRLKLCADFKRTGMDSNWWVLKSDFRLPTEEEIRAKVSPEQCCAYYSMIAAKQRLKDAGYGEKSFFAPEEENEEDFQMKIDDEVHAAPWNTTRAFIAAMKGKCLLEVTGVADPTGCGEGFSYVKIPNKPTQQKDDKEPQAVKKTVTGTDADLRRLSLKNAKQLLRKFGVPEEEIKKLSRWEVIDVVRTMSTEQAHSGEGPMSKFARGSRFSVAEHQERYKEECQRIFDLQNKVLSSTEVLSTDTDSISAEDSDFEEMGKNIENMLQNKKTSSQLSREWEEQERKELRRMLLVAGSAASGNNHRDDVTASMTSLKSSATGHCLKIYRTFRDEEGKEYVRCETVRKPAVIDAYVRIRTTKDEKFIQKFALFDEKHREEMRKERRRIQEQLRRLKRNQEKEKLKGPPEKKPKKMKERPDLKLKCGACGAIGHMRTNKFCPLYYQTNVPPSKPVAMTEEQEEELEKTVIHNDNEELIKVEGTKIVFGKQLIENVHEVRRKSLVLKFPKQQLPPKKKRRVGTTVHCDYLNIPHKSIHRRRTDPMVTLSSILESIINDMRDLPNTHPFHTPVNAKVVKDYYKIITRPMDLQTLRENVRKCLYPSREEFREHLELIVKNSATYNGPKHSLTQISQSMLDLCDEKLKEKEDKLARLEKAINPLLDDDDQVAFSFILDNIVTQKMMAVPDSWPFHHPVNKKFVPDYYKMIVNPVDLETIRKNISKHKYQSRESFLDDVNLILANSVKYNGPESQYTKTAQEIVNICYQTITEYDEHLTQLEKDICTAKEAALEEAELESLDPMTPGPYTSQPPDMYDTNTSLSTSRDASVFQDESNLSVLDISTATPEKQMCQGQGRLGEEDSDVDVEGYDDEEEDGKPKPPAPEGGDGDLADEEEGTVQQPEASVLYEDLLISEGEDDEEDAGSDEEGDNPFSAIQLSESGSDSDVGYGGIRPKQPFMLQHASGEHKDGHGK

SEQ ID NO: 1982 - protein, 505 aa, Homo sapiens
MSPWSWFLLQTLCLLPTGAASRRGAPGTANCELKPQQSELNSFLWTIKRDPPSYFFGTIHVPYTRVWDFIPDNSKEAFLQSSIVYFELDLTDPYTISALTSCQMLPQGENLQDVLPRDIYCRLKRHLEYVKLMMPLWMTPDQRGKGLYADYLFNAIAGNWERKRPVWVMLMVNSLTEVDIKSRGVPVLDLFLAQEAERLRKQTGAVEKVEEQCHPLNGLNFSQVIFALNQTLLQQESLRAGSLQIPYTTEDLIKHYNCGDLSSVILSHDSSQVPNFINATLPPQERITAQEIDSYLRRELIYKRNERIGKRVKALLEEFPDKGFFFAFGAGHFMGNNTVLDVLRREGYEVEHAPAGRPIHKGKSKKTSTRPTLSTIFAPKVPTLEVPAPEAVSSGHSTLPPLVSRPGSADTPSEAEQRFRKKRRRSQRRPRLRQFSDLWVRLEESDIVPQLQVPVLDRHISTELRLPRRGHSHHSQMVASSACLSLWTPVFWVLVLAFQTETPLL

SEQ ID NO: 1983 - protein, 456 aa, Homo sapiens
MSPWSWFLLQTLCLLPTGAASRRGAPGTANCELKPQQSELNSFLWTIKRDPPSYFFGTIHVPYTRVWDFIPDNSKEAFLQSSIVYFELDLTDPYTISALTSCQMLPQGENLQDVLPRDIYCRLKRHLEYVKLMMPLWMTPDQRGKGLYADYLFNAIAGNWERKRPVWVMLMVNSLTEVDIKSRGVPVLDLFLAQEAERLRKQTGAVEKVEEQCHPLNGLNFSQVPNFINATLPPQERITAQEIDSYLRRELIYKRNERIGKRVKALLEEFPDKGFFFAFGAGHFMGNNTVLDVLRREGYEVEHAPAGRPIHKGKSKKTSTRPTLSTIFAPKVPTLEVPAPEAVSSGHSTLPPLVSRPGSADTPSEAEQRFRKKRRRSQRRPRLRQFSDLWVRLEESDIVPQLQVPVLDRHISTELRLPRRGHSHHSQMVASSACLSLWTPVFWVLVLAFQTETPLL

SEQ ID NO: 1984 - protein, 166 aa, Homo sapiens
MLPLLIICLLPAIEGKNCLRCWPELSALIDYDLQILWVTPGPPTELSQNRDHLEEETAKFFTQVHQAIKTLRDDKTVLLEEIYTHKNLFTERLNKISDGLKEKDIQSTLKVTSCADCRTHFLSCNDPTFCPARNRRTSLWAVSLSSALLLAIAGDVSFTGKGRRRQ

SEQ ID NO: 1985 - protein, 171 aa, Homo sapiens
MEEYAREPCPWRIVDDCGGAFTMGTIGGGIFQAIKGFRNSPVGVNHRLRGSLTAIKTRAPQLGGSFAVWGGLFSMIDCSMVQVRGKEDPWNSITSGALTGAILAARNGPVAMVGSAAMGGILLALIEGAGILLTRFASAQFPNGPQFAEDPSQLPSTQLPSSPFGDYRQYQ

SEQ ID NO: 1986 - protein, 445 aa, Homo sapiens [sequence omitted]

SEQ ID NO: 1987 - protein, 654 aa, Homo sapiens
MSEASSEDLVPPLEAGAAPYREEEEAAKKKKEKKKKSKGLANVFCVFTKGKKKKGQPSSAEPEDAAGSRQGLDGPPPTVEELKAALERGQLEAARPLLALERELAAAAAAGGVSEEELVRRQSKVEALYELLRDQVLGVLRRPLEAPPERLRQALAVVAEQEREDRQAAAAGPGTSGLAATRPRRWLQLWRRGVAEAAEERMGQRPAAGAEVPESVFLHLGRTMKEDLEAVVERLKPLFPAEFGVVAAYAESYHQHFAAHLAAVAQFELCERDTYMLLLWVQNLYPNDIINSPKLVGELQGMGLGSLLPPRQIRLLEATFLSSEAANVRELMDRALELEARRWAEDVPPQRLDGHCHSELAIDIIQITSQAQAKAESITLDLGSQIKRVLLVELPAFLRSYQRAFNEFLERGKQLTNYRANVIANINNCLSFRMSMEQNWQVPQDTLSLLLGPLGELKSHGFDTLLQNLHEDLKPLFKRFTHTRWAAPVETLENIIATVDTRLPEFSELQGCFREELMEALHLHLVKEYIIQLSKGRLVLKTAEQQQQLAGYILANADTIQHFCTQHGSPATWLQPALPTLAEIIRLQDPSAIKIEVATYATCYPDFSKGHLSAILAIKGNLSNSEVKRIRSILDVSMGAQEPSRPLFSLIKVG

SEQ ID NO: 1988 - protein, 1250 aa, Homo sapiens
MWLSPEEVLVANALWVTERANPFFVLQRRRGHGRGGGLTGLLVGTLDVVLDSSARVAPYRILHQTQDSQVYWTVACGSSRKEITKHWEWLENNLLQTLSIFDSEEDITTFVKGKIHGIIAEENKNLQPQGDEDPGKFKEAELKMRKQFGMPEGEKLVNYYSCSYWKGRVPRQGWLYLTVNHLCFYSFLLGKEVSLVVQWVDITRLEKNATLLFPESIRVDTRDQELFFSMFLNIGETFKLMEQLANLAMRQLLDSEGFLEDKALPRPIRPHRNISALKRDLDARAKNECYRATFRLPRDERLDGHTSCTLWTPFNKLHIPGQMFISNNYICFASKEEDACHLIIPLREVTIVEKADSSSVLPSPLSISTKSKMTFLFANLKDRDFLVQRISDFLQKTPSKQPGSIGSRKASVVDPSTESSPAPQEGSEQPASPASPLSSRQSFCAQEAPTASQGLLKLFQKNSPMEDLGAKGAKEKMKEESWHIHFFEYGRGVCMYRTAKTRALVLKGIPESLRGELWLLFSGAWNEMVTHPGYYAELVEKSTGKYSLATEEIERDLHRSMPEHPAFQNELGIAALRRVLTAYAFRNPTIGYCQAMNIVTSVLLLYGSEEEAFWLLVALCERMLPDYYNTRVVGALVDQGIFEELTRDFLPQLSEKMQDLGVISSISLSWFLTLFLSVMPFESAVVIVDCFFYEGIKVILQVALAVLDANMEQLLGCSDEGEAMTMLGRYLDNVVNKQSVSPPIPHLRALLSSSDDPPAEVDIFELLKVSYEKFSSLRAEDIEQMRFKQRLKVIQSLEDTAKRSVVRAIPVDIGFSIEELEDLYMVFKAKHLASQYWGCSRTMAGRRDPSLPYLEQYRIDASQFRELFASLTPWACGSHTPLLAGRMFRLLDENKDSLINFKEFVTGMSGMYHGDLTEKLKVLYKLHLPPALSPEEAESALEAAHYFTEDSSSEASPLASDLDLFLPWEAQEALPQEEQEGSGSEERGEEKGTSSPDYRHYLRMWAKEKEAQKETIKDLPKMNQEQFIELCKTLYNMFSEDPMEQDLYHAIATVASLLLRIGEVGKKFSARTGRKPRDCATEEDEPPAPELHQDAARELQPPAAGDPQAKAGGDTHLGKAPQESQVVVEGGSGEGQGSPSQLLSDDETKDDMSMSSYSVVSTGSLQCEDLADDTVLVGGEACSPTARIGGTVDTDWCISFEQILASILTESVLVNFFEKRVDIGLKIKDQKKVERQFSTASDHEQPGVSG

SEQ ID NO: 1989 - protein, 1233 aa, Homo sapiens
MWLSPEEVLVANALWVTERANPFFVLQRRRGHGRGGGLTGLLVGTLDVVLDSSARVAPYRILHQTQDSQVYWTVACGSSRKEITKHWEWLENNLLQTLSIFDSEEDITTFVKGKIHGIIAEENKNLQPQGDEDPGKFKEAELKMRKQFGMPEGEKLVNYYSCSYWKGRVPRQGWLYLTVNHLCFYSFLLGKEVSLVVQWVDITRLEKNATLLFPESIRVDTRDQELFFSMFLNIGETFKLMEQLANLAMRQLLDSEGFLEDKALPRPIRPHRNISALKRDLDARAKNECYRATFRLPRDERLDGHTSCTLWTPFNKLHIPGQMFISNNYICFASKEEDACHLIIPLREVTIVEKADSSSVLPSPLSISTKSKMTFLFANLKDRDFLVQRISDFLQKTPSKQPGSIGSRKASVVDPSTESSPAPQEGSEQPASPASPLSSRQSFCAQEAPTASQGLLKLFQKNSPMEDLGAKGAKEKMKEESWHIHFFEYGRGVCMYRTAKTRALVLKGIPESLRGELWLLFSGAWNEMVTHPGYYAELVEKSTGKYSLATEEIERDLHRSMPEHPAFQNELGIAALRRVLTAYAFRNPTIGYCQAMNIVTSVLLLYGSEEEAFWLLVALCERMLPDYYNTRVVGALVDQGIFEELTRDFLPQLSEKMQDLGVISSISLSWFLTLFLSVMPFESAVVIVDCFFYEGIKVILQVALAVLDANMEQLLGCSDEGEAMTMLGRYLDNVVNKQSVSPPIPHLRALLSSSDDPPAEVDIFELLKVSYEKFSSLRAEDIEQMRFKQRLKVIQSLEDTAKRSVVRAIPVDIGFSIEELEDLYMVFKAKHLASQYWGCSRTMAGRRDPSLPYLEQYRIDASQFRELFASLTPWACGSHTPLLAGRMFRLLDENKDSLINFKEFVTGMSGMYHGDLTEKLKVLYKLHLPPALSPEEAESALEAAHYFTEDSSSEEALPQEEQEGSGSEERGEEKGTSSPDYRHYLRMWAKEKEAQKETIKDLPKMNQEQFIELCKTLYNMFSEDPMEQDLYHAIATVASLLLRIGEVGKKFSARTGRKPRDCATEEDEPPAPELHQDAARELQPPAAGDPQAKAGGDTHLGKAPQESQVVVEGGSGEGQGSPSQLLSDDETKDDMSMSSYSVVSTGSLQCEDLADDTVLVGGEACSPTARIGGTVDTDWCISFEQILASILTESVLVNFFEKRVDIGLKIKDQKKVERQFSTASDHEQPGVSG

SEQ ID NO: 1990 - protein, 103 aa, Homo sapiens
MAESWSGQALQALPATVLGALGSEFLREWEAQDMRVTLFKLLLLWLVLSLLGIQLAWGFYGNTVTGLYHRPGLGGQNGSTPDGSTHFPSWEMAANEPLKTHRE

SEQ ID NO: 1991 - protein, 188 aa, Homo sapiens
MEARFTRGKSALLERALARPRTEVSLSAFALLFSELVQHCQSRVFSVAELQSRLAALGRQVGARVLDALVAREKGARRETKVLGALLFVKGAVWKALFGKEADKLEQANDDARTFYIIEREPLINTYISVPKENSTLNCASFTAGIVEAVLTHSGFPAKVTAHWHKGTTLMIKFEEAVIARDRALEGR

SEQ ID NO: 1992 - protein, 630 aa, Homo sapiens
MAELCPLAEELSCSICLEPFKEPVTTPCGHNFCGSCLNETWAVQGSPYLCPQCRAVYQARPQLHKNTVLCNVVEQFLQADLAREPPADVWTPPARASAPSPNAQVACDHCLKEAAVKTCLVCMASFCQEHLQPHFDSPAFQDHPLQPPVRDLLRRKCSQHNRLREFFCPEHSECICHICLVEHKTCSPASLSQASADLEATLRHKLTVMYSQINGASRALDDVRNRQQDVRMTANRKVEQLQQEYTEMKALLDASETTSTRKIKEEEKRVNSKFDTIYQILLKKKSEIQTLKEEIEQSLTKRDEFEFLEKASKLRGISTKPVYIPEVELNHKLIKGIHQSTIDLKNELKQCIGRLQEPTPSSGDPGEHDPASTHKSTRPVKKVSKEEKKSKKPPPVPALPSKLPTFGAPEQLVDLKQAGLEAAAKATSSHPNSTSLKAKVLETFLAKSRPELLEYYIKVILDYNTAHNKVALSECYTVASVAEMPQNYRPHPQRFTYCSQVLGLHCYKKGIHYWEVELQKNNFCGVGICYGSMNRQGPESRLGRNSASWCVEWFNTKISAWHNNVEKTLPSTKATRVGVLLNCDHGFVIFFAVADKVHLMYKFRVDFTEALYPAFWVFSAGATLSICSPK

SEQ ID NO: 1993 - protein, 177 aa, Homo sapiens
MLGCGIPALGLLLLLQGSADGNGIQGFFYPWSCEGDIWDRESCGGQAAIDSPNLCLRLRCCYRNGVCYHQRPDENVRRKHMWALVWTCSGLLLLSCSICLFWWAKRRDVLHMPGFLAGPCDMSKSVSLLSKHRGTKKTPSTGSVPVALSKESRDVEGGTEGEGTEEGEETEGEEEED

SEQ ID NO: 1994 - protein, 382 aa, Homo sapiens
MTEFWLISAPGEKTCQQTWEKLHAATSKNNNLAVTSKFNIPDLKVGTLDVLVGLSDELAKLDAFVEGVVKKVAQYMADVLEDSKDKVQENLLANGVDLVTYITRFQWDMAKYPIKQSLKNISEIIAKGVTQIDNDLKSRASAYNNLKGNLQNLERKNAGSLLTRSLAEIVKKDDFVLDSEYLVTLLVVVPKLNHNDWIKQYETLAEMVVPRSSNVLSEDQDSYLCNVTLFRKAVDDFRHKARENKFIVRDFQYNEEEMKADKEEMNRLSTDKKKQFGPLVRWLKVNFSEAFIAWIHVKALRVFVESVLRYGLPVNFQAMLLQPNKKTLKKLREVLHELYKHLDSSAAAIIDAPMDIPGLNLSQQEYYPYVYYKIDCNLLEFK

SEQ ID NO: 1995 - protein, 447 aa, Homo sapiens
MAFHEMQAHKNALGTSGEQQAADITGPTPHQGGWKQVEQSRSQVQAIGEKVSLAQAKIEKIKGSKKAIKVFSSAKYPAPERLQEYGSIFTGAQDPGLQRRPRHRIQSKHRPLDERALQEKLKDFPVCVSTKPEPEDDAEEGLGGLPSNISSVSSLLLFNTTENLYKKYVFLDPLAGAVTKTHVMLGAETEEKLFDAPLSISKREQLEQQVPENYFYVPDLGQVPEIDVPSYLPDLPSIANDLMYSADLGPGIAPSAPGTIPELPTFHTEVAEPLKADLQDGVLTPPPPPPPPPPAPEVLASAPPLPPSTAAPVGQGARQDDGSSSASPSVQGAPREVVDPSGGWATLLESIRQAGGIGKAKLRSMKERKLEKKKQKEQEQVRATSQGGHLMSDLFNKLVMRRKGISGKGPGAGEGPGGAFARVSDSIPPVPPPQQPQAEEDEDDWES

SEQ ID NO: 1996 - protein, 4388 aa, Homo sapiens
MLEGLVAWVLNTYLGKYVNNLNTDQLSVALLKGAVELENLPLKKDALKELELPFEVKAGFIGKVTLQIPFYRPHVDPWVISISSLHLIGAPEKIQDFNDEKEKLLERERKKALLQALEEKWKNDRQQKGESYWYSVTASVVTRIVENIELKIQDVHLRFEDGVTNPSHPFAFGICIKNVSMQNAVNEPVQKLMRKKQLDVAEFSIYWDVDCTLLGDLPQMELQEAMARSMESRSHHYVLEPVFASALLKRNCSKKPLRSRHSPRIDCDIQLETIPLKLSQLQYRQIMEFLKELERKERQVKFRRWKPKVAISKNCREWWYFALNANLYEIREQRKRCTWDFMLHRARDAVSYTDKYFNKLKGGLLSTDDKEEMCRIEEEQSFEELKILRELVHDRFHKQEELAESLREPQFDSPGACPGAPEPGGGSGMLQYLQSWFPGWGGWYGQQTPEGNVVEGLSAEQQEQWIPEEILGTEEFFDPTADASCMNTYTKRDHVFAKLNLQLQRGTVTLLHKEQGTPQMNESAFMQLEFSDVKLLAESLPRRNSSLLSVRLGGLFLRDLATEGTMFPLLVFPNPQKEVGRVSQSFGLQTTSADRSDHYPAADPDGPVFEMLYERNPAHSHFERRLNVSTRPLNIIYNPQAIKKVADFFYKGKVHTSGFGYQSELELRVAEAARRQYNKLKMQTKAEIRQTLDRLLVGDFIEESKRWTVRLDISAPQVIFPDDFKFKNPVLVVVDLGRMLLTNTQDNSRRKSRDGSASEETQFSDDEYKTPLATPPNTPPPESSSSNGEKTPPFSGVEFSEEQLQAHLMSTKMYERYSLSFMDLQIMVGRVKDNWKHVQDIDVGPTHVVEKFNVHLQLERRLIYTSDPKYPGAVLSGNLPDLKIHINEDKISALKNCFALLTTPEMKTSDTQIKEKIFPQEEQRGSLQDSVMNLTQSIVLLEQHTREVLVESQLLLAEFKVNCMQLGVESNGRYISVLKVFGTNAHFVKRPYDAEVSLTVHGLLLVDTMQTYGADFDLLMASHKNLSFDIPTGSLRDSRAQSPVSGPNVAHLTDGATLNDRSATSVSLDKILTKEQESLIKLEYQFVSSECPSMNLDSTLQVISLQVNNLDIILNPETIVELIGFLQKSFPKEKDDLSPQPLMTDFERSFREQGTYQSTYEQNTEVAVEIHRLNLLLLRTVGMANREKYGRKIATASIGGTKVNVSMGSTFDMNGSLGCLQLMDLTQDNVKNQYVVSIGNSVGYENIISDIGYFESVFVRMEDAALTEALSFTFVERSKQECFLNLKMASLHYNHSAKFLKELTLSMDELEENFRGMLKSAATKVTTVLATKTAEYSEMVSLFETPRKTREPFILEENEIYGFDLASSHLDTVKLILNINIESPVVSIPRKPGSPELLVGHLGQIFIQNFVAGDDESRSDRLQVEIKDIKLYSLNCTQLAGREAVGSEGSRMFCPPSGSGSANSQEEAHFTRHDFFESLHRGQAFHILNNTTIQFKLEKIPIERESELTFSLSPDDLGTSSIMKIEGKFVNPVQVVLAKHVYEQVLQTLDNLVYSEDLNKYPASATSSPCPDSPLPPLSTCGESSVERKENGLFSHSSLSNTSQKSLSVKEVKSFTQIQATFCISELQVQLSGDLTLGAQGLVSLKFQDFEVEFSKDHPQTLSIQIALHSLLMEDLLEKNPDSKYKNLMVSRGAPKPSSLAQKEYLSQSCPSVSNVEYPDMPRSLPSHMEEAPNVFQLYQRPTSASRKKQKEVQDKDYPLTPPPSPTVDEPKILVGKSKFDDSLVHINIFLVDKKHPEFSSSYNRVNRSIDVDFNCLDVLITLQTWVVILDFFGIGSTADNHAMRLPPEGILHNVKLEPHASMESGLQDPVNTKLDLKVHSLSLVLNKTTSELAKANVSKLVAHLEMIEGDLALQGSIGSLSLSDLTCHGEFYRERFTTSGEEALIFQTFKYGRPDPLLRREHDIRVSLRMASVQYVHTQRFQAEVVAFIQHFTQLQDVLGRQRAAIEGQTVRDQAQRCSRVLLDIEAGAPVLLIPESSRSNNLIVANLGKLKVKNKFLFAGFPGTFSLQDKESVPSASPTGIPKHSLRKTTSTEEPRGTHSQGQFTMPLAGMSLGSLKSEFVPSTSTKQQGPQPTLSVGQESSSPEDHVCLLDCVVVDLQDMDIFAAERHPREYSKAPEDSSGDLIFPSYFVRQTGGSLLTEPCRLKLQVERNLDKEISHTVPDISIHGNLSSVHCSLDLYKYKLIRGLLENNLGEPIEEFMRPYDLQDPRIHTVLSGEVYTCMCFLIDMVNVSLELKDPKRKEGAGSLARFDFKKCKLLYESFSNQTKSINLVSHSMMAFDTRYAGQKTSPGMTNVFSCIFQPAKNSSTTQGSIQIELHFRSTKDSSCFTVVLNNLRVFLIFDWLLLVHDFLHTPSDIKKQNHVTPSRHRNSSSESAIVPKTVKSGVVTKRSSLPVSNERHLEVKVNVTGTEFVVIEDVSCFDTNAIILKGTTVLTYKPRFVDRPFSGSLFGIEVFSCRLGNEHDTALSIVDPVQIQMELVGNSSYQNSSGLMDAFNSEDFPPVLEIQLQALDIRLSYNDVQLFLAIAKSIPEQANAAVPDSVALESDSVGTYLPGASRVGEEIREGTRHTLDPVLELQLARLQELGFSMDDCRKALLACQGQLKKAASWLFKNAEPLKSLSLASTSRDSPGAVAAPLISGVEIKAESVCICFIDDCMDCDVPLAELTFSRLNFLQRVRTSPEGYAHFTLSGDYYNRALSGWEPFIEPWPCSVSWQQQAASRLHPPRLKLEAKAKPRLDINITSVLIDQYVSTKESWMADYCKDDKDIESAKSEDWMGSSVDPPCFGQSLPLVYLRTRSTASLTNLEHQIYARAEVKTPKRRQPFVPFALRNHTGCTLWFATLTTTPTRAALSHSGSPGVVPEGNGTFLDDTHNVSEWREVLTGEEIPFEFEARGKLRHRHTHDLRIHQLQVRVNGWEQVSPVSVDKVGTFFRYAAPDKNSSSSTIGSPSSRTNIIHPQVYFSSLPPVRVVFAVTMEGSARKVITVRSALIVRNRLETPMELRLDSPSAPDKPVVLPAIMPGDSFAVPLHLTSWRLQARPKGLGVFFCKAPIHWTNVVKTAEISSSKRECHSMDTEKSRFFRFCVAIKKENYPDYMPSNIFSDSAKQIFRQPGHTIYLLPTVVICNLLPCELDFYVKGMPINGTLKPGKEAALHTADTSQNIELGVSLENFPLCKELLIPPGTQNYMVRMRLYDVNRRQLNLTIRIVCRAEGSLKIFISAPYWLINKTGLPLIFRQDNAKTDAAGQFEEHELARSLSPLLFCYADKEQPNLCTMRIGRGIHPEGMPGWCQGFSLDGGSGVRALKVIQQGNRPGLIYNIGIDVKKGRGRYIDTCMVIFAPRYLLDNKSSHKLAFAQREFARGQGTANPEGYISTLPGSSVVFHWPRNDYDQLLCVRLMDVPNCIWSGGFEVNKNNSFHINMRDTLGKCFFLRVEITLRGATYRISFSDTDQLPPPFRIDNFSKVPVVFTQHGVAEPRLRTEVKPMTSLDYAWDEPTLPPFITLTVKGAGSSEINCNMNDFQDNRQLYYENFIYIAATYTFSGLQEGTGRPVASNKAITCAELVLDVSPKTQRVILKKKEPGKRSQLWRMTGTGMLAHEGSSVPHNPNKPSAARSTEGSAILDIAGLAAVTDNRYEPLMLRKPDRRRSTTQTWSFREGKLTCGLHGLVVQAKGGLSGLFDGAEVVLGPDTSMELLGPVPPEQQFINQKMRPGSGMLSIRVIPDGPTRALQITDFCHRKSSRSYEVDELPVTEQELQKLKNPDTEQELEVLVRLEGGIGLSLINKVPEELVFASLTGINVHYTQLATSHMLELSIQDVQVDNQLIGTTQPFMLYVTPLSNENEVIETGPAVQVNAVKFPSKSALTNIYKHLMITAQRFTVQIEEKLLLKLLSFFGYDQAESEVEKYDENLHEKTAEQGGTPIRYYFENLKISIPQIKLSVFTSNKLPLDLKALKSTLGFPLIRFEDAVINLDPFTRVHPYETKEFIINDILKHFQEELLSQAARILGSVDFLGNPMGLLNDVSEGVTGLIKYGNVGGLIRNVTHGVSNSAAKFAGTLSDGLGKTMDNRHQSEREYIRYHAATSGEHLVAGIHGLAHGIIGGLTSVITSTVEGVKTEGGVSGFISGLGKGLVGTVTKPVAGALDFASETAQAVRDTATLSGPRTQAQRVRKPRCCTGPQGLLPRYSESQAEGQEQLFKLTDNIQDEFFIAVENIDSYCVLISSKAVYFLKSGDYVDREAIFLEVKYDDLYHCLVSKDHGKVYVQVTKKAVSTSSGVSIPGPSHQKPMVHVKSEVLAVKLSQEINYAKSLYYEQQLMLRLSENREQLELDS

SEQ ID NO: 1997 - protein, 4363 aa, Homo sapiens
MLEGLVAWVLNTYLGKYVNNLNTDQLSVALLKGAVELENLPLKKDALKELELPFEVKAGFIGKVTLQIPFYRPHVDPWVISISSLHLIGAPEKIQDFNDEKEKLLERERKKALLQALEEKWKNDRQQKGESYWYSVTASVVTRIVENIELKIQDVHLRFEDGVTNPSHPFAFGICIKNVSMQNAVNEPVQKLMRKKQLDVAEFSIYWDVDCTLLGDLPQMELQEAMARSMESRSHHYVLEPVFASALLKRNCSKKPLRSRHSPRIDCDIQLETIPLKLSQLQYRQIMEFLKELERKERQVKFRRWKPKVAISKNCREWWYFALNANLYEIREQRKRCTWDFMLHRARDAVSYTDKYFNKLKGGLLSTDDKEEMCRIEEEQSFEELKILRELVHDRFHKQEELAESLREPQFDSPGACPGAPEPGGGSGMLQYLQSWFPGWGGWYGQQTPEGNVVEGLSAEQQEQWIPEEILGTEEFFDPTADASCMNTYTKRDHVFAKLNLQLQRGTVTLLHKEQGTPQMNESAFMQLEFSDVKLLAESLPRRNSSLLSVRLGGLFLRDLATEGTMFPLLVFPNPQKEVGRVSQSFGLQTTSADRSDHYPAADPDGPVFEMLYERNPAHSHFERRLNVSTRPLNIIYNPQAIKKVADFFYKGKVHTSGFGYQSELELRVAEAARRQYNKLKMQTKAEIRQTLDRLLVGDFIEESKRWTVRLDISAPQVIFPDDFKFKNPVLVVVDLGRMLLTNTQDNSRRKSRDGSASEETQFSDDEYKTPLATPPNTPPPESSSSNGEKTPPFSGVEFSEEQLQAHLMSTKMYERYSLSFMDLQIMVGRVKDNWKHVQDIDVGPTHVVEKFNVHLQLERRLIYTSDPKYPGAVLSGNLPDLKIHINEDKISALKNCFALLTTPEMKTSDTQIKEKIFPQEEQRGSLQDSVMNLTQSIVLLEQHTREVLVESQLLLAEFKVNCMQLGVESNGRYISVLKVFGTNAHFVKRPYDAEVSLTVHGLLLVDTMQTYGADFDLLMASHKNLSFDIPTGSLRDSRAQSPVSGPNVAHLTDGATLNDRSATSVSLDKILTKEQESLIKLEYQFVSSECPSMNLDSTLQVISLQVNNLDIILNPETIVELIGFLQKSFPKEKDDLSPQPLMTDFERSFREQGTYQSTYEQNTEVAVEIHRLNLLLLRTVGMANREKYGRKIATASIGGTKVNVSMGSTFDMNGSLGCLQLMDLTQDNVKNQYVVSIGNSVGYENIISDIGYFESVFVRMEDAALTEALSFTFVERSKQECFLNLKMASLHYNHSAKFLKELTLSMDELEENFRGMLKSAATKVTTVLATKTAEYSEMVSLFETPRKTREPFILEENEIYGFDLASSHLDTVKLILNINIESPVVSIPRKPGSPELLVGHLGQIFIQNFVAGDDESRSDRLQVEIKDIKLYSLNCTQLAGREAVGSEGSRMFCPPSGSGSANSQEEAHFTRHDFFESLHRGQAFHILNNTTIQFKLEKIPIERESELTFSLSPDDLGTSSIMKIEGKFVNPVQVVLAKHVYEQVLQTLDNLVYSEDLNKYPASATSSPCPDSPLPPLSTCGESSVERKENGLFSHSSLSNTSQKSLSVKEVKSFTQIQATFCISELQVQLSGDLTLGAQGLVSLKFQDFEVEFSKDHPQTLSIQIALHSLLMEDLLEKNPDSKYKNLMVSRGAPKPSSLAQKEYLSQSCPSVSNVEYPDMPRSLPSHMEEAPNVFQLYQRPTSASRKKQKEVQDKDYPLTPPPSPTVDEPKILVGKSKFDDSLVHINIFLVDKKHPEFSSSYNRVNRSIDVDFNCLDVLITLQTWVVILDFFGIGSTADNHAMRLPPEGILHNVKLEPHASMESGLQDPVNTKLDLKVHSLSLVLNKTTSELAKANVSKLVAHLEMIEGDLALQGSIGSLSLSDLTCHGEFYRERFTTSGEEALIFQTFKYGRPDPLLRREHDIRVSLRMASVQYVHTQRFQAEVVAFIQHFTQLQDVLGRQRAAIEGQTVRDQAQRCSRVLLDIEAGAPVLLIPESSRSNNLIVANLGKLKVKNKFLFAGFPGTFSLQDKESVPSASPTGIPKHSLRKTTSTEEPRGTHSQGQFTMPLAGMSLGSLKSEFVPSTSTKQQGPQPTLSVGQESSSPEDHVCLLDCVVVDLQDMDIFAAERHPREYSKAPEDSSGDLIFPSYFVRQTGGSLLTEPCRLKLQVERNLDKEISHTVPDISIHGNLSSVHCSLDLYKYKLIRGLLENNLGEPIEEFMRPYDLQDPRIHTVLSGEVYTCMCFLIDMVNVSLELKDPKRKEGAGSLARFDFKKCKLLYESFSNQTKSINLVSHSMMAFDTRYAGQKTSPGMTNVFSCIFQPAKNSSTTQGSIQIELHFRSTKDSSCFTVVLNNLRVFLIFDWLLLVHDFLHTPSDIKKQNHVTPSRHRNSSSESAIVPKTVKSGVVTKRSSLPVSNERHLEVKVNVTGTEFVVIEDVSCFDTNAIILKGTTVLTYKPRFVDRPFSGSLFGIEVFSCRLGNEHDTALSIVDPVQIQMELVGNSSYQNSSGLMDAFNSEDFPPVLEIQLQALDIRLSYNDVQLFLAIAKSIPEQANAAVPDSVALESDSVGTYLPGASRVGEEIREGTRHTLDPVLELQLARLQELGFSMDDCRKALLACQGQLKKAASWLFKNAEPLKSLSLASTSRDSPGAVAAPLISGVEIKAESVCICFIDDCMDCDVPLAELTFSRLNFLQRVRTSPEGYAHFTLSGDYYNRALSGWEPFIEPWPCSVSWQQQAASRLHPPRLKLEAKAKPRLDINITSVLIDQYVSTKESWMADYCKDDKDIESAKSEDWMGSSVDPPCFGQTEVKTPKRRQPFVPFALRNHTGCTLWFATLTTTPTRAALSHSGSPGVVPEGNGTFLDDTHNVSEWREVLTGEEIPFEFEARGKLRHRHTHDLRIHQLQVRVNGWEQVSPVSVDKVGTFFRYAAPDKNSSSSTIGSPSSRTNIIHPQVYFSSLPPVRVVFAVTMEGSARKVITVRSALIVRNRLETPMELRLDSPSAPDKPVVLPAIMPGDSFAVPLHLTSWRLQARPKGLGVFFCKAPIHWTNVVKTAEISSSKRECHSMDTEKSRFFRFCVAIKKENYPDYMPSNIFSDSAKQIFRQPGHTIYLLPTVVICNLLPCELDFYVKGMPINGTLKPGKEAALHTADTSQNIELGVSLENFPLCKELLIPPGTQNYMVRMRLYDVNRRQLNLTIRIVCRAEGSLKIFISAPYWLINKTGLPLIFRQDNAKTDAAGQFEEHELARSLSPLLFCYADKEQPNLCTMRIGRGIHPEGMPGWCQGFSLDGGSGVRALKVIQQGNRPGLIYNIGIDVKKGRGRYIDTCMVIFAPRYLLDNKSSHKLAFAQREFARGQGTANPEGYISTLPGSSVVFHWPRNDYDQLLCVRLMDVPNCIWSGGFEVNKNNSFHINMRDTLGKCFFLRVEITLRGATYRISFSDTDQLPPPFRIDNFSKVPVVFTQHGVAEPRLRTEVKPMTSLDYAWDEPTLPPFITLTVKGAGSSEINCNMNDFQDNRQLYYENFIYIAATYTFSGLQEGTGRPVASNKAITCAELVLDVSPKTQRVILKKKEPGKRSQLWRMTGTGMLAHEGSSVPHNPNKPSAARSTEGSAILDIAGLAAVTDNRYEPLMLRKPDRRRSTTQTWSFREGKLTCGLHGLVVQAKGGLSGLFDGAEVVLGPDTSMELLGPVPPEQQFINQKMRPGSGMLSIRVIPDGPTRALQITDFCHRKSSRSYEVDELPVTEQELQKLKNPDTEQELEVLVRLEGGIGLSLINKVPEELVFASLTGINVHYTQLATSHMLELSIQDVQVDNQLIGTTQPFMLYVTPLSNENEVIETGPAVQVNAVKFPSKSALTNIYKHLMITAQRFTVQIEEKLLLKLLSFFGYDQAESEVEKYDENLHEKTAEQGGTPIRYYFENLKISIPQIKLSVFTSNKLPLDLKALKSTLGFPLIRFEDAVINLDPFTRVHPYETKEFIINDILKHFQEELLSQAARILGSVDFLGNPMGLLNDVSEGVTGLIKYGNVGGLIRNVTHGVSNSAAKFAGTLSDGLGKTMDNRHQSEREYIRYHAATSGEHLVAGIHGLAHGIIGGLTSVITSTVEGVKTEGGVSGFISGLGKGLVGTVTKPVAGALDFASETAQAVRDTATLSGPRTQAQRVRKPRCCTGPQGLLPRYSESQAEGQEQLFKLTDNIQDEFFIAVENIDSYCVLISSKAVYFLKSGDYVDREAIFLEVKYDDLYHCLVSKDHGKVYVQVTKKAVSTSSGVSIPGPSHQKPMVHVKSEVLAVKLSQEINYAKSLYYEQQLMLRLSENREQLELDS

SEQ ID NO: 1998 - protein, 626 aa, Homo sapiens
MSRSGAAAEKADSRQRPQMKVNEYKENQNIAYVSLRPAQTTVLIKTAKVYLAPFSLSNYQLDQLMCPKSLSEKNSNNEVACKKTKIKKTCRRIIPPKMKNTSSKAESTLQNSSSAVHTESNKLQPKRTADAMNLSVDVESSQDGDSDEDTTPSLDFSGLSPYERKRLKNISENADFFASLQLSESAARLREMIEKRQPPKSKRKKPKRENGIGCRRSMRLLKVDPSGVSLPAAPTPPTLVADETPLLPPGPLEMTSENQEDNNERFKGFLHTWAGMSKPSSKNTEKGLSSIKSYKANLNGMVISEDTVYKVTTGPIFSMALHPSETRTLVAVGAKFGQVGLCDLTQQPKEDGVYVFHPHSQPVSCLYFSPANPAHILSLSYDGTLRCGDFSRAIFEEVYRNERSSFSSFDFLAEDASTLIVGHWDGNMSLVDRRTPGTSYEKLTSSSMGKIRTVHVHPVHRQYFITAGLRDTHIYDARRLNSRRSQPLISLTEHTKSIASAYFSPLTGNRVVTTCADCNLRIFDSSCISSKIPLLTTIRHNTFTGRWLTRFQAMWDPKQEDCVIVGSMAHPRRVEIFHETGKRVHSFGGEYLVSVCSINAMHPTRYILAGGNSSGKIHVFMNEKSC

SEQ ID NO: 1999 - protein, 696 aa, Homo sapiens
MKFAEHLSAHITPEWRKQYIQYEAFKDMLYSAQDQAPSVEVTDEDTVKRYFAKFEEKFFQTCEKELAKINTFYSEKLAEAQRRFATLQNELQSSLDAQKESTGVTTLRQRRKPVFHLSHEERVQHRNIKDLKLAFSEFYLSLILLQNYQNLNFTGFRKILKKHDKILETSRGADWRVAHVEVAPFYTCKKINQLISETEAVVTNELEDGDRQKAMKRLRVPPLGAAQPAPAWTTFRVGLFCGIFIVLNITLVLAAVFKLETDRSIWPLIRIYRGGFLLIEFLFLLGINTYGWRQAGVNHVLIFELNPRSNLSHQHLFEIAGFLGILWCLSLLACFFAPISVIPTYVYPLALYGFMVFFLINPTKTFYYKSRFWLLKLLFRVFTAPFHKVGFADFWLADQLNSLSVILMDLEYMICFYSLELKWDESKGLLPNNSEESGICHKYTYGVRAIVQCIPAWLRFIQCLRRYRDTKRAFPHLVNAGKYSTTFFMVTFAALYSTHKERGHSDTMVFFYLWIVFYIISSCYTLIWDLKMDWGLFDKNAGENTFLREEIVYPQKAYYYCAIIEDVILRFAWTIQISITSTTLLPHSGDIIATVFAPLEVFRRFVWNFFRLENEHLNNCGEFRAVRDISVAPLNADDQTLLEQMMDQDDGVRNRQKNRSWKYNQSISLRRPRLASQSKARDTKVLIEDTDDEANT

SEQ ID NO: 2000 - protein, 631 aa, Homo sapiens
MKFAEHLSAHITPEWRKQYIQYEAFKDMLYSAQDQAPSVEVTDEDTVKRYFAKFEEKFFQTCEKELAKINTFYSEKLAEAQRRFATLQNELQSSLDAQKESTGVTTLRQRRKPVFHLSHEERVQHRNIKDLKLAFSEFYLSLILLQNYQNLNFTGFRKILKKHDKILETSRGADWRVAHVEVAPFYTCKKINQLISETEAVVTNELEDGDRQKAMKRLRVPPLGAAQPAPAWTTFRVGLFCGIFIVLNITLVLAAVFKLETDRSIWPLIRIYRGGFLLIEFLFLLGINTYGWRQAGVNHVLIFELNPRSNLSHQHLFEIAGFLGILWCLSLLACFFAPISVIPTYVYPLALYGFMVFFLINPTKTFYYKSRFWLLKLLFRVFTAPFHKVGFADFWLADQLNSLSVILMDLEYMICFYSLELKWDESKGLLPNNSEERGHSDTMVFFYLWIVFYIISSCYTLIWDLKMDWGLFDKNAGENTFLREEIVYPQKAYYYCAIIEDVILRFAWTIQISITSTTLLPHSGDIIATVFAPLEVFRRFVWNFFRLENEHLNNCGEFRAVRDISVAPLNADDQTLLEQMMDQDDGVRNRQKNRSWKYNQSISLRRPRLASQSKARDTKVLIEDTDDEANT

SEQ ID NO: 2001 - protein, 681 aa, Homo sapiens
MAPQVWRRRTLERCLTEVGKATGRPECFLTIQEGLASKFTSLTKVLYDFNKILENGRIHGSPLQKLVIENFDDEQIWQQLELQNEPILQYFQNAVSETINDEDISLLPESEEQEREEDGSEIEADDKEDLEDLEEEEVSDMGNDDPEMGERAENSSKSDLRKSPVFSDEDSDLDFDISKLEQQSKVQNKGQGKPREKSIVDDKFFKLSEMEAYLENIEKEEERKDDNDEEEEDIDFFEDIDSDEDEGGLFGSKKLKSGKSSRNLKYKDFFDPVESDEDITNVHDDELDSNKEDDEIAEEEAEELSISETDEDDDLQENEDNKQHKESLKRVTFALPDDAETEDTGVLNVKKNSDEVKSSFEKRQEKMNEKIASLEKELLEKKPWQLQGEVTAQKRPENSLLEETLHFDHAVRMAPVITEETTLQLEDIIKQRIRDQAWDDVVRKEKPKEDAYEYKKRLTLDHEKSKLSLAEIYEQEYIKLNQQKTAEEENPEHVEIQKMMDSLFLKLDALSNFHFIPKPPVPEIKVVSNLPAITMEEVAPVSVSDAALLAPEEIKEKNKAGDIKTAAEKTATDKKRERRKKKYQKRMKIKEKEKRRKLLEKSSVDQAGKYSKTVASEKLKQLTKTGKASFIKDEGKDKALKSSQAFFSKLQDQVKMQINDAKKTEKKKKKRQDISVHKLKL

SEQ ID NO: 2002 - protein, 312 aa, Homo sapiens
MDGVNDSSLQGFVLMGISDHPQLEMIFFIAILFSYLLTLLGNSTIILLSRLEARLHTPMYFFLSNLSSLDLAFATSSVPQMLINLWGPGKTISYGGCITQLYVFLWLGATECILLVVMAFDRYVAVCRPLRYTAIMNPQLCWLLAVIACLGGLGNSVIQSTFTLQLPLCGHRRVEGFLCEVPAMIKLACGDTSLNQAVLNGVCTFFTAVPLSIIVISYCLIAQAVLKIRSAEGRRKAFNTCLSHLLVVFLFYGSASYGYLLPAKNSKQDQGKFISLFYSLVTPMVNPLIYTLRNMEVKGALRRLLGKGREVG

SEQ ID NO: 2003 - protein, 401 aa, Homo sapiens
MEKSKNFRIDALLAVDPPRAASAQSAPLALVTSLAAAASGTGGGGGGGGASGGTSGSCSPASSEPPAAPADRLRAESPSPPRLLAAHCALLPKPGFLGAGGGGGGTGGGHGGPHHHAHPGAAAAAAAAAAAAAAGGLALGLHPGGAQGGAGLPAQAALYGHPVYGYSAAAAAAALAGQHPALSYSYPQVQGAHPAHPADPIKLGAGTFQLDQWLRASTAGMILPKMPDFNSQAQSNLLGKCRRPRTAFTSQQLLELEHQFKLNKYLSRPKRFEVATSLMLTETQVKIWFQNRRMKWKRSKKAKEQAAQEAEKQKGGGGGAGKGGAEEPGAEELLGPPAPGDKGSGRRLRDLRDSDPEEDEDEDDEDHFPYSNGASVHAASSDCSSEDDSPPPRPSHQPAPQ

SEQ ID NO: 2004 - protein, 189 aa, Homo sapiens
MGGLSTVGACPGILGAQQAQAQSNLLGKCRRPRTAFTSQQLLELEHQFKLNKYLSRPKRFEVATSLMLTETQVKIWFQNRRMKWKRSKKAKEQAAQEAEKQKGGGGGAGKGGAEEPGAEELLGPPAPGDKGSGRRLRDLRDSDPEEDEDEDDEDHFPYSNGASVHAASSDCSSEDDSPPPRPSHQPAPQ

SEQ ID NO: 2005 - protein, 294 aa, Homo sapiens
MAHGIPSQGKVTITVDEYSSNPTQAFTHYNINQSRFQPPHVHMVDPIPYDTPKPAGHTRFVCISDTHSRTDGIQMPYGDILLHTGDFTELGLPSEVKKFNDWLGNLPYEYKIVIAGNHELTFDKEFMADLVKQDYYRFPSVSKLKPEDFDNVQSLLTNSIYLQDSEVTVKGFRIYGAPWTPWFNGWGFNLPRGQSLLDKWNLIPEGIDILMTHGPPLGFRDWVPKELQRVGCVELLNTVQRRVRPKLHVFGGIHEGYGIMTDGYTTYINASTCTVSFQPTNPPIIFDLPNPQGS

SEQ ID NO: 2006 - protein, 277 aa, Homo sapiens
MAHGIPSQGKVTITVDEYSSNPTQAFTHYNINQSRFQPPHVHMVDPIPYDTPKPAGHTRFVCISDTHSRTDGIQMPYGDILLHTGDFTELGLPSEVKKFNDWLGNLPYEYKIVIAGNHELTFDKEFMADLVKQDYYRFPSVSKLKPEDFDNVQSLLTNSIYLQDSEVTVKGFRIYGAPWTPWFNGWGFNLPRGQSLLDKWNLIPEGIDILMTHGPPLGFRDWVPKELQRVGCVELLNTVQRRVRPKLHVFGGIHEVNPVSISKALRTKICSLPSKTS

SEQ ID NO: 2007 - protein, 860 aa, Homo sapiens
MEQVAEGARVTAVPVSAADSTEELAEVEEGVGVVGEDNDAAARGAEAFGDSEEDGEDVFEVEKILDMKTEGGKVLYKVRWKGYTSDDDTWEPEIHLEDCKEVLLEFRKKIAENKAKAVRKDIQRLSLNNDIFEANSDSDQQSETKEDTSPKKKKKKLRQREEKSPDDLKKKKAKAGKLKDKSKPDLESSLESLVFDLRTKKRISEAKEELKESKKPKKDEVKETKELKKVKKGEIRDLKTKTREDPKENRKTKKEKFVESQVESESSVLNDSPFPEDDSEGLHSDSREEKQNTKSARERAGQDMGLEHGFEKPLDSAMSAEEDTDVRGRRKKKTPRKAEDTRENRKLENKNAFLEKKTVPKKQRNQDRSKSAAELEKLMPVSAQTPKGRRLSGEERGLWSTDSAEEDKETKRNESKEKYQKRHDSDKEEKGRKEPKGLKTLKEIRNAFDLFKLTPEEKNDVSENNRKREEIPLDFKTIDDHKTKENKQSLKERRNTRDETDTWAYIAAEGDQEVLDSVCQADENSDGRQQILSLGMDLQLEWMKLEDFQKHLDGKDENFAATDAIPSNVLRDAVKNGDYITVKVALNSNEEYNLDQEDSSGMTLVMLAAAGGQDDLLRLLITKGAKVNGRQKNGTTALIHAAEKNFLTTVAILLEAGAFVNVQQSNGETALMKACKRGNSDIVRLVIECGADCNILSKHQNSALHFAKQSNNVLVYDLLKNHLETLSRVAEETIKDYFEARLALLEPVFPIACHRLCEGPDFSTDFNYKPPQNIPEGSGILLFIFHANFLGKEVIARLCGPCSVQAVVLNDKFQLPVFLDSHFVYSFSPVAGPNKLFIRLTEAPSAKVKLLIGAYRVQLQ

SEQ ID NO: 2008 - protein, 867 aa, Homo sapiens
MEQVAEGARVTAVPVSAADSTEELAEVEEGVGVVGEDNDAAARGAEAFGDSEEDGEDVFEVEKILDMKTEGGKVLYKVRWKGYTSDDDTWEPEIHLEDCKEVLLEFRKKIAENKAKAVRKDIQRLSLNNDIFEANSDSDQQSETKEDTSPKKKKKKLRQREEKSPDDLKKKKAKAGKLKDKSKPDLESSLESLVFDLRTKKRISEAKEELKESKKPKKDEVKETKELKKVKKGEIRDLKTKTREDPKENRKTKKEKFVESQVESESSVLNDSPFPEDDSEGLHSDSREEKQNTKSARERAGQDMGLEHGFEKPLDSAMSAEEDTDVRGRRKKKTPRKAEDTRENRKLENKNAFLEKKTVPKKQRNQDRSKSAAELEKLMPVSAQTPKGRRLSGEERGLWSTDSAEEDKETKRNESKEKYQKRHDSDKEEKGRKEPKGLKTLKEIRNAFDLFKLTPEEKNDVSENNRKREEIPLDFKTIDDHKTKENKQSLKERRNTRDETDTWAYIAAEGDQEVLDSVCQADENSDGRQQILSLGMDLQLEWMKLEDFQKHLDGKDENFAATDAIPSNVLRDAVKNGDYITVKVALNSNEEYNLDQEDSSGMTLVMLAAAGGQDDLLRLLITKGAKVNGRQKNGTTALIHAAEKNFLTTVAILLEAGAFVNVQQSNGETALMKACKRGNSDIVRLVIECGADCNILSKHQNSALHFAKQSNNVLVYDLLKNHLETLSRVAEETIKDYFEARLALLEPVFPIACHRLCEGPDFSTDFNYKPPQNIPEGSGILLFIFHANFLGKEVIARLCGPCSVQAVVLNDKFQLPVFLTGSRSVVQAGVQWRGLQLTGVLTSQAQAILPPQPPNYLGLKMHATTSG

SEQ ID NO: 2009 - protein, 656 aa, Homo sapiens [sequence omitted]

SEQ ID NO: 2010 - protein, 697 aa, Homo sapiens
MDHRKARVLPAGHYCPSLGIWASQVGSVRSSVPPSISRNPAMVNEARGNSSLNPCLEGSASSGSESSKDSSRCSTPGLDPERHERLREKMRRRLESGDKWFSLEFFPPRTAEGAVNLISRFDRMAAGGPLYIDVTWHPAGDPGSDKETSSMMIASTAVNYCGLETILHMTCCRQRLEEITGHLHKAKQLGLKNIMALRGDPIGDQWEEEEGGFNYAVDLVKHIRSEFGDYFDICVAGYPKGHPEAGSFEADLKHLKEKVSAGADFIITQLFFEADTFFRFVKACTDMGITCPIVPGIFPIQGYHSLRQLVKLSKLEVPQEIKDVIEPIKDNDAAIRNYGIELAVSLCQELLASGLVPGLHFYTLNREMATTEVLKRLGMWTEDPRRPLPWALSAHPKRREEDVRPIFWASRPKSYIYRTQEWDEFPNGRWGNSSSPAFGELKDYYLFYLKSKSPKEELLKMWGEELTSEESVFEVFVLYLSGEPNRNGHKVTCLPWNDEPLAAETSLLKEELLRVNRQGILTINSQPNINGKPSSDPIVGWGPSGGYVFQKAYLEFFTSRETAEALLQVLKKYELRVNYHLVNVKGENITNAPELQPNAVTWGIFPGREIIQPTVVDPVSFMFWKDEAFALWIERWGKLYEEESPSRTIIQYIHDNYFLVNLVDNDFPLDNCLWQVVEDTLELLNRPTQNARETEAP

SEQ ID NO: 2011 - protein, 334 aa, Homo sapiens
MRLTPRALCSAAQAAWRENFPLCGRDVARWFPGHMAKGLKKMQSSLKLVDCIIEVHDARIPLSGRNPLFQETLGLKPHLLVLNKMDLADLTEQQKIMQHLEGEGLKNVIFTNCVKDENVKQIIPMVTELIGRSHRYHRKENLEYCIMVIGVPNVGKSSLINSLRRQHLRKGKATRVGGEPGITRAVMSKIQVSERPLMFLLDTPGVLAPRIESVETGLKLALCGTVLDHLVGEETMADYLLYTLNKHQRFGYVQHYGLGSACDNVERVLKSVAVKLGKTQKVKVLTGTGNVNIIQPNYPAAARDFLQTFRRGLLGSVMLDLDVLRGHPPAETLP

SEQ ID NO: 2012 - protein, 267 aa, Homo sapiens
MRLTPRALCSAAQAAWRENFPLCGRDVARWFPGHMAKGLKKMQSSLKLVDCIIEVHDARIPLSGRNPLFQETLGLKPHLLVLNKMDLADLTEQQKIMQHLEGEGLKNVIFTNCVKDENVKQIIPMVTELIGRSHRYHRKENLEYCIMVIGVPNVGKSSLINSLRRQHLRKGKATRVGGEPGITRAVMSKIQVESSGARPSTLSRALQASGTCRPLCGFRLLTTLPSPPLSVPAEHPRGRHCPCPYSTVVIVFAPNLWGRHAVFPISR

SEQ ID NO: 2013 - protein, 333 aa, Homo sapiens
MLGWIKRLIRMVFQQVGVSMQSVLWSRKPYGSSRSIVRKIGTNLSLIQCPRVQFQINSHATEWSPSHPGEDAVASFADVGWVAKEEGECSARLRTEVRSRPPLQDDLLFFEKAPSRQISLPDLSQEEPQLKTPALANEEALQKICALENELAALRAQIAKIVTQQEQQNLTAGDLDSTTFGTIPPHPPPPPPPLPPPALGLHQSTSAVDLIKERREKRANAGKTLVKNNPKKPEMPNMLEILKEMNSVKLRSVKRSEQDVKPKPVDATDPAALIAEALKKKFAYRYRSDSQDEVEKGIPKSESEATSERVLFGPHMLKPTGKMKALIENVSDS

SEQ ID NO: 2014 - protein, 300 aa, Homo sapiens
MLGWIKRLIRMVFQQVGVSMQSINSHATEWSPSHPGEDAVASFADVGWVAKEEGECSARLRTEVRSRPPLQDDLLFFEKAPSRQISLPDLSQEEPQLKTPALANEEALQKICALENELAALRAQIAKIVTQQEQQNLTAGDLDSTTFGTIPPHPPPPPPPLPPPALGLHQSTSAVDLIKERREKRANAGKTLVKNNPKKPEMPNMLEILKEMNSVKLRSVKRSEQDVKPKPVDATDPAALIAEALKKKFAYRYRSDSQDEVEKGIPKSESEATSERVLFGPHMLKPTGKMKALIENVSDS

SEQ ID NO: 2015 - protein, 5478 aa, Homo sapiens
MLVIWILTLALRLCASVTTVTPEGSAVHKAISQQGTLWTGEVLEKQTVEQGKSTLRRQKNHFHRSAGELRCRNALKDEGASAGWSVMFAGESVVVLVHLWMTGARVKNLGLVEFASPGDDGDGRAEGFSLGLPLSEQARAAGAREKERQETVINHSTFSGFSQITGSTVNTSIGGNTTSASTPSSSDPFTTFSDYGVSVTFITGSTATKHFLDSSTNSGHSEESTVSHSGPGATGTTLFPSHSATSVFVGEPKTSPITSASMETTALPGSTTTAGLSEKSTTFYSSPRSPDRTLSPARTTSSGVSEKSTTSHSRPGPTHTIAFPDSTTMPGVSQESTASHSIPGSTDTTLSPGTTTPSSLGPESTTFHSSPGYTKTTRLPDNTTTSGLLEASTPVHSSTGSPHTTLSPSSSTTHEGEPTTFQSWPSSKDTSPAPSGTTSAFVKLSTTYHSSPSSTPTTHFSASSTTLGHSEESTPVHSSPVATATTPPPARSATSGHVEESTAYHRSPGSTQTMHFPESSTTSGHSEESATFHGSTTHTKSSTPSTTAALAHTSYHSSLGSTETTHFRDSSTISGRSEESKASHSSPDAMATTVLPAGSTPSVLVGDSTPSPISSGSMETTALPGSTTKPGLSEKSTTFYSSPRSPDTTHLPASMTSSGVSEESTTSHSRPGSTHTTAFPGSTTMPGLSQESTASHSSPGPTDTTLSPGSTTASSLGPEYTTFHSRPGSTETTLLPDNTTASGLLEASMPVHSSTRSPHTTLSPAGSTTRQGESTTFHSWPSSKDTRPAPPTTTSAFVEPSTTSHGSPSSIPTTHISARSTTSGLVEESTTYHSSPGSTQTMHFPESDTTSGRGEESTTSHSSTTHTISSAPSTTSALVEEPTSYHSSPGSTATTHFPDSSTTSGRSEESTASHSSQDATGTIVLPARSTTSVLLGESTTSPISSGSMETTALPGSTTTPGLSERSTTFHSSPRSPATTLSPASTTSSGVSEESTTSRSRPGSTHTTAFPDSTTTPGLSRHSTTSHSSPGSTDTTLLPASTTTSGPSQESTTSHSSSGSTDTALSPGSTTALSFGQESTTFHSNPGSTHTTLFPDSTTSSGIVEASTRVHSSTGSPRTTLSPASSTSPGLQGESTAFQTHPASTHTTPSPPSTATAPVEESTTYHRSPGSTPTTHFPASSTTSGHSEKSTIFHSSPDASGTTPSSAHSTTSGRGESTTSRISPGSTEITTLPGSTTTPGLSEASTTFYSSPRSPTTTLSPASMTSLGVGEESTTSRSQPGSTHSTVSPASTTTPGLSEESTTVYSSSRGSTETTVFPHSTTTSVHGEEPTTFHSRPASTHTTLFTEDSTTSGLTEESTAFPGSPASTQTGLPATLTTADLGEESTTFPSSSGSTGTKLSPARSTTSGLVGESTPSRLSPSSTETTTLPGSPTTPSLSEKSTTFYTSPRSPDATLSPATTTSSGVSEESSTSHSQPGSTHTTAFPDSTTTSDLSQEPTTSHSSQGSTEATLSPGSTTASSLGQQSTTFHSSPGDTETTLLPDDTITSGLVEASTPTHSSTGSLHTTLTPASSTSAGLQEESTTFQSWPSSSDTTPSPPGTTAAPVEVSTTYHSRPSSTPTTHFSASSTTLGRSEESTTVHSSPGATGTALFPTRSATSVLVGEPTTSPISSGSTETTALPGSTTTAGLSEKSTTFYSSPRSPDTTLSPASTTSSGVSEESTTSHSRPGSTHTTAFPGSTTMPGVSQESTASHSSPGSTDTTLSPGSTTASSLGPESTTFHSSPGSTETTLLPDNTTASGLLEASTPVHSSTGSPHTTLSPAGSTTRQGESTTFQSWPSSKDTMPAPPTTTSAFVELSTTSHGSPSSTPTTHFSASSTTLGRSEESTTVHSSPVATATTPSPARSTTSGLVEESTAYHSSPGSTQTMHFPESSTASGRSEESRTSHSSTTHTISSPPSTTSALVEEPTSYHSSPGSTATTHFPDSSTTSGRSEESTASHSSQDATGTIVLPARSTTSVLLGESTTSPISSGSMETTALPGSTTTPGLSEKSTTFHSSPRSPATTLSPASTTSSGVSEESTTSHSRPGSTHTTAFPDSTTTPGLSRHSTTSHSSPGSTDTTLLPASTTTSGPSQESTTSHSSPGSTDTALSPGSTTALSFGQESTTFHSSPGSTHTTLFPDSTTSSGIVEASTRVHSSTGSPRTTLSPASSTSPGLQGESTAFQTHPASTHTTPSPPSTATAPVEESTTYHRSPGSTPTTHFPASSTTSGHSEKSTIFHSSPDASGTTPSSAHSTTSGRGESTTSRISPGSTEITTLPGSTTTPGLSEASTTFYSSPRSPTTTLSPASMTSLGVGEESTTSRSQPGSTHSTVSPASTTTPGLSEESTTVYSSSPGSTETTVFPRTPTTSVRGEEPTTFHSRPASTHTTLFTEDSTTSGLTEESTAFPGSPASTQTGLPATLTTADLGEESTTFPSSSGSTGTTLSPARSTTSGLVGESTPSRLSPSSTETTTLPGSPTTPSLSEKSTTFYTSPRSPDATLSPATTTSSGVSEESSTSHSQPGSTHTTAFPDSTTTPGLSRHSTTSHSSPGSTDTTLLPASTTTSGPSQESTTSHSSPGSTDTALSPGSTTALSFGQESTTFHSSPGSTHTTLFPDSTTSSGIVEASTRVHSSTGSPRTTLSPASSTSPGLQGESTTFQTHPASTHTTPSPPSTATAPVEESTTYHRSPGSTPTTHFPASSTTSGHSEKSTIFHSSPDASGTTPSSAHSTTSGRGESTTSRISPGSTEITTLPGSTTTPGLSEASTTFYSSPRSPTTTLSPASMTSLGVGEESTTSRSQPGSTHSTVSPASTTTPGLSEESTTVYSSSPGSTETTVFPRSTTTSVRGEEPTTFHSRPASTHTTLFTEDSTTSGLTEESTAFPGSPASTQTGLPATLTTADLGEESTTFPSSSGSTGTTLSPARSTTSGLVGESTPSRLSPSSTETTTLPGSPTTPSLSEKSTTFYTSPRSPDATLSPATTTSSGVSEESSTSHSQPGSTHTTAFPDSTTTSGLSQEPTASHSSQGSTEATLSPGSTTASSLGQQSTTFHSSPGDTETTLLPDDTITSGLVEASTPTHSSTGSLHTTLTPASSTSAGLQEESTTFQSWPSSSDTTPSPPGTTAAPVEVSTTYHSRPSSTPTTHFSASSTTLGRSEESTTVHSSPGATGTALFPTRSATSVLVGEPTTSPISSGSTETTALPGSTTTAGLSEKSTTFYSSPRSPDTTLSPASTTSSGVSEESTTSHSRPGSTHTTAFPGSTTMPGVSQESTASHSSPGSTDTTLSPGSTTASSLGPESTTFHSGPGSTETTLLPDNTTASGLLEASTPVHSSTGSPHTTLSPAGSTTRQGESTTFQSWPNSKDTTPAPPTTTSAFVELSTTSHGSPSSTPTTHFSASSTTLGRSEESTTVHSSPVATATTPSPARSTTSGLVEESTTYHSSPGSTQTMHFPESDTTSGRGEESTTSHSSTTHTISSAPSTTSALVEEPTSYHSSPGSTATTHFPDSSTTSGRSEESTASHSSQDATGTIVLPARSTTSVLLGESTTSPISSGSMETTALPGSTTTPGLSEKSTTFHSSPRSPATTLSPASTTSSGVSEESTTSHSRPGSTHTTAFPDSTTTPGLSRHSTTSHSSPGSTDTTLLPASTTTSGSSQESTTSHSSSGSTDTALSPGSTTALSFGQESTTFHSSPGSTHTTLFPDSTTSSGIVEASTRVHSSTGSPRTTLSPASSTSPGLQGESTAFQTHPASTHTTPSPPSTATAPVEESTTYHRSPGSTPTTHFPASSTTSGHSEKSTIFHSSPDASGTTPSSAHSTTSGRGESTTSRISPGSTEITTLPGSTTTPGLSEASTTFYSSPRSPTTTLSPASMTSLGVGEESTTSRSQPGSTHSTVSPASTTTPGLSEESTTVYSSSPGSTETTVFPRSTTTSVRREEPTTFHSRPASTHTTLFTEDSTTSGLTEESTAFPGSPASTQTGLPATLTTADLGEESTTFPSSSGSTGTKLSPARSTTSGLVGESTPSRLSPSSTETTTLPGSPTTPSLSEKSTTFYTSPRSPDATLSPATTTSSGVSEESSTSHSQPGSTHTTAFPDSTTTSGLSQEPTTSHSSQGSTEATLSPGSTTASSLGQQSTTFHSSPGDTETTLLPDDTITSGLVEASTPTHSSTGSLHTTLTPASSTSTGLQEESTTFQSWPSSSDTTPSPPSTTAVPVEVSTTYHSRPSSTPTTHFSASSTTLGRSEESTTVHSSPGATGTALFPTRSATSVLVGEPTTSPISSGSTETTALPGSTTTAGLSEKSTTFYSSPRSPDTTLSPASTTSSGVSEESTTSHSRPGSMHTTAFPSSTTMPGVSQESTASHSSPGSTDTTLSPGSTTASSLGPESTTFHSSPGSTETTLLPDNTTASGLLEASTPVHSSTGSPHTTLSPAGSTTRQGESTTFQSWPNSKDTTPAPPTTTSAFVELSTTSHGSPSSTPTTHFSASSTTLGRSEESTTVHSSPVATATTPSPARSTTSGLVEESTTYHSSPGSTQTMHFPESNTTSGRGEESTTSHSSTTHTISSAPSTTSALVEEPTSYHSSPGSTATTHFPDSSTTSGRSEESTASHSSQDATGTIVLPARSTTSVLLGESTTSPISSGSMETTALPGSTTTPGLSEKSTTFHSSPSSTPTTHFSASSTTLGRSEESTTVHSSPVATATTPSPARSTTSGLVEESTAYHSSPGSTQTMHFPESSTASGRSEESRTSHSSTTHTISSPPSTTSALVEEPTSYHSSPGSIATTHFPESSTTSGRSEESTASHSSPDTNGITPLPAHFTTSGRIAESTTFYISPGSMETTLASTATTPGLSAKSTILYSSSRSPDQTLSPASMTSSSISGEPTSLYSQAESTHTTAFPASTTTSGLSQESTTFHSKPGSTETTLSPGSITTSSFAQEFTTPHSQPGSALSTVSPASTTVPGLSEESTTFYSSPGSTETTAFSHSNTMSIHSQQSTPFPDSPGFTHTVLPATLTTTDIGQESTAFHSSSDATGTTPLPARSTASDLVGEPTTFYISPSPTYTTLFPASSSTSGLTEESTTFHTSPSFTSTIVSTESLETLAPGLCQEGQIWNGKQCVCPQGYVGYQCLSPLESFPVETPEKLNATLGMTVKVTYRNFTEKMNDASSQEYQNFSTLFKNRMDVVLKGDNLPQYRGVNIRRLLNGSIVVKNDVILEADYTLEYEELFENLAEIVKAKIMNETRTTLLDPDSCRKAILCYSEEDTFVDSSVTPGFDFQEQCTQKAAEGYTQFYYVDVLDGKLACVNKCTKGTKSQMNCNLGTCQLQRSGPRCLCPNTNTHWYWGETCEFNIAKSLVYGIVGAVMAVLLLALIILIILFSLSQRKRHREQYDVPQEWRKEGTPGIFQKTAIWEDQNLRESRFGLENAYNNFRPTLETVDSGTELHIQRPEMVASTV

SEQ ID NO: 2016 - protein, 5335 aa, Homo sapiens
MLVIWILTLALRLCASVTTVTPGSTVNTSIGGNTTSASTPSSSDPFTTFSDYGVSVTFITGSTATKHFLDSSTNSGHSEESTVSHSGPGATGTTLFPSHSATSVFVGEPKTSPITSASMETTALPGSTTTAGLSEKSTTFYSSPRSPDRTLSPARTTSSGVSEKSTTSHSRPGPTHTIAFPDSTTMPGVSQESTASHSIPGSTDTTLSPGTTTPSSLGPESTTFHSSPGYTKTTRLPDNTTTSGLLEASTPVHSSTGSPHTTLSPSSSTTHEGEPTTFQSWPSSKDTSPAPSGTTSAFVKLSTTYHSSPSSTPTTHFSASSTTLGHSEESTPVHSSPVATATTPPPARSATSGHVEESTAYHRSPGSTQTMHFPESSTTSGHSEESATFHGSTTHTKSSTPSTTAALAHTSYHSSLGSTETTHFRDSSTISGRSEESKASHSSPDAMATTVLPAGSTPSVLVGDSTPSPISSGSMETTALPGSTTKPGLSEKSTTFYSSPRSPDTTHLPASMTSSGVSEESTTSHSRPGSTHTTAFPGSTTMPGLSQESTASHSSPGPTDTTLSPGSTTASSLGPEYTTFHSRPGSTETTLLPDNTTASGLLEASMPVHSSTRSPHTTLSPAGSTTRQGESTTFHSWPSSKDTRPAPPTTTSAFVEPSTTSHGSPSSIPTTHISARSTTSGLVEESTTYHSSPGSTQTMHFPESDTTSGRGEESTTSHSSTTHTISSAPSTTSALVEEPTSYHSSPGSTATTHFPDSSTTSGRSEESTASHSSQDATGTIVLPARSTTSVLLGESTTSPISSGSMETTALPGSTTTPGLSERSTTFHSSPRSPATTLSPASTTSSGVSEESTTSRSRPGSTHTTAFPDSTTTPGLSRHSTTSHSSPGSTDTTLLPASTTTSGPSQESTTSHSSSGSTDTALSPGSTTALSFGQESTTFHSNPGSTHTTLFPDSTTSSGIVEASTRVHSSTGSPRTTLSPASSTSPGLQGESTAFQTHPASTHTTPSPPSTATAPVEESTTYHRSPGSTPTTHFPASSTTSGHSEKSTIFHSSPDASGTTPSSAHSTTSGRGESTTSRISPGSTEITTLPGSTTTPGLSEASTTFYSSPRSPTTTLSPASMTSLGVGEESTTSRSQPGSTHSTVSPASTTTPGLSEESTTVYSSSRGSTETTVFPHSTTTSVHGEEPTTFHSRPASTHTTLFTEDSTTSGLTEESTAFPGSPASTQTGLPATLTTADLGEESTTFPSSSGSTGTKLSPARSTTSGLVGESTPSRLSPSSTETTTLPGSPTTPSLSEKSTTFYTSPRSPDATLSPATTTSSGVSEESSTSHSQPGSTHTTAFPDSTTTSDLSQEPTTSHSSQGSTEATLSPGSTTASSLGQQSTTFHSSPGDTETTLLPDDTITSGLVEASTPTHSSTGSLHTTLTPASSTSAGLQEESTTFQSWPSSSDTTPSPPGTTAAPVEVSTTYHSRPSSTPTTHFSASSTTLGRSEESTTVHSSPGATGTALFPTRSATSVLVGEPTTSPISSGSTETTALPGSTTTAGLSEKSTTFYSSPRSPDTTLSPASTTSSGVSEESTTSHSRPGSTHTTAFPGSTTMPGVSQESTASHSSPGSTDTTLSPGSTTASSLGPESTTFHSSPGSTETTLLPDNTTASGLLEASTPVHSSTGSPHTTLSPAGSTTRQGESTTFQSWPSSKDTMPAPPTTTSAFVELSTTSHGSPSSTPTTHFSASSTTLGRSEESTTVHSSPVATATTPSPARSTTSGLVEESTAYHSSPGSTQTMHFPESSTASGRSEESRTSHSSTTHTISSPPSTTSALVEEPTSYHSSPGSTATTHFPDSSTTSGRSEESTASHSSQDATGTIVLPARSTTSVLLGESTTSPISSGSMETTALPGSTTTPGLSEKSTTFHSSPRSPATTLSPASTTSSGVSEESTTSHSRPGSTHTTAFPDSTTTPGLSRHSTTSHSSPGSTDTTLLPASTTTSGPSQESTTSHSSPGSTDTALSPGSTTALSFGQESTTFHSSPGSTHTTLFPDSTTSSGIVEASTRVHSSTGSPRTTLSPASSTSPGLQGESTAFQTHPASTHTTPSPPSTATAPVEESTTYHRSPGSTPTTHFPASSTTSGHSEKSTIFHSSPDASGTTPSSAHSTTSGRGESTTSRISPGSTEITTLPGSTTTPGLSEASTTFYSSPRSPTTTLSPASMTSLGVGEESTTSRSQPGSTHSTVSPASTTTPGLSEESTTVYSSSPGSTETTVFPRTPTTSVRGEEPTTFHSRPASTHTTLFTEDSTTSGLTEESTAFPGSPASTQTGLPATLTTADLGEESTTFPSSSGSTGTTLSPARSTTSGLVGESTPSRLSPSSTETTTLPGSPTTPSLSEKSTTFYTSPRSPDATLSPATTTSSGVSEESSTSHSQPGSTHTTAFPDSTTTPGLSRHSTTSHSSPGSTDTTLLPASTTTSGPSQESTTSHSSPGSTDTALSPGSTTALSFGQESTTFHSSPGSTHTTLFPDSTTSSGIVEASTRVHSSTGSPRTTLSPASSTSPGLQGESTTFQTHPASTHTTPSPPSTATAPVEESTTYHRSPGSTPTTHFPASSTTSGHSEKSTIFHSSPDASGTTPSSAHSTTSGRGESTTSRISPGSTEITTLPGSTTTPGLSEASTTFYSSPRSPTTTLSPASMTSLGVGEESTTSRSQPGSTHSTVSPASTTTPGLSEESTTVYSSSPGSTETTVFPRSTTTSVRGEEPTTFHSRPASTHTTLFTEDSTTSGLTEESTAFPGSPASTQTGLPATLTTADLGEESTTFPSSSGSTGTTLSPARSTTSGLVGESTPSRLSPSSTETTTLPGSPTTPSLSEKSTTFYTSPRSPDATLSPATTTSSGVSEESSTSHSQPGSTHTTAFPDSTTTSGLSQEPTASHSSQGSTEATLSPGSTTASSLGQQSTTFHSSPGDTETTLLPDDTITSGLVEASTPTHSSTGSLHTTLTPASSTSAGLQEESTTFQSWPSSSDTTPSPPGTTAAPVEVSTTYHSRPSSTPTTHFSASSTTLGRSEESTTVHSSPGATGTALFPTRSATSVLVGEPTTSPISSGSTETTALPGSTTTAGLSEKSTTFYSSPRSPDTTLSPASTTSSGVSEESTTSHSRPGSTHTTAFPGSTTMPGVSQESTASHSSPGSTDTTLSPGSTTASSLGPESTTFHSGPGSTETTLLPDNTTASGLLEASTPVHSSTGSPHTTLSPAGSTTRQGESTTFQSWPNSKDTTPAPPTTTSAFVELSTTSHGSPSSTPTTHFSASSTTLGRSEESTTVHSSPVATATTPSPARSTTSGLVEESTTYHSSPGSTQTMHFPESDTTSGRGEESTTSHSSTTHTISSAPSTTSALVEEPTSYHSSPGSTATTHFPDSSTTSGRSEESTASHSSQDATGTIVLPARSTTSVLLGESTTSPISSGSMETTALPGSTTTPGLSEKSTTFHSSPRSPATTLSPASTTSSGVSEESTTSHSRPGSTHTTAFPDSTTTPGLSRHSTTSHSSPGSTDTTLLPASTTTSGSSQESTTSHSSSGSTDTALSPGSTTALSFGQESTTFHSSPGSTHTTLFPDSTTSSGIVEASTRVHSSTGSPRTTLSPASSTSPGLQGESTAFQTHPASTHTTPSPPSTATAPVEESTTYHRSPGSTPTTHFPASSTTSGHSEKSTIFHSSPDASGTTPSSAHSTTSGRGESTTSRISPGSTEITTLPGSTTTPGLSEASTTFYSSPRSPTTTLSPASMTSLGVGEESTTSRSQPGSTHSTVSPASTTTPGLSEESTTVYSSSPGSTETTVFPRSTTTSVRREEPTTFHSRPASTHTTLFTEDSTTSGLTEESTAFPGSPASTQTGLPATLTTADLGEESTTFPSSSGSTGTKLSPARSTTSGLVGESTPSRLSPSSTETTTLPGSPTTPSLSEKSTTFYTSPRSPDATLSPATTTSSGVSEESSTSHSQPGSTHTTAFPDSTTTSGLSQEPTTSHSSQGSTEATLSPGSTTASSLGQQSTTFHSSPGDTETTLLPDDTITSGLVEASTPTHSSTGSLHTTLTPASSTSTGLQEESTTFQSWPSSSDTTPSPPSTTAVPVEVSTTYHSRPSSTPTTHFSASSTTLGRSEESTTVHSSPGATGTALFPTRSATSVLVGEPTTSPISSGSTETTALPGSTTTAGLSEKSTTFYSSPRSPDTTLSPASTTSSGVSEESTTSHSRPGSMHTTAFPSSTTMPGVSQESTASHSSPGSTDTTLSPGSTTASSLGPESTTFHSSPGSTETTLLPDNTTASGLLEASTPVHSSTGSPHTTLSPAGSTTRQGESTTFQSWPNSKDTTPAPPTTTSAFVELSTTSHGSPSSTPTTHFSASSTTLGRSEESTTVHSSPVATATTPSPARSTTSGLVEESTTYHSSPGSTQTMHFPESNTTSGRGEESTTSHSSTTHTISSAPSTTSALVEEPTSYHSSPGSTATTHFPDSSTTSGRSEESTASHSSQDATGTIVLPARSTTSVLLGESTTSPISSGSMETTALPGSTTTPGLSEKSTTFHSSPSSTPTTHFSASSTTLGRSEESTTVHSSPVATATTPSPARSTTSGLVEESTAYHSSPGSTQTMHFPESSTASGRSEESRTSHSSTTHTISSPPSTTSALVEEPTSYHSSPGSIATTHFPESSTTSGRSEESTASHSSPDTNGITPLPAHFTTSGRIAESTTFYISPGSMETTLASTATTPGLSAKSTILYSSSRSPDQTLSPASMTSSSISGEPTSLYSQAESTHTTAFPASTTTSGLSQESTTFHSKPGSTETTLSPGSITTSSFAQEFTTPHSQPGSALSTVSPASTTVPGLSEESTTFYSSPGSTETTAFSHSNTMSIHSQQSTPFPDSPGFTHTVLPATLTTTDIGQESTAFHSSSDATGTTPLPARSTASDLVGEPTTFYISPSPTYTTLFPASSSTSGLTEESTTFHTSPSFTSTIVSTESLETLAPGLCQEGQIWNGKQCVCPQGYVGYQCLSPLESFPVETPEKLNATLGMTVKVTYRNFTEKMNDASSQEYQNFSTLFKNRMDVVLKGDNLPQYRGVNIRRLLNGSIVVKNDVILEADYTLEYEELFENLAEIVKAKIMNETRTTLLDPDSCRKAILCYSEEDTFVDSSVTPGFDFQEQCTQKAAEGYTQFYYVDVLDGKLACVNKCTKGTKSQMNCNLGTCQLQRSGPRCLCPNTNTHWYWGETCEFNIAKSLVYGIVGAVMAVLLLALIILIILFSLSQRKRHREQYDVPQEWRKEGTPGIFQKTAIWEDQNLRESRFGLENAYNNFRPTLETVDSGTELHIQRPEMVASTV

SEQ ID NO: 2017 - protein, 653 aa, Homo sapiens
MPASRLRDRAASSASGSTCGSMSQTHPVLESGLLASAGCSAPRGPRKGGPAPVDRKAKASAMPDSPAEVKTQPRSTPPSMPPPPPAASQGATRPPSFTPHTHREDGPATLPHGRFHGCLKWSMVCLLMNGSSHSPTAINGAPCTPNGFSNGPATSSTASLSTQHLPPACGARQLSKLKRFLTTLQQFGSDISPEIGERVRTLVLGLVNSTLTIEEFHSKLQEATNFPLRPFVIPFLKANLPLLQRELLHCARLAKQTPAQYLAQHEQLLLDASASSPIDSSELLLEVNENGKRRTPDRTKENGSDRDPLHPEHLSKRPCTLNPAQRYSPSNGPPQPTPPPHYRLEDIAMAHHFRDAYRHPDPRELRERHRPLVVPGSRQEEVIDHKLTEREWAEEWKHLNNLLNCIMDMVEKTRRSLTVLRRCQEADREELNHWARRYSDAEDTKKGPAPAAARPRSSSAGPEGPQLDVPREFLPRTLTGYVPEDIWRKAEEAVNEVKRQAMSELQKAVSDAERKAHELITTERAKMERALAEAKRQASEDALTVINQQEDSSESCWNCGRKASETCSGCNAARYCGSFCQHRDWEKHHHVCGQSLQGPTAVVADPVPGPPEAAHSLGPSLPVGAASPSEAGSAGPSRPGSPSPPGPLDTVPR

SEQ ID NO: 2018 - protein, 567 aa, Homo sapiens
MPDSPAEVKTQPRSTPPSMPPPPPAASQGATRPPSFTPHTLMNGSSHSPTAINGAPCTPNGFSNGPATSSTASLSTQHLPPACGARQLSKLKRFLTTLQQFGSDISPEIGERVRTLVLGLVNSTLTIEEFHSKLQEATNFPLRPFVIPFLKANLPLLQRELLHCARLAKQTPAQYLAQHEQLLLDASASSPIDSSELLLEVNENGKRRTPDRTKENGSDRDPLHPEHLSKRPCTLNPAQRYSPSNGPPQPTPPPHYRLEDIAMAHHFRDAYRHPDPRELRERHRPLVVPGSRQEEVIDHKLTEREWAEEWKHLNNLLNCIMDMVEKTRRSLTVLRRCQEADREELNHWARRYSDAEDTKKGPAPAAARPRSSSAGPEGPQLDVPREFLPRTLTGYVPEDIWRKAEEAVNEVKRQAMSELQKAVSDAERKAHELITTERAKMERALAEAKRQASEDALTVINQQEDSSESCWNCGRKASETCSGCNAARYCGSFCQHRDWEKHHHVCGQSLQGPTAVVADPVPGPPEAAHSLGPSLPVGAASPSEAGSAGPSRPGSPSPPGPLDTVPR

SEQ ID NO: 2019 - protein, 577 aa, Homo sapiens
MPASRLRDRAASSASGSTCGSMSQTHPVLESGLLASAGCSAPRGPRKGGPVMNGSSHSPTAINGAPCTPNGFSNGPATSSTASLSTQHLPPACGARQLSKLKRFLTTLQQFGSDISPEIGERVRTLVLGLVNSTLTIEEFHSKLQEATNFPLRPFVIPFLKANLPLLQRELLHCARLAKQTPAQYLAQHEQLLLDASASSPIDSSELLLEVNENGKRRTPDRTKENGSDRDPLHPEHLSKRPCTLNPAQRYSPSNGPPQPTPPPHYRLEDIAMAHHFRDAYRHPDPRELRERHRPLVVPGSRQEEVIDHKLTEREWAEEWKHLNNLLNCIMDMVEKTRRSLTVLRRCQEADREELNHWARRYSDAEDTKKGPAPAAARPRSSSAGPEGPQLDVPREFLPRTLTGYVPEDIWRKAEEAVNEVKRQAMSELQKAVSDAERKAHELITTERAKMERALAEAKRQASEDALTVINQQEDSSESCWNCGRKASETCSGCNAARYCGSFCQHRDWEKHHHVCGQSLQGPTAVVADPVPGPPEAAHSLGPSLPVGAASPSEAGSAGPSRPGSPSPPGPLDTVPR

SEQ ID NO: 2020 - protein, 78 aa, Homo sapiens
MPASRLRDRAASSASGSTCGSMSQTHPVLESGLLASAGCSAPRGPRKGGPGKPALAAAGAPALCTPGQADARPVLGPA

SEQ ID NO: 2021 - protein, 648 aa, Homo sapiens
MSRKASENVEYTLRSLSSLMGERRRKQPEPDAASAAGECSLLAAAESSTSLQSAGAGGGGVGDLERAARRQFQQDETPAFVYVVAVFSALGGFLFGYDTGVVSGAMLLLKRQLSLDALWQELLVSSTVGAAAVSALAGGALNGVFGRRAAILLASALFTAGSAVLAAANNKETLLAGRLVVGLGIGIASMTVPVYIAEVSPPNLRGRLVTINTLFITGGQFFASVVDGAFSYLQKDGWRYMLGLAAVPAVIQFFGFLFLPESPRWLIQKGQTQKARRILSQMRGNQTIDEEYDSIKNNIEEEEKEVGSAGPVICRMLSYPPTRRALIVGCGLQMFQQLSGINTIMYYSATILQMSGVEDDRLAIWLASVTAFTNFIFTLVGVWLVEKVGRRKLTFGSLAGTTVALIILALGFVLSAQVSPRITFKPIAPSGQNATCTRYSYCNECMLDPDCGFCYKMNKSTVIDSSCVPVNKASTNEAAWGRCENETKFKTEDIFWAYNFCPTPYSWTALLGLILYLVFFAPGMGPMPWTVNSEIYPLWARSTGNACSSGINWIFNVLVSLTFLHTAEYLTYYGAFFLYAGFAAVGLLFIYGCLPETKGKKLEEIESLFDNRLCTCGTSDSDEGRYIEYIRVKGSNYHLSDNDASDVE

SEQ ID NO: 2022 - protein, 2054 aa, Homo sapiens
MFNLMKKDKDKDGGRKEKKEKKEKKERMSAAELRSLEEMSLRRGFFNLNRSSKRESKTRLEISNPIPIKVASGSDLHLTDIDSDSNRGSVILDSGHLSTASSSDDLKGEEGSFRGSVLQRAAKFGSLAKQNSQMIVKRFSFSQRSRDESASETSTPSEHSAAPSPQVEVRTLEGQLVQHPGPGIPRPGHRSRAPELVTKKFPVDLRLPPVVPLPPPTLRELELQRRPTGDFGFSLRRTTMLDRGPEGQACRRVVHFAEPGAGTKDLALGLVPGDRLVEINGHNVESKSRDEIVEMIRQSGDSVRLKVQPIPELSELSRSWLRSGEGPRREPSDAKTEEQIAAEEAWNETEKVWLVHRDGFSLASQLKSEELNLPEGKVRVKLDHDGAILDVDEDDVEKANAPSCDRLEDLASLVYLNESSVLHTLRQRYGASLLHTYAGPSLLVLGPRGAPAVYSEKVMHMFKGCRREDMAPHIYAVAQTAYRAMLMSRQDQSIILLGSSGSGKTTSCQHLVQYLATIAGISGNKVFSVEKWQALYTLLEAFGNSPTIINGNATRFSQILSLDFDQAGQVASASIQTMLLEKLRVARRPASEATFNVFYYLLACGDGTLRTELHLNHLAENNVFGIVPLAKPEEKQKAAQQFSKLQAAMKVLGISPDEQKACWFILAAIYHLGAAGATKEAAEAGRKQFARHEWAQKAAYLLGCSLEELSSAIFKHQHKGGTLQRSTSFRQGPEESGLGDGTGPKLSALECLEGMAAGLYSELFTLLVSLVNRALKSSQHSLCSMMIVDTPGFQNPEQGGSARGASFEELCHNYTQDRLQRLFHERTFVQELERYKEENIELAFDDLEPPTDDSVAAVDQASHQSLVRSLARTDEARGLLWLLEEEALVPGASEDTLLERLFSYYGPQEGDKKGQSPLLHSSKPHHFLLGHSHGTNWVEYNVTGWLNYTKQNPATQNAPRLLQDSQKKIISNLFLGRAGSATVLSGSIAGLEGGSQLALRRATSMRKTFTTGMAAVKKKSLCIQMKLQVDALIDTIKKSKLHFVHCFLPVAEGWAGEPRSASSRRVSSSSELDLPSGDHCEAGLLQLDVPLLRTQLRGSRLLDAMRMYRQGYPDHMVFSEFRRRFDVLAPHLTKKHGRNYIVVDERRAVEELLECLDLEKSSCCMGLSRVFFRAGTLARLEEQRDEQTSRNLTLFQAACRGYLARQHFKKRKIQDLAIRCVQKNIKKNKGVKDWPWWKLFTTVRPLIEVQLSEEQIRNKDEEIQQLRSKLEKAEKERNELRLNSDRLESRISELTSELTDERNTGESASQLLDAETAERLRAEKEMKELQTQYDALKKQMEVMEMEVMEARLIRAAEINGEVDDDDAGGEWRLKYERAVREVDFTKKRLQQEFEDKLEVEQQNKRQLERRLGDLQADSEESQRALQQLKKKCQRLTAELQDTKLHLEGQQVRNHELEKKQRRFDSELSQAHEEAQREKLQREKLQREKDMLLAEAFSLKQQLEEKDMDIAGFTQKVVSLEAELQDISSQESKDEASLAKVKKQLRDLEAKVKDQEEELDEQAGTIQMLEQAKLRLEMEMERMRQTHSKEMESRDEEVEEARQSCQKKLKQMEVQLEEEYEDKQKVLREKRELEGKLATLSDQVNRRDFESEKRLRKDLKRTKALLADAQLMLDHLKNSAPSKREIAQLKNQLEESEFTCAAAVKARKAMEVEIEDLHLQIDDIAKAKTALEEQLSRLQREKNEIQNRLEEDQEDMNELMKKHKAAVAQASRDLAQINDLQAQLEEANKEKQELQEKLQALQSQVEFLEQSMVDKSLVSRQEAKIRELETRLEFERTQVKRLESLASRLKENMEKLTEERDQRIAAENREKEQNKRLQRQLRDTKEEMGELARKEAEASRKKHELEMDLESLEAANQSLQADLKLAFKRIGDLQAAIEDEMESDENEDLINSLQDMVTKYQKRKNKLEGDSDVDSELEDRVDGVKSWLSKNKGPSKAASDDGSLKSSSPTSYWKSLAPDRSDDEHDPLDNTSRPRYSHSYLSDSDTEAKLTETNA

SEQ ID NO: 2023 - protein, 1723 aa, Homo sapiens
MRAKTEEQIAAEEAWNETEKVWLVHRDGFSLASQLKSEELNLPEGKVRVKLDHDGAILDVDEDDVEKANAPSCDRLEDLASLVYLNESSVLHTLRQRYGASLLHTYAGPSLLVLGPRGAPAVYSEKVMHMFKGCRREDMAPHIYAVAQTAYRAMLMSRQDQSIILLGSSGSGKTTSCQHLVQYLATIAGISGNKVFSVEKWQALYTLLEAFGNSPTIINGNATRFSQILSLDFDQAGQVASASIQTMLLEKLRVARRPASEATFNVFYYLLACGDGTLRTELHLNHLAENNVFGIVPLAKPEEKQKAAQQFSKLQAAMKVLGISPDEQKACWFILAAIYHLGAAGATKEAAEAGRKQFARHEWAQKAAYLLGCSLEELSSAIFKHQHKGGTLQRSTSFRQGPEESGLGDGTGPKLSALECLEGMAAGLYSELFTLLVSLVNRALKSSQHSLCSMMIVDTPGFQNPEQGGSARGASFEELCHNYTQDRLQRLFHERTFVQELERYKEENIELAFDDLEPPTDDSVAAVDQASHQSLVRSLARTDEARGLLWLLEEEALVPGASEDTLLERLFSYYGPQEGDKKGQSPLLHSSKPHHFLLGHSHGTNWVEYNVTGWLNYTKQNPATQNAPRLLQDSQKKIISNLFLGRAGSATVLSGSIAGLEGGSQLALRRATSMRKTFTTGMAAVKKKSLCIQMKLQVDALIDTIKKSKLHFVHCFLPVAEGWAGEPRSASSRRVSSSSELDLPSGDHCEAGLLQLDVPLLRTQLRGSRLLDAMRMYRQGYPDHMVFSEFRRRFDVLAPHLTKKHGRNYIVVDERRAVEELLECLDLEKSSCCMGLSRVFFRAGTLARLEEQRDEQTSRNLTLFQAACRGYLARQHFKKRKIQDLAIRCVQKNIKKNKGVKDWPWWKLFTTVRPLIEVQLSEEQIRNKDEEIQQLRSKLEKAEKERNELRLNSDRLESRISELTSELTDERNTGESASQLLDAETAERLRAEKEMKELQTQYDALKKQMEVMEMEVMEARLIRAAEINGEVDDDDAGGEWRLKYERAVREVDFTKKRLQQEFEDKLEVEQQNKRQLERRLGDLQADSEESQRALQQLKKKCQRLTAELQDTKLHLEGQQVRNHELEKKQRRFDSELSQAHEEAQREKLQREKLQREKDMLLAEAFSLKQQLEEKDMDIAGFTQKVVSLEAELQDISSQESKDEASLAKVKKQLRDLEAKVKDQEEELDEQAGTIQMLEQAKLRLEMEMERMRQTHSKEMESRDEEVEEARQSCQKKLKQMEVQLEEEYEDKQKVLREKRELEGKLATLSDQVNRRDFESEKRLRKDLKRTKALLADAQLMLDHLKNSAPSKREIAQLKNQLEESEFTCAAAVKARKAMEVEIEDLHLQIDDIAKAKTALEEQLSRLQREKNEIQNRLEEDQEDMNELMKKHKAAVAQASRDLAQINDLQAQLEEANKEKQELQEKLQALQSQVEFLEQSMVDKSLVSRQEAKIRELETRLEFERTQVKRLESLASRLKENMEKLTEERDQRIAAENREKEQNKRLQRQLRDTKEEMGELARKEAEASRKKHELEMDLESLEAANQSLQADLKLAFKRIGDLQAAIEDEMESDENEDLINSLQDMVTKYQKRKNKLEGDSDVDSELEDRVDGVKSWLSKNKGPSKAASDDGSLKSSSPTSYWKSLAPDRSDDEHDPLDNTSRPRYSHSYLSDSDTEAKLTETNA

SEQ ID NO: 2024 - protein, 2002 aa, Homo sapiens
MFNLMKKDKDKDGGRKEKKEKKEKKERMSAAELRSLEEMSLRRGFFNLNRSSKRESKTRLEISNPIPIKVASGSDLHLTDIDSDSNRGSVILDSGHLSTASSSDDLKGEEGSFRGSVLQRAAKFGSLAKQNSQMIVKRFSFSQRSRDESASETSTPSEHSAAPSPQVEVRTLEGQLVQHPGPGIPRPGHRSRAPELVTKKFPVDLRLPPVVPLPPPTLRELELQRRPTGDFGFSLRRTTMLDRGPEGQACRRVVHFAEPGAGTKDLALGLVPGDRLVEINGHNVESKSRDEIVEMIRQSGDSVRLKVQPIPELSELSRSWLRSGEGPRREPSDAKTEEQIAAEEAWNETEKVWLVHRDGFSLASQLKSEELNLPEGKVRVKLDHDGAILDVDEDDVEKANAPSCDRLEDLASLVYLNESSVLHTLRQRYGASLLHTYAGPSLLVLGPRGAPAVYSEKVMHMFKGCRREDMAPHIYAVAQTAYRAMLMSRQDQSIILLGSSGSGKTTSCQHLVQYLATIAGISGNKVFSVEKWQALYTLLEAFGNSPTIINGNATRFSQILSLDFDQAGQVASASIQTMLLEKLRVARRPASEATFNVFYYLLACGDGTLRTELHLNHLAENNVFGIVPLAKPEEKQKAAQQFSKLQAAMKVLGISPDEQKACWFILAAIYHLGAAGATKEAAEAGRKQFARHEWAQKAAYLLGCSLEELSSAIFKHQHKGGTLQRSTSFRQGPEESGLGDGTGPKLSALECLEGMAAGLYSELFTLLVSLVNRALKSSQHSLCSMMIVDTPGFQNPEQGGSARGASFEELCHNYTQDRLQRLFHERTFVQELERYKEENIELAFDDLEPPTDDSVAAVDQASHQSLVRSLARTDEARGLLWLLEEEALVPGASEDTLLERLFSYYGPQEGDKKGQSPLLHSSKPHHFLLGHSHGTNWVEYNVTGWLNYTKQNPATQNAPRLLQDSQKKIISNLFLGRAGSATVLSGSIAGLEGGSQLALRRATSMRKTFTTGMAAVKKKSLCIQMKLQVDALIDTIKKSKLHFVHCFLPVAEGWAGEPRSASSRRVSSSSELDLPSGDHCEAGLLQLDVPLLRTQLRGSRLLDAMRMYRQGYPDHMVFSEFRRRFDVLAPHLTKKHGRNYIVVDERRAVEELLECLDLEKSSCCMGLSRVFFRAGTLARLEEQRDEQTSRNLTLFQAACRGYLARQHFKKRKIQDLAIRCVQKNIKKNKGVKDWPWWKLFTTVRPLIEVQLSEEQIRNKDEEIQQLRSKLEKAEKERNELRLNSDRLESRISELTSELTDERNTGESASQLLDAETAERLRAEKEMKELQTQYDALKKQMEVMEMEVMEARLIRAAEINGEVDDDDAGGEWRLKYERAVREVDFTKKRLQQEFEDKLEVEQQNKRQLERRLGDLQADSEESQRALQQLKKKCQRLTAELQDTKLHLEGQQVRNHELEKKQRRFDSELSQAHEEAQREKLQREKLQREKDMLLAEAFSLKQQLEEKDMDIAGFTQKVVSLEAELQDISSQESKDEASLAKVKKQLRDLEAKVKDQEEELDEQAGTIQMLEQLKQMEVQLEEEYEDKQKVLREKRELEGKLATLSDQVNRRDFESEKRLRKDLKRTKALLADAQLMLDHLKNSAPSKREIAQLKNQLEESEFTCAAAVKARKAMEVEIEDLHLQIDDIAKAKTALEEQLSRLQREKNEIQNRLEEDQEDMNELMKKHKAAVAQASRDLAQINDLQAQLEEANKEKQELQEKLQALQSQVEFLEQSMVDKSLVSRQEAKIRELETRLEFERTQVKRLESLASRLKENMEKLTEERDQRIAAENREKEQNKRLQRQLRDTKEEMGELARKEAEASRKKHELEMDLESLEAANQSLQADLKLAFKRIGDLQAAIEDEMESDENEDLINSEGDSDVDSELEDRVDGVKSWLSKNKGPSKAASDDGSLKSSSPTSYWKSLAPDRSDDEHDPLDNTSRPRYSHSYLSDSDTEAKLTETNA

SEQ ID NO: 2025 - protein, 2039 aa, Homo sapiens
MFNLMKKDKDKDGGRKEKKEKKEKKERMSAAELRSLEEMSLRRGFFNLNRSSKRESKTRLEISNPIPIKVASGSDLHLTDIDSDSNRGSVILDSGHLSTASSSDDLKGEEGSFRGSVLQRAAKFGSLAKQNSQMIVKRFSFSQRSRDESASETSTPSEHSAAPSPQVEVRTLEGQLVQHPGPGIPRPGHRSRAPELVTKKFPVDLRLPPVVPLPPPTLRELELQRRPTGDFGFSLRRTTMLDRGPEGQACRRVVHFAEPGAGTKDLALGLVPGDRLVEINGHNVESKSRDEIVEMIRQSGDSVRLKVQPIPELSELSRSWLRSGEGPRREPSDAKTEEQIAAEEAWNETEKVWLVHRDGFSLASQLKSEELNLPEGKVRVKLDHDGAILDVDEDDVEKANAPSCDRLEDLASLVYLNESSVLHTLRQRYGASLLHTYAGPSLLVLGPRGAPAVYSEKVMHMFKGCRREDMAPHIYAVAQTAYRAMLMSRQDQSIILLGSSGSGKTTSCQHLVQYLATIAGISGNKVFSVEKWQALYTLLEAFGNSPTIINGNATRFSQILSLDFDQAGQVASASIQTMLLEKLRVARRPASEATFNVFYYLLACGDGTLRTELHLNHLAENNVFGIVPLAKPEEKQKAAQQFSKLQAAMKVLGISPDEQKACWFILAAIYHLGAAGATKEAAEAGRKQFARHEWAQKAAYLLGCSLEELSSAIFKHQHKGGTLQRSTSFRQGPEESGLGDGTGPKLSALECLEGMAAGLYSELFTLLVSLVNRALKSSQHSLCSMMIVDTPGFQNPEQGGSARGASFEELCHNYTQDRLQRLFHERTFVQELERYKEENIELAFDDLEPPTDDSVAAVDQASHQSLVRSLARTDEARGLLWLLEEEALVPGASEDTLLERLFSYYGPQEGDKKGQSPLLHSSKPHHFLLGHSHGTNWVEYNVTGWLNYTKQNPATQNAPRLLQDSQKKIISNLFLGRAGSATVLSGSIAGLEGGSQLALRRATSMRKTFTTGMAAVKKKSLCIQMKLQVDALIDTIKKSKLHFVHCFLPVAEGWAGEPRSASSRRVSSSSELDLPSGDHCEAGLLQLDVPLLRTQLRGSRLLDAMRMYRQGYPDHMVFSEFRRRFDVLAPHLTKKHGRNYIVVDERRAVEELLECLDLEKSSCCMGLSRVFFRAGTLARLEEQRDEQTSRNLTLFQAACRGYLARQHFKKRKIQDLAIRCVQKNIKKNKGVKDWPWWKLFTTVRPLIEVQLSEEQIRNKDEEIQQLRSKLEKAEKERNELRLNSDRLESRISELTSELTDERNTGESASQLLDAETAERLRAEKEMKELQTQYDALKKQMEVMEMEVMEARLIRAAEINGEVDDDDAGGEWRLKYERAVREVDFTKKRLQQEFEDKLEVEQQNKRQLERRLGDLQADSEESQRALQQLKKKCQRLTAELQDTKLHLEGQQVRNHELEKKQRRFDSELSQAHEEAQREKLQREKLQREKDMLLAEAFSLKQQLEEKDMDIAGFTQKVVSLEAELQDISSQESKDEASLAKVKKQLRDLEAKVKDQEEELDEQAGTIQMLEQAKLRLEMEMERMRQTHSKEMESRDEEVEEARQSCQKKLKQMEVQLEEEYEDKQKVLREKRELEGKLATLSDQVNRRDFESEKRLRKDLKRTKALLADAQLMLDHLKNSAPSKREIAQLKNQLEESEFTCAAAVKARKAMEVEIEDLHLQIDDIAKAKTALEEQLSRLQREKNEIQNRLEEDQEDMNELMKKHKAAVAQASRDLAQINDLQAQLEEANKEKQELQEKLQALQSQVEFLEQSMVDKSLVSRQEAKIRELETRLEFERTQVKRLESLASRLKENMEKLTEERDQRIAAENREKEQNKRLQRQLRDTKEEMGELARKEAEASRKKHELEMDLESLEAANQSLQADLKLAFKRIGDLQAAIEDEMESDENEDLINSEGDSDVDSELEDRVDGVKSWLSKNKGPSKAASDDGSLKSSSPTSYWKSLAPDRSDDEHDPLDNTSRPRYSHSYLSDSDTEAKLTETNA

SEQ ID NO: 2026 - protein, 1581 aa, Homo sapiens
MHMFKGCRREDMAPHIYAVAQTAYRAMLMSRQDQSIILLGSSGSGKTTSCQHLVQYLATIAGISGNKVFSVEKWQALYTLLEAFGNSPTIINGNATRFSQILSLDFDQAGQVASASIQTMLLEKLRVARRPASEATFNVFYYLLACGDGTLRTELHLNHLAENNVFGIVPLAKPEEKQKAAQQFSKLQAAMKVLGISPDEQKACWFILAAIYHLGAAGATKEAAEAGRKQFARHEWAQKAAYLLGCSLEELSSAIFKHQHKGGTLQRSTSFRQGPEESGLGDGTGPKLSALECLEGMAAGLYSELFTLLVSLVNRALKSSQHSLCSMMIVDTPGFQNPEQGGSARGASFEELCHNYTQDRLQRLFHERTFVQELERYKEENIELAFDDLEPPTDDSVAAVDQASHQSLVRSLARTDEARGLLWLLEEEALVPGASEDTLLERLFSYYGPQEGDKKGQSPLLHSSKPHHFLLGHSHGTNWVEYNVTGWLNYTKQNPATQNAPRLLQDSQKKIISNLFLGRAGSATVLSGSIAGLEGGSQLALRRATSMRKTFTTGMAAVKKKSLCIQMKLQVDALIDTIKKSKLHFVHCFLPVAEGWAGEPRSASSRRVSSSSELDLPSGDHCEAGLLQLDVPLLRTQLRGSRLLDAMRMYRQGYPDHMVFSEFRRRFDVLAPHLTKKHGRNYIVVDERRAVEELLECLDLEKSSCCMGLSRVFFRAGTLARLEEQRDEQTSRNLTLFQAACRGYLARQHFKKRKIQDLAIRCVQKNIKKNKGVKDWPWWKLFTTVRPLIEVQLSEEQIRNKDEEIQQLRSKLEKAEKERNELRLNSDRLESRISELTSELTDERNTGESASQLLDAETAERLRAEKEMKELQTQYDALKKQMEVMEMEVMEARLIRAAEINGEVDDDDAGGEWRLKYERAVREVDFTKKRLQQEFEDKLEVEQQNKRQLERRLGDLQADSEESQRALQQLKKKCQRLTAELQDTKLHLEGQQVRNHELEKKQRRFDSELSQAHEEAQREKLQREKLQREKDMLLAEAFSLKQQLEEKDMDIAGFTQKVVSLEAELQDISSQESKDEASLAKVKKQLRDLEAKVKDQEEELDEQAGTIQMLEQAKLRLEMEMERMRQTHSKEMESRDEEVEEARQSCQKKLKQMEVQLEEEYEDKQKVLREKRELEGKLATLSDQVNRRDFESEKRLRKDLKRTKALLADAQLMLDHLKNSAPSKREIAQLKNQLEESEFTCAAAVKARKAMEVEIEDLHLQIDDIAKAKTALEEQLSRLQREKNEIQNRLEEDQEDMNELMKKHKAAVAQASRDLAQINDLQAQLEEANKEKQELQEKLQALQSQVEFLEQSMVDKSLVSRQEAKIRELETRLEFERTQVKRLESLASRLKENMEKLTEERDQRIAAENREKEQNKRLQRQLRDTKEEMGELARKEAEASRKKHELEMDLESLEAANQSLQADLKLAFKRIGDLQAAIEDEMESDENEDLINSEGDSDVDSELEDRVDGVKSWLSKNKGPSKAASDDGSLKSSSPTSYWKSLAPDRSDDEHDPLDNTSRPRYSHSYLSDSDTEAKLTETNA

SEQ ID NO: 2027 - protein, 167 aa, Homo sapiens
MASPRTVTIVALSVALGLFFVFMGTIKLTPRLSKDAYSEMKRAYKSYVRALPLLKKMGINSILLRKSIGALEVACGIVMTLVPGRPKDVANFFLLLLVLAVLFFHQLVGDPLKRYAHALVFGILLTCRLLIARKPEDRSSEKKPLPGNAEEQPSLYEKAPQGKVKVS

SEQ ID NO: 2028 - protein, 173 aa, Homo sapiens
MASRKTKKKEGGALRAQRASSNVFSNFEQTQIQEFKEAFTLMDQNRDGFIDKEDLKDTYASLGKTNVKDDELDAMLKEASGPINFTMFLNLFGEKLSGTDAEETILNAFKMLDPDGKGKINKEYIKRLLMSQADKMTAEEVDQMFQFASIDVAGNLDYKALSYVITHGEEKEE

SEQ ID NO: 2029 - protein, 132 aa, Homo sapiens
MDQNRDGFIDKEDLKDTYASLGKTNVKDDELDAMLKEASGPINFTMFLNLFGEKLSGTDAEETILNAFKMLDPDGKGKINKEYIKRLLMSQADKMTAEEVDQMFQFASIDVAGNLDYKALSYVITHGEEKEE

SEQ ID NO: 2030 - protein, 323 aa, Homo sapiens
MDSDASLVSSRPSSPEPDDLFLPARSKGSSGSAFTGGTVSSSTPSDCPPELSAELRGAMGSAGAHPGDKLGGSGFKSSSSSTSSSTSSAAASSTKKDKKQMTEPELQQLRLKINSRERKRMHDLNIAMDGLREVMPYAHGPSVRKLSKIATLLLARNYILMLTNSLEEMKRLVSEIYGGHHAGFHPSACGGLAHSAPLPAATAHPAAAAHAAHHPAVHHPILPPAAAAAAAAAAAAAVSSASLPGSGLPSVGSIRPPHGLLKSPSAAAAAPLGGGGGGSGASGGFQHWGGMPCPCSMCQVPPPHHHVSAMGAGSLPRLTSDAK

SEQ ID NO: 2031 - protein, 264 aa, Homo sapiens
MRLRPLPLVVVPGLLQLLFCDSKEVVHATEGLDWEDKDAPGTLVGNVVHSRIISPLRLFVKQSPVPKPGPMAYADSMENFWDWLANITEIQEPLARTKRRPIVKTGKFKKMFGWGDFHSNIKTVKLNLLITGKIVDHGNGTFSVYFRHNSTGLGNVSVSLVPPSKVVEFEVSPQSTLETKESKSFNCRIEYEKTDRAKKTALCNFDPSKICYQEQTQSHVSWLCSKPFKVICIYIAFYSVDYKLVQKVCPDYNYHSETPYLSSG

SEQ ID NO: 2032 - protein, 1132 aa, Homo sapiens
MASDGASALPGPDMSMKPSAAPSPSPALPFLPPTSDPPDHPPREPPPQPIMPSVFSPDNPLMLSAFPSSLLVTGDGGPCLSGAGAGKVIVKVKTEGGSAEPSQTQNFILTQTALNSTAPGTPCGGLEGPAPPFVTASNVKTILPSKAVGVSQEGPPGLPPQPPPPVAQLVPIVPLEKAWPGPHGTTGEGGPVATLSKPSLGDRSKISKDVYENFRQWQRYKALARRHLSQSPDTEALSCFLIPVLRSLARLKPTMTLEEGLPLAVQEWEHTSNFDRMIFYEMAERFMEFEAEEMQIQNTQLMNGSQGLSPATPLKLDPLGPLASEVCQQPVYIPKKAASKTRAPRRRQRKAQRPPAPEAPKEIPPEAVKEYVDIMEWLVGTHLATGESDGKQEEEGQQQEEEGMYPDPGLLSYINELCSQKVFVSKVEAVIHPQFLADLLSPEKQRDPLALIEELEQEEGLTLAQLVQKRLMALEEEEDAEAPPSFSGAQLDSSPSGSVEDEDGDGRLRPSPGLQGAGGAACLGKVSSSGKRAREVHGGQEQALDSPRGMHRDGNTLPSPSSWDLQPELAAPQGTPGPLGVERRGSGKVINQVSLHQDGHLGGAGPPGHCLVADRTSEALPLCWQGGFQPESTPSLDAGLAELAPLQGQGLEKQVLGLQKGQQTGGRGVLPQGKEPLAVPWEGSSGAMWGDDRGTPMAQSYDQNPSPRAAGERDDVCLSPGVWLSSEMDAVGLELPVQIEEVIESFQVEKCVTEYQEGCQGLGSRGNISLGPGETLVPGDTESSVIPCGGTVAAAALEKRNYCSLPGPLRANSPPLRSKENQEQSCETVGHPSDLWAEGCFPLLESGDSTLGSSKETLPPTCQGNLLIMGTEDASSLPEASQEAGSRGNSFSPLLETIEPVNILDVKDDCGLQLRVSEDTCPLNVHSYDPQGEGRVDPDLSKPKNLAPLQESQESYTTGTPKATSSHQGLGSTLPRRGTRNAIVPRETSVSKTHRSADRAKGKEKKKKEAEEEDEELSNFAYLLASKLSLSPREHPLSPHHASGGQGSQRASHLLPAGAKGPSKLPYPVAKSGKRALAGGPAPTEKTPHSGAQLGVPREKPLALGVVRPSQPRKRRCDSFVTGRRKKRRRSQ

SEQ ID NO: 2033 - protein, 442 aa, Homo sapiens
MASDGASALPGPDMSMKPSAAPSPSPALPFLPPTSDPPDHPPREPPPQPIMPSVFSPDNPLMLSAFPSSLLVTGDGGPCLSGAGAGKVIVKVKTEGGSAEPSQTQNFILTQTALNSTAPGTPCGGLEGPAPPFVTASNVKTILPSKAVGVSQEGPPGLPPQPPPPVAQLVPIVPLEKAWPGPHGTTGEGGPVATLSKPSLGDRSKISKDVYENFRQWQRYKALARRHLSQSPDTEAVKEYVDIMEWLVGTHLATGESDGKQEEEGQQQEEEGMYPDPGLLSYINELCSQKVFVSKVEAVIHPQFLADLLSPEKQRDPLALIEELEQEEGLTLAQLVQKRLMALEEEEDAEAPPSFSGAQLDSSPSGSVEDEDGDGRLRPSPGLQGAGGAACLGKVSSSGKRAREVHGGQEQALDSPRGMHRDGNTLPSPSSWDPPTNGESQC

SEQ ID NO: 2034 - protein, 1150 aa, Homo sapiens
MFQRSNQDLKLGPYRKFSALSYGASALPGPDMSMKPSAAPSPSPALPFLPPTSDPPDHPPREPPPQPIMPSVFSPDNPLMLSAFPSSLLVTGDGGPCLSGAGAGKVIVKVKTEGGSAEPSQTQNFILTQTALNSTAPGTPCGGLEGPAPPFVTASNVKTILPSKAVGVSQEGPPGLPPQPPPPVAQLVPIVPLEKAWPGPHGTTGEGGPVATLSKPSLGDRSKISKDVYENFRQWQRYKALARRHLSQSPDTEALSCFLIPVLRSLARLKPTMTLEEGLPLAVQEWEHTSNFDRMIFYEMAERFMEFEAEEMQIQNTQLMNGSQGLSPATPLKLDPLGPLASEVCQQPVYIPKKAASKTRAPRRRQRKAQRPPAPEAPKEIPPEAVKEYVDIMEWLVGTHLATGESDGKQEEEGQQQEEEGMYPDPGLLSYINELCSQKVFVSKVEAVIHPQFLADLLSPEKQRDPLALIEELEQEEGLTLAQLVQKRLMALEEEEDAEAPPSFSGAQLDSSPSGSVEDEDGDGRLRPSPGLQGAGGAACLGKVSSSGKRAREVHGGQEQALDSPRGMHRDGNTLPSPSSWDLQPELAAPQGTPGPLGVERRGSGKVINQVSLHQDGHLGGAGPPGHCLVADRTSEALPLCWQGGFQPESTPSLDAGLAELAPLQGQGLEKQVLGLQKGQQTGGRGVLPQGKEPLAVPWEGSSGAMWGDDRGTPMAQSYDQNPSPRAAGERDDVCLSPGVWLSSEMDAVGLELPVQIEEVIESFQVEKCVTEYQEGCQGLGSRGNISLGPGETLVPGDTESSVIPCGGTVAAAALEKRNYCSLPGPLRANSPPLRSKENQEQSCETVGHPSDLWAEGCFPLLESGDSTLGSSKETLPPTCQGNLLIMGTEDASSLPEASQEAGSRGNSFSPLLETIEPVNILDVKDDCGLQLRVSEDTCPLNVHSYDPQGEGRVDPDLSKPKNLAPLQESQESYTTGTPKATSSHQGLGSTLPRRGTRNAIVPRETSVSKTHRSADRAKGKEKKKKEAEEEDEELSNFAYLLASKLSLSPREHPLSPHHASGGQGSQRASHLLPAGAKGPSKLPYPVAKSGKRALAGGPAPTEKTPHSGAQLGVPREKPLALGVVRPSQPRKRRCDSFVTGRRKKRRRSQ

SEQ ID NO: 2035 - protein, 1160 aa, Homo sapiens
MVVTLGPGPDCLILEASRQPQLVPKPERMASDGASALPGPDMSMKPSAAPSPSPALPFLPPTSDPPDHPPREPPPQPIMPSVFSPDNPLMLSAFPSSLLVTGDGGPCLSGAGAGKVIVKVKTEGGSAEPSQTQNFILTQTALNSTAPGTPCGGLEGPAPPFVTASNVKTILPSKAVGVSQEGPPGLPPQPPPPVAQLVPIVPLEKAWPGPHGTTGEGGPVATLSKPSLGDRSKISKDVYENFRQWQRYKALARRHLSQSPDTEALSCFLIPVLRSLARLKPTMTLEEGLPLAVQEWEHTSNFDRMIFYEMAERFMEFEAEEMQIQNTQLMNGSQGLSPATPLKLDPLGPLASEVCQQPVYIPKKAASKTRAPRRRQRKAQRPPAPEAPKEIPPEAVKEYVDIMEWLVGTHLATGESDGKQEEEGQQQEEEGMYPDPGLLSYINELCSQKVFVSKVEAVIHPQFLADLLSPEKQRDPLALIEELEQEEGLTLAQLVQKRLMALEEEEDAEAPPSFSGAQLDSSPSGSVEDEDGDGRLRPSPGLQGAGGAACLGKVSSSGKRAREVHGGQEQALDSPRGMHRDGNTLPSPSSWDLQPELAAPQGTPGPLGVERRGSGKVINQVSLHQDGHLGGAGPPGHCLVADRTSEALPLCWQGGFQPESTPSLDAGLAELAPLQGQGLEKQVLGLQKGQQTGGRGVLPQGKEPLAVPWEGSSGAMWGDDRGTPMAQSYDQNPSPRAAGERDDVCLSPGVWLSSEMDAVGLELPVQIEEVIESFQVEKCVTEYQEGCQGLGSRGNISLGPGETLVPGDTESSVIPCGGTVAAAALEKRNYCSLPGPLRANSPPLRSKENQEQSCETVGHPSDLWAEGCFPLLESGDSTLGSSKETLPPTCQGNLLIMGTEDASSLPEASQEAGSRGNSFSPLLETIEPVNILDVKDDCGLQLRVSEDTCPLNVHSYDPQGEGRVDPDLSKPKNLAPLQESQESYTTGTPKATSSHQGLGSTLPRRGTRNAIVPRETSVSKTHRSADRAKGKEKKKKEAEEEDEELSNFAYLLASKLSLSPREHPLSPHHASGGQGSQRASHLLPAGAKGPSKLPYPVAKSGKRALAGGPAPTEKTPHSGAQLGVPREKPLALGVVRPSQPRKRRCDSFVTGRRKKRRRSQ

SEQ ID NO: 2036 - protein, 619 aa, Homo sapiens
MADEGKSYSEHDDERVNFPQRKKKGRGPFRWKYGEGNRRSGRGGSGIRSSRLEEDDGDVAMSDAQDGPRVRYNPYTTRPNRRGDTWHDRDRIHVTVRRDRAPPERGGAGTSQDGTSKNWFKITIPYGRKYDKAWLLSMIQSKCSVPFTPIEFHYENTRAQFFVEDASTASALKAVNYKILDRENRRISIIINSSAPPHTILNELKPEQVEQLKLIMSKRYDGSQQALDLKGLRSDPDLVAQNIDVVLNRRSCMAATLRIIEENIPELLSLNLSNNRLYRLDDMSSIVQKAPNLKILNLSGNELKSERELDKIKGLKLEELWLDGNSLCDTFRDQSTYISAIRERFPKLLRLDGHELPPPIAFDVEAPTTLPPCKGSYFGTENLKSLVLHFLQQYYAIYDSGDRQGLLDAYHDGACCSLSIPFIPQNPARSSLAEYFKDSRNVKKLKDPTLRFRLLKHTRLNVVAFLNELPKTQHDVNSFVVDISAQTSTLLCFSVNGVFKEVDGKSRDSLRAFTRTFIAVPASNSGLCIVNDELFVRNASSEEIQRAFAMPAPTPSSSPVPTLSPEQQEMLQAFSTQSGMNLEWSQKCLQDNNWDYTRSAQAFTHLKAKGEIPEVAFMK

SEQ ID NO: 2037 - protein, 356 aa, Homo sapiens
MADEGKSYSEHDDERVNFPQRKKKGRGPFRWKYGEGNRRSGRGGSGIRSSRLEEDDGDVAMSDAQDGPRVRYNPYTTRPNRRGDTWHDRDRIHVTVRRDRAPPERGGAGTSQDGTSKNWFKITIPYGRKYDKAWLLSMIQSKCSVPFTPIEFHYENTRAQFFVEDASTASALKAVNYKILDRENRRISIIINSSAPPHTILNELKPEQVEQLKLIMSKRYDGSQQALDLKGLRSDPDLVAQNIDVVLNRRSCMAATLRIIEENIPELLSLNLSNNRLYRLDDMSSIVQKAPNLKILNLSGNELKSERELDKIKGLKLEELWLDGNSLCDTFRDQSTYIRSVVACVSPPGDLHPLGG

SEQ ID NO: 2038 - protein, 807 aa, Homo sapiens
MAATELRGVVGPGPAAIAALGGGGAGPPVVGGGGGRGDAGPGSGAASGTVVAAAAGGPGPGAGGVAAAGPAPAPPTGGSGGSGAGGSGSAREGWLFKWTNYIKGYQRRWFVLSNGLLSYYRSKAEMRHTCRGTINLATANITVEDSCNFIISNGGAQTYHLKASSEVERQRWVTALELAKAKAVKMLAESDESGDEESVSQTDKTELQNTLRTLSSKVEDLSTCNDLIAKHGTALQRSLSELESLKLPAESNEKIKQVNERATLFRITSNAMINACRDFLMLAQTHSKKWQKSLQYERDQRIRLEETLEQLAKQHNHLERAFRGATVLPANTPGNVGSGKDQCCSGKGDMSDEDDENEFFDAPEIITMPENLGHKRTGSNISGASSDISLDEQYKHQLEETKKEKRTRIPYKPNYSLNLWSIMKNCIGKELSKIPMPVNFNEPLSMLQRLTEDLEYHELLDRAAKCENSLEQLCYVAAFTVSSYSTTVFRTSKPFNPLLGETFELDRLEENGYRSLCEQVSHHPPAAAHHAESKNGWTLRQEIKITSKFRGKYLSIMPLGTIHCIFHATGHHYTWKKVTTTVHNIIVGKLWIDQSGEIDIVNHKTGDKCNLKFVPYSYFSRDVARKVTGEVTDPSGKVHFALLGTWDEKMECFKVQPVIGENGGDARQRGHEAEESRVMLWKRNPLPKNAENMYYFSELALTLNAWESGTAPTDSRLRPDQRLMENGRWDEANAEKQRLEEKQRLSRKKREAEAMKATEDGTPYDPYKALWFERKKDPVTKELTHIYRGEYWECKEKQDWSSCPDIF

SEQ ID NO: 2039 - protein, 313 aa, Homo sapiens
METANYTKVTEFVLTGLSQTPEVQLVLFVIFLSFYLFILPGNILIICTISLDPHLTSPMYFLLANLAFLDIWYSSITAPEMLIDFFVERKIISFDGCIAQLFFLHFAGASEMFLLTVMAFDLYTAICRPLHYATIMNQRLCCILVALSWRGGFIHSIIQVALIVRLPFCGPNELDSYFCDITQVVRIACANTFPEELVMICSSGLISVVCLIALLMSYAFLLALFKKLSGSGENTNRAMSTCYSHITIVVLMFGPSIYIYARPFDSFSLDKVVSVFNTLIFPLRNPIIYTLRNKEVKAAMRKLVTKYILCKEK

SEQ ID NO: 2040 - protein, 322 aa, Homo sapiens
MEPQNTSTVTNFQLLGFQNLLEWQALLFVIFLLIYCLTIIGNVVIITVVSQGLRLHSPMYMFLQHLSFLEVWYTSTTVPLLLANLLSWGQAISFSACMAQLYFFVFLGATECFLLAFMAYDRYLAICSPLRYPFLMHRGLCARLVVVSWCTGVSTGFLPSLMISRLDFCGRNQINHFFCDLPPLMQLSCSRVYITEVTIFILSIAVLCICFFLTLGPYVFIVSSILRIPSTSGRRKTFSTCGSHLAVVTLYYGTMISMYVCPSPHLLPEINKIISVFYTVVTPLLNPVIYSLRNKDFKEAVRKVMRRKCGILWSTSKRKFLY

SEQ ID NO: 2041 - protein, 350 aa, Homo sapiens
MCQQILRDCILLIHHLCINRKKVSLVMLGPAYNHTMETPASFLLVGIPGLQSSHLWLAISLSAMYIIALLGNTIIVTAIWMDSTRHEPMYCFLCVLAAVDIVMASSVVPKMVSIFCSGDSSISFSACFTQMFFVHLATAVETGLLLTMAFDRYVAICKPLHYKRILTPQVMLGMSMAITIRAIIAITPLSWMVSHLPFCGSNVVVHSYCEHIALARLACADPVPSSLYSLIGSSLMVGSDVAFIAASYILILKAVFGLSSKTAQLKALSTCGSHVGVMALYYLPGMASIYAAWLGQDVVPLHTQVLLADLYVIIPATLNPIIYGMRTKQLRERIWSYLMHVLFDHSNLGS

SEQ ID NO: 2042 - protein, 953 aa, Homo sapiens
MITSAAGIISLLDEDEPQLKEFALHKLNAVVNDFWAEISESVDKIEVLYEDEGFRSRQFAALVASKVFYHLGAFEESLNYALGAGDLFNVNDNSEYVETIIAKCIDHYTKQCVENADLPEGEKKPIDQRLEGIVNKMFQRCLDDHKYKQAIGIALETRRLDVFEKTILESNDVPGMLAYSLKLCMSLMQNKQFRNKVLRVLVKIYMNLEKPDFINVCQCLIFLDDPQAVSDILEKLVKEDNLLMAYQICFDLYESASQQFLSSVIQNLRTVGTPIASVPGSTNTGTVPGSEKDSDSMETEEKTSSAFVGKTPEASPEPKDQTLKMIKILSGEMAIELHLQFLIRNNNTDLMILKNTKDAVRNSVCHTATVIANSFMHCGTTSDQFLRDNLEWLARATNWAKFTATASLGVIHKGHEKEALQLMATYLPKDTSPGSAYQEGGGLYALGLIHANHGGDIIDYLLNQLKNASNDIVRHGGSLGLGLAAMGTARQDVYDLLKTNLYQDDAVTGEAAGLALGLVMLGSKNAQAIEDMVGYAQETQHEKILRGLAVGIALVMYGRMEEADALIESLCRDKDPILRRSGMYTVAMAYCGSGNNKAIRRLLHVAVSDVNDDVRRAAVESLGFILFRTPEQCPSVVSLLSESYNPHVRYGAAMALGICCAGTGNKEAINLLEPMTNDPVNYVRQGALIASALIMIQQTEITCPKVNQFRQLYSKVINDKHDDVMAKFGAILAQGILDAGGHNVTISLQSRTGHTHMPSVVGVLVFTQFWFWFPLSHFLSLAYTPTCVIGLNKDLKMPKVQYKSNCKPSTFAYPAPLEVPKEKEKEKVSTAVLSITAKAKKKEKEKEKKEEEKMEVDEAEKKEEKEKKKEPEPNFQLLDNPARVMPAQLKVLTMPETCRYQPFKPLSIGGIIILKDTSEDIEELVEPVAAHGPKIEEEEQEPEPPEPFEYIDD

SEQ ID NO: 2043 - protein, 922 aa, Homo sapiens
MITSAAGIISLLDEDEPQLKEFALHKLNAVVNDFWAEISESVDKIEVLYEDEGFRSRQFAALVASKVFYHLGAFEESLNYALGAGDLFNVNDNSEYVETIIAKCIDHYTKQCVENADLPEGEKKPIDQRLEGIVNKMFQRCLDDHKYKQAIGIALETRRLDVFEKTILESNDVPGMLAYSLKLCMSLMQNKQFRNKVLRVLVKIYMNLEKPDFINVCQCLIFLDDPQAVSDILEKLVKEDNLLMAYQICFDLYESASQQFLSSVIQNLRTVGTPIASVPGSTNTGTVPGSEKDSDSMETEEKTSSAFVGKTPEASPEPKDQTLKMIKILSGEMAIELHLQFLIRNNNTDLMILKNTKDAVRNSVCHTATVIANSFMHCGTTSDQFLRDNLEWLARATNWAKFTATASLGVIHKGHEKEALQLMATYLPKDTSPGSAYQEGGGLYALGLIHANHGGDIIDYLLNQLKNASNDIVRHGGSLGLGLAAMGTARQDVYDLLKTNLYQDDAVTGEAAGLALGLVMLGSKNAQAIEDMVGYAQETQHEKILRGLAVGIALVMYGRMEEADALIESLCRDKDPILRRSGMYTVAMAYCGSGNNKAIRRLLHVAVSDVNDDVRRAAVESLGFILFRTPEQCPSVVSLLSESYNPHVRYGAAMALGICCAGTGNKEAINLLEPMTNDPVNYVRQGALIASALIMIQQTEITCPKVNQFRQLYSKVINDKHDDVMAKFGAILAQGILDAGGHNVTISLQSRTGHTHMPSVVGVLVFTQFWFWFPLSHFLSLAYTPTCVIGLNKDLKVSTAVLSITAKAKKKEKEKEKKEEEKMEVDEAEKKEEKEKKKEPEPNFQLLDNPARVMPAQLKVLTMPETCRYQPFKPLSIGGIIILKDTSEDIEELVEPVAAHGPKIEEEEQEPEPPEPFEYIDD

SEQ ID NO: 2044 - protein, 1479 aa, Homo sapiens
MAKRSRGPGRRCLLALVLFCAWGTLAVVAQKPGAGCPSRCLCFRTTVRCMHLLLEAVPAVAPQTSILDLRFNRIREIQPGAFRRLRNLNTLLLNNNQIKRIPSGAFEDLENLKYLYLYKNEIQSIDRQAFKGLASLEQLYLHFNQIETLDPDSFQHLPKLERLFLHNNRITHLVPGTFNHLESMKRLRLDSNTLHCDCEILWLADLLKTYAESGNAQAAAICEYPRRIQGRSVATITPEELNCERPRITSEPQDADVTSGNTVYFTCRAEGNPKPEIIWLRNNNELSMKTDSRLNLLDDGTLMIQNTQETDQGIYQCMAKNVAGEVKTQEVTLRYFGSPARPTFVIQPQNTEVLVGESVTLECSATGHPPPRISWTRGDRTPLPVDPRVNITPSGGLYIQNVVQGDSGEYACSATNNIDSVHATAFIIVQALPQFTVTPQDRVVIEGQTVDFQCEAKGNPPPVIAWTKGGSQLSVDRRHLVLSSGTLRISGVALHDQGQYECQAVNIIGSQKVVAHLTVQPRVTPVFASIPSDTTVEVGANVQLPCSSQGEPEPAITWNKDGVQVTESGKFHISPEGFLTINDVGPADAGRYECVARNTIGSASVSMVLSVNVPDVSRNGDPFVATSIVEAIATVDRAINSTRTHLFDSRPRSPNDLLALFRYPRDPYTVEQARAGEIFERTLQLIQEHVQHGLMVDLNGTSYHYNDLVSPQYLNLIANLSGCTAHRRVNNCSDMCFHQKYRTHDGTCNNLQHPMWGASLTAFERLLKSVYENGFNTPRGINPHRLYNGHALPMPRLVSTTLIGTETVTPDEQFTHMLMQWGQFLDHDLDSTVVALSQARFSDGQHCSNVCSNDPPCFSVMIPPNDSRARSGARCMFFVRSSPVCGSGMTSLLMNSVYPREQINQLTSYIDASNVYGSTEHEARSIRDLASHRGLLRQGIVQRSGKPLLPFATGPPTECMRDENESPIPCFLAGDHRANEQLGLTSMHTLWFREHNRIATELLKLNPHWDGDTIYYETRKIVGAEIQHITYQHWLPKILGEVGMRTLGEYHGYDPGINAGIFNAFATAAFRFGHTLVNPLLYRLDENFQPIAQDHLPLHKAFFSPFRIVNEGGIDPLLRGLFGVAGKMRVPSQLLNTELTERLFSMAHTVALDLAAINIQRGRDHGIPPYHDYRVYCNLSAAHTFEDLKNEIKNPEIREKLKRLYGSTLNIDLFPALVVEDLVPGSRLGPTLMCLLSTQFKRLRDGDRLWYENPGVFSPAQLTQIKQTSLARILCDNADNITRVQSDVFRVAEFPHGYGSCDEIPRVDLRVWQDCCEDCRTRGQFNAFSYHFRGRRSLEFSYQEDKPTKKTRPRKIPSVGRQGEHLSNSTSAFSTRSDASGTNDFREFVLEMQKTITDLRTQIKKLESRLSTTECVDAGGESHANNTKWKKDACTICECKDGQVTCFVEACPPATCAVPVNIPGACCPVCLQKRAEEKP

SEQ ID NO: 2045 - protein, 727 aa, Homo sapiens
MAKRSRGPGRRCLLALVLFCAWGTLAVVAQKPGAGCPSRCLCFRTTVRCMHLLLEAVPAVAPQTSILDLRFNRIREIQPGAFRRLRNLNTLLLNNNQIKRIPSGAFEDLENLKYLYLYKNEIQSIDRQAFKGLASLEQLYLHFNQIETLDPDSFQHLPKLERLFLHNNRITHLVPGTFNHLESMKRLRLDSNTLHCDCEILWLADLLKTYAESGNAQAAAICEYPRRIQGRSVATITPEELNCERPRITSEPQDADVTSGNTVYFTCRAEGNPKPEIIWLRNNNELSMKTDSRLNLLDDGTLMIQNTQETDQGIYQCMAKNVAGEVKTQEVTLRYFGSPARPTFVIQPQNTEVLVGESVTLECSATGHPPPRISWTRGDRTPLPVDPRVNITPSGGLYIQNVVQGDSGEYACSATNNIDSVHATAFIIVQALPQFTVTPQDRVVIEGQTVDFQCEAKGNPPPVIAWTKGGSQLSVDRRHLVLSSGTLRISGVALHDQGQYECQAVNIIGSQKVVAHLTVQPRVTPVFASIPSDTTVEVGANVQLPCSSQGEPEPAITWNKDGVQVTESGKFHISPEGFLTINDVGPADAGRYECVARNTIGSASVSMVLSVNVPDVSRNGDPFVATSIVEAIATVDRAINSTRTHLFDSRPRSPNDLLALFRYPRDPYTVEQARAGEIFERTLQLIQEHVQHGLMVDLNGTSQCQSLFFLLHGLSNGVEHASVKSHS

SEQ ID NO: 2046 - protein, 431 aa, Homo sapiens
MQALNITPEQFSRLLRDHNLTREQFIALYRLRPLVYTPELPGRAKLALVLTGVLIFALALFGNALVFYVVTRSKAMRTVTNIFICSLALSDLLITFFCIPVTMLQNISDNWLGGAFICKMVPFVQSTAVVTEILTMTCIAVERHQGLVHPFKMKWQYTNRRAFTMLGVVWLVAVIVGSPMWHVQQLEIKYDFLYEKEHICCLEEWTSPVHQKIYTTFILVILFLLPLMVMLILYSKIGYELWIKKRVGDGSVLRTIHGKEMSKIARKKKRAVIMMVTVVALFAVCWAPFHVVHMMIEYSNFEKEYDDVTIKMIFAIVQIIGFSNSICNPIVYAFMNENFKKNVLSAVCYCIVNKTFSPAQRHGNSGITMMRKKAKFSLRENPVEETKGEAFSDGNIEVKLCEQTEEKKKLKRHLALFRSELAENSPLDSGH

SEQ ID NO: 2047 - protein, 1663 aa, Homo sapiens
MKDAAEELSFARVLLQRVDELEKLFKDREQFLELVSRKLSLVPGAEEVTMVTWEELEQAITDGWRASQAGSETLMGFSKHGGFTSLTSPEGTLSGDSTKQPSIEQALDSASGLGPDRTASGSGGTAHPSDGVSSREQSKVPSGTGRQQQPRARDEAGVPRLHQSSTFQFKSDSDRHRSREKLTSTQPRRNARPGPVQQDLPLARDQPSSVPASQSQVHLRPDRRGLEPTGMNQPGLVPASTYPHGVVPLSMGQLGVPPPEMDDRELIPFVVDEQRMLPPSVPGRDQQGLELPSTDQHGLVSVSAYQHGMTFPGTDQRSMEPLGMDQRGCVISGMGQQGLVPPGIDQQGLTLPVVDQHGLVLPFTDQHGLVSPGLMPISADQQGFVQPSLEATGFIQPGTEQHDLIQSGRFQRALVQRGAYQPGLVQPGADQRGLVRPGMDQSGLAQPGADQRGLVWPGMDQSGLAQPGRDQHGLIQPGTGQHDLVQSGTGQGVLVQPGVDQPGMVQPGRFQRALVQPGAYQPGLVQPGADQIDVVQPGADQHGLVQSGADQSDLAQPGAVQHGLVQPGVDQRGLAQPRADHQRGLVPPGADQRGLVQPGADQHGLVQPGVDQHGLAQPGEVQRSLVQPGIVQRGLVQPGAVQRGLVQPGAVQRGLVQPGVDQRGLVQPGAVQRGLVQPGAVQHGLVQPGADQRGLVQPGVDQRGLVQPGVDQRGLVQPGMDQRGLIQPGADQPGLVQPGAGQLGMVQPGIGQQGMVQPQADPHGLVQPGAYPLGLVQPGAYLHDLSQSGTYPRGLVQPGMDQYGLRQPGAYQPGLIAPGTKLRGSSTFQADSTGFISVRPYQHGMVPPGREQYGQVSPLLASQGLASPGIDRRSLVPPETYQQGLMHPGTDQHSPIPLSTGLGSTHPDQQHVASPGPGEHDQVYPDAAQHGHAFSLFDSHDSMYPGYRGPGYLSADQHGQEGLDPNRTRASDRHGIPAQKAPGQDVTLFRSPDSVDRVLSEGSEVSSEVLSERRNSLRRMSSSFPTAVETFHLMGELSSLYVGLKESMKDLDEEQAGQTDLEKIQFLLAQMVKRTIPPELQEQLKTVKTLAKEVWQEKAKVERLQRILEGEGNQEAGKELKAGELRLQLGVLRVTVADIEKELAELRESQDRGKAAMENSVSEASLYLQDQLDKLRMIIESMLTSSSTLLSMSMAPHKAHTLAPGQIDPEATCPACSLDVSHQVSTLVRRYEQLQDMVNSLAVSRPSKKAKLQRQDEELLGRVQSAILQVQGDCEKLNITTSNLIEDHRQKQKDIAMLYQGLEKLEKEKANREHLEMEIDVKADKSALATKVSRVQFDATTEQLNHMMQELVAKMSGQEQDWQKMLDRLLTEMDNKLDRLELDPVKQLLEDRWKSLRQQLRERPPLYQADEAAAMRRQLLAHFHCLSCDRPLETPVTGHAIPVTPAGPGLPGHHSIRPYTVFELEQVRQHSRNLKLGSAFPRGDLAQMEQSVGRLRSMHSKMLMNIEKVQIHFGGSTKASSQIIRELLHAQCLGSPCYKRVTDMADYTYSTVPRRCGGSHTLTYPYHRSRPQHLPRGLYPTEEIQIAMKHDEVDILGLDGHIYKGRMDTRLPGILRKDSSGTSKRKSQQPRPHVHRPPSLSSNGQLPSRPQSAQISAGNTSER

SEQ ID NO: 2048 - protein, 1429 aa, Homo sapiens
MKDAAEELSFARVLLQRVDELEKLFKDREQFLELVSRKLSLVPGAEEVTMVTWEELEQAITDGWRASQAGSETLMGFSKHGGFTSLTSPEGTLSGDSTKQPSIEQALDSASGLGPDRTASGSGGTAHPSDGVSSREQSKVPSGTGRQQQPRARDEAGVPRLHQSSTFQFKSDSDRHRSREKLTSTQPRRNARPGPVQQDLPLARDQPSSVPASQSQVHLRPDRRGLEPTGMNQPGLVPASTYPHGVVPLSMGQLGVPPPEMDDRELIPFVVDEQRMLPPSVPGRDQQGLELPSTDQHGLVSVSAYQHGMTFPGTDQRSMEPLGMDQRGCVISGMGQQGLVPPGIDQQGLTLPVVDQHGLVLPFTDQHGLVSPGLMPISADQQGFVQPSLEATGFIQPGTEQHDLIQSGRFQRALVQRGAYQPGLVQPGADQRGLVRPGMDQSGLAQPGADQRGLVWPGMDQSGLAQPGRDQHGLIQPGTGQHDLVQSGTGQGVLVQPGVDQPGMVQPGRFQRALVQPGAYQPGLVQPGADQIDVVQPGADQHGLVQSGADQSDLAQPGAVQHGLVQPGVDQRGLAQPRADHQRGLVPPGADQRGLVQPGADQHGLVQPGVDQHGLAQPGEVQRSLVQPGIVQRGLVQPGAVQRGLVQPGAVQRGLVQPGVDQRGLVQPGAVQRGLVQPGAVQHGLVQPGADQRGLVQPGVDQRGLVQPGVDQRGLVQPGMDQRGLIQPGADQPGLVQPGAGQLGMVQPGIGQQGMVQPQADPHGLVQPGAYPLGLVQPGAYLHDLSQSGTYPRGLVQPGMDQYGLRQPGAYQPGLIAPGTKLRGSSTFQADSTGFISVRPYQHGMVPPGREQYGQVSPLLASQGLASPGIDRRSLVPPETYQQGLMHPGTDQHSPIPLSTGLGSTHPDQQHVASPGPGEHDQVYPDAAQHGHAFSLFDSHDSMYPGYRGPGYLSADQHGQEGLDPNRTRASDRHGIPAQKAPGQDVTLFRSPDSVDRVLSEGSEVSSEVLSERRNSLRRMSSSFPTAVETFHLMGELSSLYVGLKESMKDLDEEQAGQTDLEKIQFLLAQMVKRTIPPELQEQLKTVKTLAKEVWQEKAKVERLQRILEGEGNQEAGKELKAGELRLQLGVLRVTVADIEKELAELRESQDRGKAAMENSVSEASLYLQDQLDKLRMIIESMLTSSSTLLSMSMAPHKAHTLAPGQIDPEATCPACSLDVSHQVSTLVRRYEQLQDMVNSLAVSRPSKKAKLQRQDEELLGRVQSAILQVQGDCEKLNITTSNLIEDHRQKQKDIAMLYQGLEKLEKEKANREHLEMEIDVKADKSALATKVSRVQFDATTEQLNHMMQELVAKMSGQEQDWQKMLDRLLTEMDARLPGILRKDSSGTSKRKSQQPRPHVHRPPSLSSNGQLPSRPQSAQISAGNTSER

SEQ ID NO: 2049 - protein, 507 aa, Homo sapiens
MENSVSEASLYLQDQLDKLRMIIESMLTSSSTLLSMSMAPHKAHTLAPGQIDPEATCPACSLDVSHQVSTLVRRYEQLQDMVNSLAVSRPSKKAKLQRQDEELLGRVQSAILQVQGDCEKLNITTSNLIEDHRQKQKDIAMLYQGLEKLEKEKANREHLEMEIDVKADKSALATKVSRVQFDATTEQLNHMMQELVAKMSGQEQDWQKMLDRLLTEMDNKLDRLELDPVKQLLEDRWKSLRQQLRERPPLYQADEAAAMRRQLLAHFHCLSCDRPLETPVTGHAIPVTPAGPGLPGHHSIRPYTVFELEQVRQHSRNLKLGSAFPRGDLAQMEQSVGRLRSMHSKMLMNIEKVQIHFGGSTKASSQIIRELLHAQCLGSPCYKRVTDMADYTYSTVPRRCGGSHTLTYPYHRSRPQHLPRGLYPTEEIQIAMKHDEVDILGLDGHIYKGRMDTRLPGILRKDSSGTSKRKSQQPRPHVHRPPSLSSNGQLPSRPQSAQISAGNTSER

SEQ ID NO: 2050 - protein, 1060 aa, Homo sapiens
MLIEDVDALKSWLAKLLEPICDADPSALANYVVALVKKDKPEKELKAFCADQLDVFLQKETSGFVDKLFESLYTKNYLPLLEPVKPEPKPLVQEKEEIKEEVFQEPAEEERDGRKKKYPSPQKTRSESSERRTREKKREDGKWRDYDRYYERNELYREKYDWRRGRSKSRSKSRGLSRSRSRSRGRSKDRDPNRNVEHRERSKFKSERNDLESSYVPVSAPPPNSSEQYSSGAQSIPSTVTVIAPAHHSENTTESWSNYYNNHSSSNSFGRNLPPKRRCRDYDERGFCVLGDLCQFDHGNDPLVVDEVALPSMIPFPPPPPGLPPPPPPGMLMPPMPGPGPGPGPGPGPGPGPGPGPGHSMRLPVPQGHGQPPPSVVLPIPRPPITQSSLINSRDQPGTSAVPNLASVGTRLPPPLPQNLLYTVSERQPMYSREHGAAASERLQLGTPPPLLAARLVPPRNLMGSSIGYHTSVSSPTPLVPDTYEPDGYNPEAPSITSSGRSQYRQFFSRTQTQRPNLIGLTSGDMDVNPRAANIVIQTEPPVPVSINSNITRVVLEPDSRKRAMSGLEGPLTKKPWLGKQGNNNQNKPGFLRKNQYTNTKLEVKKIPQELNNITKLNEHFSKFGTIVNIQVAFKGDPEAALIQYLTNEEARKAISSTEAVLNNRFIRVLWHRENNEQPTLQSSAQLLLQQQQTLSHLSQQHHHLPQHLHQQQVLVAQSAPSTVHGGIQKMMSKPQTSGAYVLNKVPVKHRLGHAGGNQSDASHLLNQSGGAGEDCQIFSTPGHPKMIYSSSNLKTPSKLCSGSKSHDVQEVLKKKQEAMKLQQDMRKKRQEVLEKQIECQKMLISKLEKNKNMKPEERANIMKTLKELGEKISQLKDELKTSSAVSTPSKVKTKTEAQKELLDTELDLHKRLSSGEDTTELRKKLSQLQVEAARLGILPVGRGKTMSSQGRGRGRGRGGRGRGSLNHMVVDHRPKALTVGGFIEEEKEDLLQHFSTANQGPKFKDRRLQISWHKPKVPSISTETEEEEVKEEETETSDLFLPDDDDEDEDEYESRSWRR

SEQ ID NO: 2051 - protein, 300 aa, Homo sapiens
MDWFHCNQCFRKDGAHFFVTSCGHIFCKKCVTLEKCAVCGTACKHLALSDNLKPQEKMFFKSPVETALQYFSHISQVWSFQKKQTDLLIAFYKHRITKLETAMQEAQQALVSQDKELSVLRKENGELKKFLAILKESPSRYQGSRSITPRPVGITSPSQSVTPRPSFQHSSQVVSRSSSAESIPYREAGFGSLGQGGRGLQGRRTPRDSYNETPSPASTHSLSYRTSSASSGQGIFSFRPSPNGHSGHTRVLTPNNFAQRESTTTLESLPSFQLPVLQTLYQQRRHMGLPSGREAWTTSR

SEQ ID NO: 2052 - protein, 862 aa, Homo sapiens
MAQPGPASQPDVSLQQRVAELEKINAEFLRAQQQLEQEFNQKRAKFKELYLAKEEDLKRQNAVLQAAQDDLGHLRTQLWEAQAEMENIKAIATVSENTKQEAIDEVKRQWREEVASLQAVMKETVRDYEHQFHLRLEQERTQWAQYRESAEREIADLRRRLSEGQEEENLENEMKKAQEDAEKLRSVVMPMEKEIAALKDKLTEAEDKIKELEASKVKELNHYLEAEKSCRTDLEMYVAVLNTQKSVLQEDAEKLRKELHEVCHLLEQERQQHNQLKHTWQKANDQFLESQRLLMRDMQRMEIVLTSEQLRQVEELKKKDQEDDEQQRLNKRKDHKKADVEEEIKIPVVCALTQEESSAQLSNEEEHLDSTRGSVHSLDAGLLLPSGDPFSKSDNDMFKDGLRRAQSTDSLGTSGSLQSKALGYNYKAKSAGNLDESDFGPLVGADSVSENFDTASLGSLQMPSGFMLTKDQERAIKAMTPEQEETASLLSSVTQGMESAYVSPSGYRLVSETEWNLLQKEVHNAGNKLGRRCDMCSNYEKQLQGIQIQEAETRDQVKKLQLMLRQANDQLEKTMKDKQELEDFIKQSSEDSSHQISALVLRAQASEILLEELQQGLSQAKRDVQEQMAVLMQSREQVSEELVRLQKDNDSLQGKHSLHVSLQQAEDFILPDTTEALRELVLKYREDIINVRTAADHVEEKLKAEILFLKEQIQAEQCLKENLEETLQLEIENCKEEIASISSLKAELERIKVEKGQLESTLREKSQQLESLQEIKISLEEQLKKETAAKATVEQLMFEEKNKAQRLQTELDVSEQVQRDFVKLSQTLQVQLERIRQADSLERIRAILNDTKLTDINQLPET

SEQ ID NO: 2053 - protein, 829 aa, Homo sapiens
MAQPGPASQPDVSLQQRVAELEKINAEFLRAQQQLEQEFNQKRAKFKELYLAKEEDLKRQNAVLQAAQDDLGHLRTQLWEAQAEMENIKAIATVSENTKQEAIDEVKRQWREEVASLQAVMKETVRDYEHQFHLRLEQERTQWAQYRESAEREIADLRRRLSEGQEEENLENEMKKAQEDAEKLRSVVMPMEKEIAALKDKLTEAEDKIKELEASKVKELNHYLEAEKSCRTDLEMYVAVLNTQKSVLQEDAEKLRKELHEVCHLLEQERQQHNQLKHTWQKANDQFLESQRLLMRDMQRMEIVLTSEQLRQVEELKKKDQEDDEQQRLNKRKDHKKADVEEEIKIPVVCALTQEESSAQLSNEEEHLDSTRGSVHSLDAGLLLPSGDPFSKSDNDMFKDGLRRAQSTDSLGTSGSLQSKALGYNYKAKSAGNLDESDFGPLVGADSVSENFDTASLGSLQMPSGFMLTKDQERAIKAMTPEQEETASLLSSVTQGMESAYVSPSGYRLVSETEWNLLQKEVHNAGNKLGRRCDMCSNYEKQLQGIQIQEAETRDQVKKLQLMLRQANDQLEKTMKDKQELEDFIKQSSEDSSHQISALVLRAQASEILLEELQQGLSQAKRDVQEQMAVLMQSREQVSEELVRLQKDNDSLQGKHSLHVSLQQAEDFILPDTTEALRELVLKYREDIINVRTAADHVEEKLKAEILFLKEQIQAEQCLKENLEETLQLEIENCKEEIASISSLKAELERIKVEKGQATVEQLMFEEKNKAQRLQTELDVSEQVQRDFVKLSQTLQVQLERIRQADSLERIRAILNDTKLTDINQLPET

SEQ ID NO: 2054 - protein, 234 aa, Homo sapiens
MRKPDSKIVLLGDMNVGKTSLLQRYMERRFPDTVSTVGGAFYLKQWRSYNISIWDTAGREQFHGLGSMYCRGAAAIILTYDVNHRQSLVELEDRFLGLTDTASKDCLFAIVGNKVDLTEEGALAGQEKEECSPNMDAGDRVSPRAPKQVQLEDAVALYKKILKYKMLDEQDVPAAEQMCFETSAKTGYNVDLLFETLFDLVVPMILQQRAERPSHTVDISSHKPPKRTRSGCCA

SEQ ID NO: 2055 - protein, 192 aa, Homo sapiens
MQAIKCVVVGDGAVGKTCLLISYTTNAFPGEYIPTVFDNYSANVMVDGKPVNLGLWDTAGQEDYDRLRPLSYPQTDVFLICFSLVSPASFENVRAKWYPEVRHHCPNTPIILVGTKLDLRDDKDTIEKLKEKKLTPITYPQGLAMAKEIGAVKYLECSALTQRGLKTVFDEAIRAVLCPPPVKKRKRKCLLL

SEQ ID NO: 2056 - protein, 211 aa, Homo sapiens
MQAIKCVVVGDGAVGKTCLLISYTTNAFPGEYIPTVFDNYSANVMVDGKPVNLGLWDTAGQEDYDRLRPLSYPQTVGETYGKDITSRGKDKPIADVFLICFSLVSPASFENVRAKWYPEVRHHCPNTPIILVGTKLDLRDDKDTIEKLKEKKLTPITYPQGLAMAKEIGAVKYLECSALTQRGLKTVFDEAIRAVLCPPPVKKRKRKCLLL

SEQ ID NO: 2057 - protein, 714 aa, Homo sapiens
MNTLQGPVSFKDVAVDFTQEEWQQLDPDEKITYRDVMLENYSHLVSVGYDTTKPNVIIKLEQGEEPWIMGGEFPCQHSPEAWRVDDLIERIQENEDKHSRQAACINSKTLTEEKENTFSQIYMETSLVPSSIIAHNCVSCGKNLESISQLISSDGSYARTKPDECNECGKTYHGEKMCEFNQNGDTYSHNEENILQKISILEKPFEYNECMEALDNEAVFIAHKRAYIGEKPYEWNDSGPDFIQMSNFNAYQRSQMEMKPFECSECGKSFCKKSKFIIHQRAHTGEKPYECNVCGKSFSQKGTLTVHRRSHLEEKPYKCNECGKTFCQKLHLTQHLRTHSGEKPYECSECGKTFCQKTHLTLHQRNHSGERPYPCNECGKSFSRKSALSDHQRTHTGEKLYKCNECGKSYYRKSTLITHQRTHTGEKPYQCSECGKFFSRVSYLTIHYRSHLEEKPYECNECGKTFNLNSAFIRHRKVHTEEKSHECSECGKFSQLYLTDHHTAHLEEKPYECNECGKTFLVNSAFDGHQPLPKGEKSYECNVCGKLFNELSYYTEHYRSHSEEKPYGCSECGKTFSHNSSLFRHQRVHTGEKPYECYECGKFFSQKSYLTIHHRIHSGEKPYECSKCGKVFSRMSNLTVHYRSHSGEKPYECNECGKVFSQKSYLTVHYRTHSGEKPYECNECGKKFHHRSAFNSHQRIHRRGNMNVLDVENL

SEQ ID NO: 2058 - protein, 113 aa, Homo sapiens
MNTLQGPVSFKDVAVDFTQEEWQQLDPDEKITYRDVMLENYSHLVSVGYDTTKPNVIIKLEQGEEPWIMGGEFPCQHSPAALPAGHVAPAVAAAAAAPGRPGPHRQSRSPPGC

SEQ ID NO: 2059 - protein, 696 aa, Homo sapiens
MDADMDYERPNVETIKCVVVGDNAVGKTRLICARACNTTLTQYQLLATHVPTVWAIDQYRVCQEVLERSRDVVDEVSVSLRLWDTFGDHHKDRRFAYGRSDVVVLCFSIANPNSLNHVKSMWYPEIKHFCPRTPVILVGCQLDLRYADLEAVNRARRPLARPIKRGDILPPEKGREVAKELGLPYYETSVFDQFGIKDVFDNAIRAALISRRHLQFWKSHLKKVQKPLLQAPFLPPKAPPPVIKIPECPSMGTNEAACLLDNPLCADVLFILQDQEHIFAHRIYLATSSSKFYDLFLMECEESPNGSEGACEKEKQSRDFQGRILSVDPEEEREEGPPRIPQADQWKSSNKSLVEALGLEAEGAVPETQTLTGWSKGFIGMHREMQVNPISKRMGPMTVVRMDASVQPGPFRTLLQFLYTGQLDEKEKDLVGLAQIAEVLEMFDLRMMVENIMNKEAFMNQEITKAFHVRKANRIKECLSKGTFSDVTFKLDDGAISAHKPLLICSCEWMAAMFGGSFVESANSEVYLPNINKISMQAVLDYLYTKQLSPNLDLDPLELIALANRFCLPHLVALAEQHAVQELTKAATSGVGIDGEVLSYLELAQFHNAHQLAAWCLHHICTNYNSVCSKFRKEIKSKSADNQEYFERHRWPPVWYLKEEDHYQRVKREREKEDIALNKHRSRRKWCFWNSSPAVA

SEQ ID NO: 2060 - protein, 381 aa, Homo sapiens
MLLSIGMLMLSATQVYTILTVQLFAFLNLLPVEADILAYNFENASQTFDDLPARFGYRLPAEGLKGFLINSKPENACEPIVPPPVKDNSSGTFIVLIRRLDCNFDIKVLNAQRAGYKAAIVHNVDSDDLISMGSNDIEVLKKIDIPSVFIGESSANSLKDEFTYEKGGHLILVPEFSLPLEYYLIPFLIIVGICLILIVIFMITKFVQDRHRARRNRLRKDQLKKLPVHKFKKGDEYDVCAICLDEYEDGDKLRILPCSHAYHCKCVDPWLTKTKKTCPVCKQKVVPSQGDSDSDTDSSQEENEVTEHTPLLRPLASVSAQSFGALSESRSHQNMTESSDYEEDDNEDTDSSDAENEINEHDVVVQLQPNGERDYNIANTV

SEQ ID NO: 2061 - protein, 262 aa, Homo sapiens
MLILMTSLAWDPTTVSTVEVLKKIDIPSVFIGESSANSLKDEFTYEKGGHLILVPEFSLPLEYYLIPFLIIVGICLILIVIFMITKFVQDRHRARRNRLRKDQLKKLPVHKFKKGDEYDVCAICLDEYEDGDKLRILPCSHAYHCKCVDPWLTKTKKTCPVCKQKVVPSQGDSDSDTDSSQEENEVTEHTPLLRPLASVSAQSFGALSESRSHQNMTESSDYEEDDNEDTDSSDAENEINEHDVVVQLQPNGERDYNIANTV

SEQ ID NO: 2062 - protein, 417 aa, Homo sapiens [sequence omitted]

SEQ ID NO: 2063 - protein, 354 aa, Homo sapiens
MSSKYPRSVRRCLPLWALTLEAALILLFYFFTHYDASLEDQKGLVASYQVGQDLTVMAALGLGFLTSNFRRHSWSSVAFNLFMLALGVQWAILLDGFLSQFPPGKVVITLFSIRLATMSAMSVLISAGAVLGKVNLAQLVVMVLVEVTALGTLRMVISNIFNTDYHMNLRHFYVFAAYFGLTVAWCLPKPLPKGTEDNDQRATIPSLSAMLGALFLWMFWPSVNSPLLRSPIQRKNAMFNTYYALAVSVVTAISGSSLAHPQRKISMTYVHSAVLAGGVAVGTSCHLIPSPWLAMVLGLVAGLISIGGAKCLPDWLPGPPQHWGTQLGHRDSSHVWSPDRFAPKSQNMESTSCG

SEQ ID NO: 2064 - protein, 267 aa, Homo sapiens
MSSKYPRSVRRCLPLWALTLEAALILLFYFFTHYDASLEDQKGLVASYQVGQDLTVMAALGLGFLTSNFRRHSWSSVAFNLFMLALGVQWAILLDGFLSQFPPGKVVITLFSIRLATMSAMSVLISAGAVLGKVNLAQLVVMVLVEVTALGTLRMVISNIFNTYVHSAVLAGGVAVGTSCHLIPSPWLAMVLGLVAGLISIGGAKCLPVCCNRVLGIHHISVMHSIFSLLGLLGEITYIVLLVLHTVWNGNGMFAPKSQNMESTSCG

SEQ ID NO: 2065 - protein, 266 aa, Homo sapiens
MSSKYPRSVRRCLPLWALTLEAALILLFYFFTHYDASLEDQKGLVASYQVGQDLTVMAALGLGFLTSNFRRHSWSSVAFNLFMLALGVQWAILLDGFLSQFPPGKVVITLFSIRLATMSAMSVLISAGAVLGKVNLAQLVVMVLVEVTALGTLRMVISNIFNVCCNRVLGIHHISVMHSIFSLLGLLGEITYIVLLVLHTVWNGNGMIGFQVLLSIGELSLAIVIALTSGLLTGLLLNLKIWKAPHVAKYFDDQVFWKFPHLAVGF

SEQ ID NO: 2066 - protein, 372 aa, Homo sapiens
MSSKYPRSVRRCLPLWALTLEAALILLFYFFTHYDASLEDQKGLVASYQVGQDLTVMAALGLGFLTSNFRRHSWSSVAFNLFMLALGVQWAILLDGFLSQFPPGKVVITLFSIRLATMSAMSVLISAGAVLGKVNLAQLVVMVLVEVTALGTLRMVISNIFNTDYHMNLRHFYVFAAYFGLTVAWCLPKPLPKGTEDNDQRATIPSLSAMLGALFLWMFWPSVNSPLLRSPIQRKNAMFNTYYALAVSVVTAISGSSLAHPQRKISMTYVHSAVLAGGVAVGTSCHLIPSPWLAMVLGLVAGLISIGGAKCLPVCCNRVLGIHHISVMHSIFSLLGLLGEITYIVLLVLHTVWNGNGMFAPKSQNMESTSCG

SEQ ID NO: 2067 - protein, 395 aa, Homo sapiens
MSSKYPRSVRRCLPLWALTLEAALILLFYFFTHYDASLEDQKGLVASYQVGQDLTVMAALGLGFLTSNFRRHSWSSVAFNLFMLALGVQWAILLDGFLSQFPPGKVVITLFSIRLATMSAMSVLISAGAVLGKVNLAQLVVMVLVEVTALGTLRMVISNIFNTDYHMNLRHFYVFAAYFGLTVAWCLPKPLPKGTEDNDQRATIPSLSAMLGALFLWMFWPSVNSPLLRSPIQRKNAMFNTYYALAVSVVTAISGSSLAHPQRKISMTYVHSAVLAGGVAVGTSCHLIPSPWLAMVLGLVAGLISIGGAKCLPVCCNRVLGIHHISVMHSIFSLLGLLGEITYIVLLVLHTVWNGNGIFLIWLLDFKQKHPRKTRPVQKQDNFLSLLPAVREKRS

SEQ ID NO: 2068 - protein, 321 aa, Homo sapiens
MSSKYPRSVRRCLPLWALTLEAALILLFYFFTHYDASLEDQKGLVASYQVGQDLTVMAALGLGFLTSNFRRHSWSSVAFNLFMLALGVQWAILLDGFLSQFPPGKVVITLFSIRLATMSAMSVLISAGAVLGKVNLAQLVVMVLVEVTALGTLRMVISNIFNTDYHMNLRHFYVFAAYFGLTVAWCLPKPLPKGTEDNDQRATIPSLSAMLGALFLWMFWPSVNSPLLRSPIQRKNAMFNTYYALAVSVVTAISGSSLAHPQRKISMTYVHSAVLAGGVAVGTSCHLIPSPWLAMVLGLVAGLISIGGAKCLPFPHLAVGF

SEQ ID NO: 2069 - protein, 308 aa, Homo sapiens
MSSKYPRSVRRCLPLWALTLEAALILLFYFFTHYDASLEDQKGLVASYQVGQDLTVMAALGLGFLTSNFRRHSWSSVAFNLFMLALGVQWAILLDGFLSQFPPGKVVITLFSIRLATMSAMSVLISAGAVLGKVNLAQLVVMVLVEVTALGTLRMVISNIFNTDYHMNLRHFYVFAAYFGLTVAWCLPKPLPKGTEDNDQRATIPSLSAMLGALFLWMFWPSVNSPLLRSPIQRKNAMFNTYYALAVSVVTAISGSSLAHPQRKISMDWLPGPPQHWGTQLGHRDSSHVWSPDRFAPKSQNMESTSCG

SEQ ID NO: 2070 - protein, 244 aa, Homo sapiens
MSSKYPRSVRRCLPLWALTLEAALILLFYFFTHYDASLEDQKGLVASYQVGQDLTVMAALGLGFLTSNFRRHSWSSVAFNLFMLALGVQWAILLDGFLSQFPPGKVVITLFSIRLATMSAMSVLISAGAVLGKVNLAQLVVMVLVEVTALGTLRMVISNIFNTDYHMNLRHFYVFAAYFGLTVAWCLPKPLPKGTEDNDQRATIPSLSAMLGLLLNLKIWKAPHVAKYFDDQVFWKFPHLAVGF

SEQ ID NO: 2071 - protein, 312 aa, Homo sapiens
MSSKYPRSVRRCLPLWALTLEAALILLFYFFTHYDASLEDQKGLVASYQVGQDLTVMAALGLGFLTSNFRRHSWSSVAFNLFMLALGVQWAILLDGFLSQFPPGKVVITLFSIRLATMSAMSVLISAGAVLGKVNLAQLVVMVLVEVTALGTLRMVISNIFNTYVHSAVLAGGVAVGTSCHLIPSPWLAMVLGLVAGLISIGGAKCLPVCCNRVLGIHHISVMHSIFSLLGLLGEITYIVLLVLHTVWNGNGMIGFQVLLSIGELSLAIVIALTSGLLTGLLLNLKIWKAPHVAKYFDDQVFWKFPHLAVGF

SEQ ID NO: 2072 - protein, 346 aa, Homo sapiens
MSSKYPRSVRRCLPLWALTLEAALILLFYFFTHYDASLEDQKGLVASYQVGQDLTVMAALGLGFLTSNFRRHSWSSVAFNLFMLALGVQWAILLDGFLSQFPPGKVVITLFSIRLATMSAMSVLISAGAVLGKVNLAQLVVMVLVEVTALGTLRMVISNIFNPSVNSPLLRSPIQRKNAMFNTYYALAVSVVTAISGSSLAHPQRKISMTYVHSAVLAGGVAVGTSCHLIPSPWLAMVLGLVVCCNRVLGIHHISVMHSIFSLLGLLGEITYIVLLVLHTVWNGNGMIGFQVLLSIGELSLAIVIALTSGLLTGLLLNLKIWKAPHVAKYFDDQVFWKFPHLAVGF

SEQ ID NO: 2073 - protein, 203 aa, Homo sapiens
MSSKYPRSVRRCLPLWALTLEAALILLFYFFTHYDASLEDQKGLVASYQVGQDLTVMAALGLGFLTSNFRRHSWSSVAFNLFMLALGVQWAILLDGFLSQFPPGKVVITLFSIRLATMSAMSVLISAGAVLGKVNLAQLVVMVLVEVTALGTLRMVISNIFNDWLPGPPQHWGTQLGHRDSSHVWSPDRFAPKSQNMESTSCG

SEQ ID NO: 2074 - protein, 170 aa, Homo sapiens
MSSKYPRSVRRCLPLWALTLEAALILLFYFFTHYDASLEDQKGLVASYQVGQDLTVMAALGLGFLTSNFRRHSWSSVAFNLFMLALGVQWAILLDGFLSQFPPGKVVITLFSIRLATMSAMSVLISAGAVLGKVNLAQLVVMVLVEVTALGTLRMVISNIFNFPHLAVGF

SEQ ID NO: 2075 - protein, 242 aa, Homo sapiens
MSSKYPRSVRRCLPLWALTLEAALILLFYFFTHYDASLEDQKGLVASYQVGQDLTVMAALGLGFLTSNFRRHSWSSVAFNLFMLALGVQWAILLDGFLSQFPPGKVVITLFSIRLATMSAMSVLISAGAVLGKVNLAQLVVMVLVEVTALGTLRMVISNIFNTDYHMNLRHFYVFAAYFGLTVAWCLPKPLPKGTEDNDQRATIPSLSAMLGALFLWMFWPSVNSPDRFAPKSQNMESTSCG

SEQ ID NO: 2076 - protein, 59 aa, Homo sapiens
MPAFFSLPAERRLQAWPQSEAPLSVSSCFQNRPPEPASFQNLRPEPASLQNLRTEPTSF

SEQ ID NO: 2077 - protein, 725 aa, Homo sapiens
MAAQCCCRQAPGAEAAPVRPPPEPPPALDVASASSAQLFRLRHLQLGLELRPEARELAGCLVLELCALRPAPRALVLDAHPALRLHSAAFRRAPAAAAETPCAFAFSAPGPGPAPPPPLPAFPEAPGSEPACCPLAFRVDPFTDYGSSLTVTLPPELQAHQPFQVILRYTSTDAPAIWWLDPELTYGCAKPFVFTQGHSVCNRSFFPCFDTPAVKCTYSAVVKAPSGVQVLMSATRSAYMEEEGVFHFHMEHPVPAYLVALVAGDLKPADIGPRSRVWAEPCLLPTATSKLSGAVEQWLSAAERLYGPYMWGRYDIVFLPPSFPIVAMENPCLTFIISSILESDEFLVIDVIHEVAHSWFGNAVTNATWEEMWLSEGLATYAQRRITTETYGAAFTCLETAFRLDALHRQMKLLGEDSPVSKLQVKLEPGVNPSHLMNLFTYEKGYCFVYYLSQLCGDPQRFDDFLRAYVEKYKFTSVVAQDLLDSFLSFFPELKEQSVDCRAGLEFERWLNATGPPLAEPDLSQGSSLTRPVEALFQLWTAEPLDQAAASASAIDISKWRTFQTALFLDRLLDGSPLPQEVVMSLSKCYSSLLDSMNAEIRIRWLQIVVRNDYYPDLHRVRRFLESQMSRMYTIPLYEDLCTGALKSFALEVFYQTQGRLHPNLRRAIQQILSQGLGSSTEPASEPSTELGKAEADTDSDAQALLLGDEAPSSAISLRDVNVSA

SEQ ID NO: 2078 - protein, 184 aa, Homo sapiens
MPQSKSRKIAILGYRSVGKSSLTIQFVEGQFVDSYDPTIENTFTKLITVNGQEYHLQLVDTAGQDEYSIFPQTYSIDINGYILVYSVTSIKSFEVIKVIHGKLLDMVGKVQIPIMLVGNKKDLHMERVISYEEGKALAESWNAAFLESSAKENQTAVDVFRRIILEAEKMDGAASQGKSSCSVM

SEQ ID NO: 2079 - protein, 191 aa, Homo sapiens
MQSIKCVVVGDGAVGKTCLLICYTTNAFPKEYIPTVFDNYSAQSAVDGRTVNLNLWDTAGQEEYDRLRTLSYPQTNVFVICFSIASPPSYENVRHKWHPEVCHHCPDVPILLVGTKKDLRAQPDTLRRLKEQGQAPITPQQGQALAKQIHAVRYLECSALQQDGVKEVFAEAVRAVLNPTPIKRGRSCILL

SEQ ID NO: 2080 - protein, 1208 aa, Homo sapiens
MERLRDVRERLQAWERAFRRQRGRRPSQDDVEAAPEETRALYREYRTLKRTTGQAGGGLRSSESLPAAAEEAPEPRCWGPHLNRAATKSPQSTPGRSRQGSVPDYGQRLKANLKGTLQAGPALGRRPWPLGRASSKASTPKPPGTGPVPSFAEKVSDEPPQLPEPQPRPGRLQHLQASLSQRLGSLDPGWLQRCHSEVPDFLGAPKACRPDLGSEESQLLIPGESAVLGPGAGSQGPEASAFQEVSIRVGSPQPSSSGGEKRRWNEEPWESPAQVQQESSQAGPPSEGAGAVAVEEDPPGEPVQAQPPQPCSSPSNPRYHGLSPSSQARAGKAEGTAPLHIFPRLARHDRGNYVRLNMKQKHYVRGRALRSRLLRKQAWKQKWRKKGECFGGGGATVTTKESCFLNEQFDHWAAQCPRPASEEDTDAVGPEPLVPSPQPVPEVPSLDPTVLPLYSLGPSGQLAETPAEVFQALEQLGHQAFRPGQERAVMRILSGISTLLVLPTGAGKSLCYQLPALLYSRRSPCLTLVVSPLLSLMDDQVSGLPPCLKAACIHSGMTRKQRESVLQKIRAAQVHVLMLTPEALVGAGGLPPAAQLPPVAFACIDEAHCLSQWSHNFRPCYLRVCKVLRERMGVHCFLGLTATATRRTASDVAQHLAVAEEPDLHGPAPVPTNLHLSVSMDRDTDQALLTLLQGKRFQNLDSIIIYCNRREDTERIAALLRTCLHAAWVPGSGGRAPKTTAEAYHAGMCSRERRRVQRAFMQGQLRVVVATVAFGMGLDRPDVRAVLHLGLPPSFESYVQAVGRAGRDGQPAHCHLFLQPQGEDLRELRRHVHADSTDFLAVKRLVQRVFPACTCTCTRPPSEQEGAVGGERPVPKYPPQEAEQLSHQAAPGPRRVCMGHERALPIQLTVQALDMPEEAIETLLCYLELHPHHWLELLATTYTHCRLNCPGGPAQLQALAHRCPPLAVCLAQQLPEDPGQGSSSVEFDMVKLVDSMGWELASVRRALCQLQWDHEPRTGVRRGTGVLVEFSELAFHLRSPGDLTAEEKDQICDFLYGRVQARERQALARLRRTFQAFHSVAFPSCGPCLEQQDEERSTRLKDLLGRYFEEEEGQEPGGMEDAQGPEPGQARLQDWEDQVRCDIRQFLSLRPEEKFSSRAVARIFHGIGSPCYPAQVYGQDRRFWRKYLHLSFHALVGLATEELLQVAR

SEQ ID NO: 2081 - protein, 126 aa, Homo sapiens
MSVMDLANTCSSFQSDLDFCSDCGSVLPLPGAQDTVTCIRCGFNINVRDFEGKVVKTSVVFHQLGTAMPMSVEEGPECQGPVVDRRCPRCGHEGMAYHTRQMRSADEGQTVFYTCTNCKFQEKEDS

SEQ ID NO: 2082 - protein, 181 aa, Homo sapiens
MFNRAVSRLSRKRPPSDIHDSDGSSSSSHQSLKSTAKWAASLENLLEDPEGVKRFREFLKKEFSEENVLFWLACEDFKKMQDKTQMQEKAKEIYMTFLSSKASSQVNVEGQSRLNEKILEEPHPLMFQKLQDQIFNLMKYDSYSRFLKSDLFLKHKRTEEEEEDLPDAQTAAKRASRIYNT

SEQ ID NO: 2083 - protein, 173 aa, Homo sapiens
MQSELCFADIHDSDGSSSSSHQSLKSTAKWAASLENLLEDPEGVKRFREFLKKEFSEENVLFWLACEDFKKMQDKTQMQEKAKEIYMTFLSSKASSQVNVEGQSRLNEKILEEPHPLMFQKLQDQIFNLMKYDSYSRFLKSDLFLKHKRTEEEEEDLPDAQTAAKRASRIYNT

SEQ ID NO: 2084 - protein, 167 aa, Homo sapiens
MEHIHDSDGSSSSSHQSLKSTAKWAASLENLLEDPEGVKRFREFLKKEFSEENVLFWLACEDFKKMQDKTQMQEKAKEIYMTFLSSKASSQVNVEGQSRLNEKILEEPHPLMFQKLQDQIFNLMKYDSYSRFLKSDLFLKHKRTEEEEEDLPDAQTAAKRASRIYNT

SEQ ID NO: 2085 - protein, 398 aa, Homo sapiens
MSEGNAAGEPSTPGGPRPLLTGARGLIGRRPAPPLTPGRLPSIRSRDLTLGGVKKKTFTPNIISRKIKEEPKEEVTVKKEKRERDRDRQREGHGRGRGRPEVIQSHSIFEQGPAEMMKKKGNWDKTVDVSDMGPSHIINIKKEKRETDEETKQILRMLEKDDFLDDPGLRNDTRNMPVQLPLAHSGWLFKEENDEPDVKPWLAGPKEEDMEVDIPAVKVKEEPRDEEEEAKMKAPPKAARKTPGLPKDVSVAELLRELSLTKEEELLFLQLPDTLPGQPPTQDIKPIKTEVQGEDGQVVLIKQEKDREAKLAENACTLADLTEGQVGKLLIRKSGRVQLLLGKVTLDVTMGTACSFLQELVSVGLGDSRTGEMTVLGHVKHKLVCSPDFESLLDHKHR

SEQ ID NO: 2086 - protein, 148 aa, Homo sapiens
MEVKDANSALLSNYEVFQLLTDLKEQRKESGKNKHSSGQQNLNTITYETLKYISKTPCRHQSPEIVREFLTALKSHKLTKAEKLQLLNHRPVTAVEIQLMVEESEERLTEEQIEALLHTVTSILPAEPEAEQKKNTNSNVAMDEEDPA

SEQ ID NO: 2087 - protein, 115 aa, Homo sapiens
MEVKDANSALLSNYETLKYISKTPCRHQSPEIVREFLTALKSHKLTKAEKLQLLNHRPVTAVEIQLMVEESEERLTEEQIEALLHTVTSILPAEPEAEQKKNTNSNVAMDEEDPA

SEQ ID NO: 2088 - protein, 141 aa, Homo sapiens
MQRGDPGEHLGARSWHLGAVGGGGDSCEVKDANSALLSNYETLKYISKTPCRHQSPEIVREFLTALKSHKLTKAEKLQLLNHRPVTAVEIQLMVEESEERLTEEQIEALLHTVTSILPAEPEAEQKKNTNSNVAMDEEDPA

SEQ ID NO: 2089 - protein, 71 aa, Homo sapiens
MEVAEKLQLLNHRPVTAVEIQLMVEESEERLTEEQIEALLHTVTSILPAEPEAEQKKNTNSNVAMDEEDPA

SEQ ID NO: 2090 - protein, 1273 aa, Homo sapiens
MQKGIRLNDGHVASLGLLARKDGTRKGYLSKRSSDNTKWQTKWFALLQNLLFYFESDSSSRPSGLYLLEGCVCDRAPSPKPALSAKEPLEKQHYFTVNFSHENQKALELRTEDAKDCDEWVAAIAHASYRTLATEHEALMQKYLHLLQIVETEKTVAKQLRQQIEDGEIEIERLKAEITSLLKDNERIQSTQTVAPNDEDSDIKKIKKVQSFLRGWLCRRKWKTIIQDYIRSPHADSMRKRNQVVFSMLEAEAEYVQQLHILVNNFLRPLRMAASSKKPPITHDDVSSIFLNSETIMFLHQIFYQGLKARISSWPTLVLADLFDILLPMLNIYQEFVRNHQYSLQILAHCKQNRDFDKLLKHYEAKPDCEERTLETFLTYPMFQIPRYILTLHELLAHTPHEHVERNSLDYAKSKLEELSRIMHDEVSETENIRKNLAIERMIIEGCEILLDTSQTFVRQGSLIQVPMSEKGKITRGRLGSLSLKKEGERQCFLFSKHLIICTRGSGGKLHLTKNGVISLIDCTLLEEPESTEEEAKGSGQDIDHLDFKIGVEPKDSPPFTVILVASSRQEKAAWTSDISQCVDNIRCNGLMMNAFEENSKVTVPQMIKRTREGTREAEMSRSDASLYCDDVDIRFSKTMNSCKVLQIRYASVERLLERLTDLRFLSIDFLNTFLHSYRVFTTAIVVLDKLITIYKKPISAIPARWLRSLELLFASGQNNKLLYGEPPKSPRATRKFSSPPPLSITKTSSPSRRRKLSLNIPIITGGKALDLAALSCNSNGYTSMYSAMSPFSKATLDTSKLYVSSSFTNKIPDEGDTTPEKPEDPSALSKQSSEVSMREESDIDQNQSDDGDTETSPTKSPTTPKSVKNKNSSEFPLFSYNNGVVMTSCRELDNNRSALSAASAFAIATAGANEGTPNKEKYRRMSLASAGFPPDQRNGDKEFVIRRAATNRVLNVLRHWVSKHSQDFETNDELKCKVIGFLEEVMHDPELLTQERKAAANIIRTLTQEDPGDNQITLEEITQMAEGVKAEPFENHSALEIAEQLTLLDHLVFKKIPYEEFFGQGWMKLEKNERTPYIMKTTKHFNDISNLIASEIIRNEDINARVSAIEKWVAVADICRCLHNYNAVLEITSSMNRSAIFRLKKTWLKVSKQTKALIDKLQKLVSSEGRFKNLREALKNCDPPCVPYLGMYLTDLAFIEEGTPNYTEDGLVNFSKMRMISHIIREIRQFQQTAYKIEHQAKVTQYLLDQSFVMDEESLYESSLRIEPKLPT

SEQ ID NO: 2091 - protein, 489 aa, Homo sapiens
MYSAMSPFSKATLDTSKLYVSSSFTNKIPDEGDTTPEKPEDPSALSKQSSEVSMREESDIDQNQSDDGDTETSPTKSPTTPKSVKNKNSSEFPLFSYNNGVVMTSCRELDNNRSALSAASAFAIATAGANEGTPNKEKYRRMSLASAGFPPDQRNGDKEFVIRRAATNRVLNVLRHWVSKHSQDFETNDELKCKVIGFLEEVMHDPELLTQERKAAANIIRTLTQEDPGDNQITLEEITQMAEGVKAEPFENHSALEIAEQLTLLDHLVFKKIPYEEFFGQGWMKLEKNERTPYIMKTTKHFNDISNLIASEIIRNEDINARVSAIEKWVAVADICRCLHNYNAVLEITSSMNRSAIFRLKKTWLKVSKQTKALIDKLQKLVSSEGRFKNLREALKNCDPPCVPYLGMYLTDLAFIEEGTPNYTEDGLVNFSKMRMISHIIREIRQFQQTAYKIEHQAKVTQYLLDQSFVMDEESLYESSLRIEPKLPT

SEQ ID NO: 2092 - protein, 1257 aa, Homo sapiens
MQKGIRLNDGHVASLGLLARKDGTRKGYLSKRSSDNTKWQTKWFALLQNLLFYFESDSSSRPSGLYLLEGCVCDRAPSPKPALSAKEPLEKQHYFTVNFSHENQKALELRTEDAKDCDEWVAAIAHASYRTLATEHEALMQKYLHLLQIVETEKTVAKQLRQQIEDGEIEIERLKAEITSLLKDNERIQSTQTVAPNDEDSDIKKIKKVQSFLRGWLCRRKWKTIIQDYIRSPHADSMRKRNQVVFSMLEAEAEYVQQLHILVNNFLRPLRMAASSKKPPITHDDVSSIFLNSETIMFLHQIFYQGLKARISSWPTLVLADLFDILLPMLNIYQEFVRNHQYSLQILAHCKQNRDFDKLLKHYEAKPDCEERTLETFLTYPMFQIPRYILTLHELLAHTPHEHVERNSLDYAKSKLEELSRIMHDEVSETENIRKNLAIERMIIEGCEILLDTSQTFVRQGSLIQVPMSEKGKITRGRLGSLSLKKEGERQCFLFSKHLIICTRGSGGKLHLTKNGVISLIDCTLLEEPESTEEEAKGSGQDIDHLDFKIGVEPKDSPPFTVILVASSRQEKAAWTSDISQCVDNIRCNGLMMNAFEENSKVTVPQMIKSDASLYCDDVDIRFSKTMNSCKVLQIRYASVERLLERLTDLRFLSIDFLNTFLHSYRVFTTAIVVLDKLITIYKKPISAIPARSLELLFASGQNNKLLYGEPPKSPRATRKFSSPPPLSITKTSSPSRRRKLSLNIPIITGGKALDLAALSCNSNGYTSMYSAMSPFSKATLDTSKLYVSSSFTNKIPDEGDTTPEKPEDPSALSKQSSEVSMREESDIDQNQSDDGDTETSPTKSPTTPKSVKNKNSSEFPLFSYNNGVVMTSCRELDNNRSALSAASAFAIATAGANEGTPNKEKYRRMSLASAGFPPDQRNGDKEFVIRRAATNRVLNVLRHWVSKHSQDFETNDELKCKVIGFLEEVMHDPELLTQERKAAANIIRTLTQEDPGDNQITLEEITQMAEGVKAEPFENHSALEIAEQLTLLDHLVFKKIPYEEFFGQGWMKLEKNERTPYIMKTTKHFNDISNLIASEIIRNEDINARVSAIEKWVAVADICRCLHNYNAVLEITSSMNRSAIFRLKKTWLKVSKQTKALIDKLQKLVSSEGRFKNLREALKNCDPPCVPYLGMYLTDLAFIEEGTPNYTEDGLVNFSKMRMISHIIREIRQFQQTAYKIEHQAKVTQYLLDQSFVMDEESLYESSLRIEPKLPT

SEQ ID NO: 2093 - protein, 338 aa, Homo sapiens
MAAGCSEAPRPAAASDGSLVGQAGVLPCLELPTYAAACALVNSRYSCLVAGPHQRHIALSPRYLNRKRTGIREQLDAELLRYSESLLGVPIAYDNIKVVGELGDIYDDQGHIHLNIEADFVIFCPEPGQKLMGIVNKVSSSHIGCLVHGCFNASIPKPEQLSAEQWQTMEINMGDELEFEVFRLDSDAAGVFCIRGKLNITSLQFKRSEVSEEVTENGTEEAAKKPKKKKKKKDPETYEVDSGTTKLADDADDTPMEESALQNTNNANGIWEEEPKKKKKKKKHQEVQDQDPVFQGSDSSGYQSDHKKKKKKRKHSEEAEFTPPLKCSPKRKGKSNFL

SEQ ID NO: 2094 - protein, 256 aa, Homo sapiens
MRPAALRGALLGCLCLALLCLGGADKRLRDNHEWKKLIMVQHWPETVCEKIQNDCRDPPDYWTIHGLWPDKSEGCNRSWPFNLEEIKDLLPEMRAYWPDVIHSFPNRSRFWKHEWEKHGTCAAQVDALNSQKKYFGRSLELYRELDLNSVLLKLGIKPSINYYQVADFKDALARVYGVIPKIQCLPPSQDEEVQTIGQIELCLTKQDQQLQNCTEPGEQPSPKQEVWLANGAAESRGLRVCEDGPVFYPPPKKTKH

SEQ ID NO: 2095 - protein, 121 aa, Homo sapiens
MRPAALRGALLGCLCLALLCLGGADKRLRDNHEWKKLIMVQHWPETVCEKIQNDCRDPPDYWTIHGLWPDKSEGCNRSWPFNLEEIKKNWMEITDSSLPSPSTLPIINIFYSVLHLLQLMN

SEQ ID NO: 2096 - protein, 657 aa, Homo sapiens
MGEEDYYLELCERPVQFEKANPVNCVFFDEANKQVFAVRSGGATGVVVKGPDDRNPISFRMDDKGEVKCIKFSLENKILAVQRTSKTVDFCNFIPDNSQLEYTQECKTKNANILGFCWTSSTEIVFITDQGIEFYQVLPEKRSLKLLKSHNLNVNWYMYCPESAVILLSTTVLENVLQPFHFRAGTMSKLPKFEIELPAAPKSTKPSLSERDIAMATIYGQLYVLFLRHHSRTSNSTGAEVVLYHLPREGACKKMHILKLNRTGKFALNVVDNLVVVHHQDTETSVIFDIKLRGEFDGSVTFHHPVLPARSIQPYQIPITGPAAVTSQSPVPCKLYSSSWIVFQPDIIISASQGYLWNLQVKLEPIVNLLPDKGRLMDFLLQRKECKMVILSVCSQMLSESDRASLPVIATVFDKLNHEYKKYLDAEQSYAMAVEAGQSRSSPLLKRPVRTQAVLDQSDVYTHVLSAFVEKKEMPHKFVIAVLMEYIRSLNQFQIAVQHYLHELVIKTLVQHNLFYMLHQFLQYHVLSDSKPLACLLLSLESFYPPAHQLSLDMLKRLSTANDEIVEVLLSKHQVLAALRFIRGIGGHDNISARKFLDAAKQTEDNMLFYTIFRFFEQRNQRLRGSPNFTPGEHCEEHVAFFKQIFGDQALMRPTTF

SEQ ID NO: 2097 - protein, 419 aa, Homo sapiens
MAAEVLPSARWQYCGAPDGSQRAVLVQFSNGKLQSPGNMRFTLYENKDSTNPRKRNQRILAAETDRLSYVGNNFGTGALKCNTLCRHFVGILNKTSGQMEVYDAELFNMQPLFSDVSVESELALESQTKTYREKMDSCIEAFGTTKQKRALNTRRMNRVGNESLNRAVAKAAETIIDTKGVTALVSDAIHNDLQDDSLYLPPCYDDAAKPEDVYKFEDLLSPAEYEALQSPSEAFRNVTSEEILKMIEENSHCTFVIEALKSLPSDVESRDRQARCIWFLDTLIKFRAHRVVKRKSALGPGVPHIINTKLLKHFTCLTYNNGRLRNLISDSMKAKITAYVIILALHIHDFQIDLTVLQRDLKLSEKRMMEIAKAMRLKISKRRVSVAAGSEEDHKLGTLSLPLPPAQTSDRLAKRRKIT

SEQ ID NO: 2098 - protein, 481 aa, Homo sapiens
MYQASAVSLLPRDIPSCHSPSPGFSHLPTSSSQLAPDLLQFPLGQDPSFLAIPILTLPPSDSLVPPYIVWYIVWPSALISFLGCTLTVQFSNGKLQSPGNMRFTLYENKDSTNPRKRNQRILAAETDRLSYVGNNFGTGALKCNTLCRHFVGILNKTSGQMEVYDAELFNMQPLFSDVSVESELALESQTKTYREKMDSCIEAFGTTKQKRALNTRRMNRVGNESLNRAVAKAAETIIDTKGVTALVSDAIHNDLQDDSLYLPPCYDDAAKPEDVYKFEDLLSPAEYEALQSPSEAFRNVTSEEILKMIEENSHCTFVIEALKSLPSDVESRDRQARCIWFLDTLIKFRAHRVVKRKSALGPGVPHIINTKLLKHFTCLTYNNGRLRNLISDSMKAKITAYVIILALHIHDFQIDLTVLQRDLKLSEKRMMEIAKAMRLKISKRRVSVAAGSEEDHKLGTLSLPLPPAQTSDRLAKRRKIT

SEQ ID NO: 2099 - protein, 314 aa, Homo sapiens
MALAARLWRLLPFRRGAAPGSRLPAGTSGSRGHCGPCRFRGFEVMGNPGTFKRGLLLSALSYLGFETYQVISQAAVVHATAKVEEILEQADYLYESGETEKLYQLLTQYKESEDAELLWRLARASRDVAQLSRTSEEEKKLLVYEALEYAKRALEKNESSFASHKWYAICLSDVGDYEGIKAKIANAYIIKEHFEKAIELNPKDATSIHLMGIWCYTFAEMPWYQRRIAKMLFATPPSSTYEKALGYFHRAEQVDPNFYSKNLLLLGKTYLKLHNKKLAAFWLMKAKDYPAHTEEDKQIQTEAAQLLTSFSEKN

SEQ ID NO: 2100 - protein, 284 aa, Homo sapiens
MALAARLWRLLPFRRGAAPGSRLPAGTSGSRGHCGPCRFRGFEVMGNPGTFKRGLLLSALSYLGFETYQVISQAAVVHATAKVEEILEQADYLYESGETEKLYQLLTQYKESEDAELLWRLARASRDVAQLSRTSEEEKKLLVYEALEYAKRALEKNESSFASHKKAIELNPKDATSIHLMGIWCYTFAEMPWYQRRIAKMLFATPPSSTYEKALGYFHRAEQVDPNFYSKNLLLLGKTYLKLHNKKLAAFWLMKAKDYPAHTEEDKQIQTEAAQLLTSFSEKN

SEQ ID NO: 2101 - protein, 271 aa, Homo sapiens
MALAARLWRLLPFRRGAAPGSRLPAGTSGSRGHCGPCRFRGFEVMGNPGTFKRGLLLSALSYLGFETYQVISQAAVVHATAKVEEILEQADYLYESGETEKLYQLLTQYKESEDAELLWRLARASRDVAQLSRTSEEEKKLLVYEALEYAKRALEKNESSFASHKKAIELNPKDATSIHLMGIWCYTFAEMPWYQRRIAKMLFATPPSSTYEKALGYFHRAEQGKTYLKLHNKKLAAFWLMKAKDYPAHTEEDKQIQTEAAQLLTSFSEKN

SEQ ID NO: 2102 - protein, 393 aa, Homo sapiens
MEQCACVERELDKVLQKFLTYGQHCERSLEELLHYVGQLRAELASAALQGTPLSATLSLVMSQCCRKIKDTVQKLASDHKDIHSSVSRVGKAIDRNFDSEICGVVSDAVWDAREQQQQILQMAIVEHLYQQGMLSVAEELCQESTLNVDLDFKQPFLELNRILEALHEQDLGPALEWAVSHRQRLLELNSSLEFKLHRLHFIRLLAGGPAKQLEALSYARHFQPFARLHQREIQVMMGSLVYLRLGLEKSPYCHLLDSSHWAEICETFTRDACSLLGLSVESPLSVSFASGCVALPVLMNIKAVIEQRQCTGVWNHKDELPIEIELGMKCWYHSVFACPILRQQTSDSNPPIKLICGHVISRDALNKLINGGKLKCPYCPMEQNPADGKRIIF

SEQ ID NO: 2103 - protein, 333 aa, Homo sapiens
MSQCCRKIKDTVQKLASDHKDIHSSVSRVGKAIDRNFDSEICGVVSDAVWDAREQQQQILQMAIVEHLYQQGMLSVAEELCQESTLNVDLDFKQPFLELNRILEALHEQDLGPALEWAVSHRQRLLELNSSLEFKLHRLHFIRLLAGGPAKQLEALSYARHFQPFARLHQREIQVMMGSLVYLRLGLEKSPYCHLLDSSHWAEICETFTRDACSLLGLSVESPLSVSFASGCVALPVLMNIKAVIEQRQCTGVWNHKDELPIEIELGMKCWYHSVFACPILRQQTSDSNPPIKLICGHVISRDALNKLINGGKLKCPYCPMEQNPADGKRIIF

SEQ ID NO: 2104 - protein, 533 aa, Homo sapiens
MSIQVEHPAGGYKKLFETVEELSSPLTAHVTGRIPLWLTGSLLRCGPGLFEVGSEPFYHLFDGQALLHKFDFKEGHVTYHRRFIRTDAYVRAMTEKRIVITEFGTCAFPDPCKNIFSRFFSYFRGVEVTDNALVNVYPVGEDYYACTETNFITKINPETLETIKQVDLCNYVSVNGATAHPHIENDGTVYNIGNCFGKNFSIAYNIVKIPPLQADKEDPISKSEIVVQFPCSDRFKPSYVHSFGLTPNYIVFVETPVKINLFKFLSSWSLWGANYMDCFESNETMGVWLHIADKKRKKYLNNKYRTSPFNLFHHINTYEDNGFLIVDLCCWKGFEFVYNYLYLANLRENWEEVKKNARKAPQPEVRRYVLPLNIDKADTGKNLVTLPNTTATAILCSDETIWLEPEVLFSGPRQAFEFPQINYQKYCGKPYTYAYGLGLNHFVPDRLCKLNVKTKETWVWQEPDSYPSEPIFVSHPDALEEDDGVVLSVVVSPGAGQKPAYLLILNAKDLSEVARAEVEINIPVTFHGLFKKS

SEQ ID NO: 2105 - protein, 874 aa, Homo sapiens
MGLPTLEFSDSYLDSPDFRERLQCHEIELERTNKFIKELIKDGSLLIGALRNLSMAVQKFSQSLQDFQFECIGDAETDDEISIAQSLKEFARLLIAVEEERRRLIQNANDVLIAPLEKFRKEQIGAAKDGKKKFDKESEKYYSILEKHLNLSAKKKESHLQEADTQIDREHQNFYEASLEYVFKIQEVQEKKKFEFVEPLLSFLQGLFTFYHEGYELAQEFAPYKQQLQFNLQNTRNNFESTRQEVERLMQRMKSANQDYRPPSQWTMEGYLYVQEKRPLGFTWIKHYCTYDKGSKTFTMSVSEMKSSGKMNGLVTSSPEMFKLKSCIRRKTDSIDKRFCFDIEVVERHGIITLQAFSEANRKLWLEAMDGKEPIYTLPAIISKKEEMYLNEAGFNFVRKCIQAVETRGITILGLYRIGGVNSKVQKLMNTTFSPKSPPDIDIDIELWDNKTITSGLKNYLRCLAEPLMTYKLHKDFIIAVKSDDQNYRVEAVHALVHKLPEKNREMLDILIKHLVKVSLHSQQNLMTVSNLGVIFGPTLMRAQEETVAAMMNIKFQNIVVEILIEHYEKIFHTAPDPSIPLPQPQSRSGSRRTRAICLSTGSRKPRGRYTPCLAEPDSDSYSSSPDSTPMGSIESLSSHSSEQNSTTKSASCQPREKSGGIPWIATPSSSNGQKSLGLWTTSPESSSREDATKTDAESDCQSVASVTSPGDVSPPIDLVKKEPYGLSGLKRASASSLRSISAAEGNKSYSGSIQSLTSVGSKETPKASPNPDLPPKMCRRLRLDTASSNGYQRPGSVVAAKAQLFENVGSPKPVSSGRQAKAMYSCKAEHSHELSFPQGAIFSNVYPSVEPGWLKATYEGKTGLVPENYVVFL

SEQ ID NO: 2106 - protein, 379 aa, Homo sapiens
MYNIKQSTDTKEAAAIEARRNREKERQNRFFNVRNRVMGVDVQALNNQVGDRKRREAAERSKEAAYGTSQVQYDVVVQMLEKEEADRTRQLAKKVQEFREQKQQLKNGREFSLWDPGQVWKGLPTYLSYSNTYPGPASLQYFSGEDLDRDTRLRMQQGQFRYNLERQQQEQQQAKVDENYTDALSNQLRLAMDAQATHLARLEESCRAAMMCAMANANKAQAAVQAGRQRCERQREQKANLAEIQHQSTSDLLTENPQVAQHPMAPYRVLPYCWKGMTPEQQAAIRKEQEVQRSKKQAHRQAEKTLDTEWKSQTMSSAQAVLELEEQERELCAVFQRGLGSFNQQLANEQKAQQDYLNSVIYTNQPTAQYHQQFNTSSR

SEQ ID NO: 2107 - protein, 192 aa, Homo sapiens
MYNIKQSTDTKEAAAIEARRNREKERQNRFFNVRNRVMGVDVQALNNQVGDRKRREAAERSKEAAYGTSQVQYDVVVQMLEKEEADRTRQLAKKVQEFREQKQQLKNGREFSLWDPGQVWKGLPTYLSYSNTYPGPASLQYFSGEDLDRDTRLRMQQGQFRYNLERQQQEQQQAKVDENYTGKQPGPPDSET

SEQ ID NO: 2108 - protein, 238 aa, Homo sapiens
MYNIKQSTDTKEAAAIEARRNREKERQNRFFNVRNRVMGVDVQALNNQVGDRKRREAAERSKEAAYDALSNQLRLAMDAQATHLARLEESCRAAMMCAMANANKAQAAVQAGRQRCERQREQKANLAEIQHQSTSDLLTENPQVAQHPMAPYRVLPYCWKGMTPEQQAAIRKEQEVQRSKKQAHRQAEKTLDTEWKSQTMSSAQAVLELEEQERELCAVFQRGLGSFNQQLANEQKAQ

SEQ ID NO: 2109 - protein, 269 aa, Homo sapiens
MKTPVELAVSGMQTLGLQHRCRGGYRVKARTSYVDETLFGSPAGTRPTPPDFDPPWVEKANRTRGVGKEASKALGAKGSCETTPSRGSTPTLTPRKKNKYRPISHTPSYCDESLFGSRSEGASFGAPRMAKGDAAKLRALLWTPPPTPRGSHSPRPREAPLRAIHPAGPSKTEPGPAADSQKLSMGGLHSSRPLKRGLSHSLTHLNVPSTGHPATSAPHTNGPQDLRPSTSGVTFRSPLVTSRARSVSISVPSTPRRGGATQKPKPPWK

SEQ ID NO: 2110 - protein, 177 aa, Homo sapiens
MKTPVELAVSGMQTLGLQHRCRGGYRVKARTSYVDETLFGSPAGTRPTPPDFDPPWVEKANRTRGVGKEASKALGAKGSCETTPSRGSTPTLTPRKKNKYRPISHTPSYCDESLFGSRSEGASFGAPRMAKGDAAKLRALLWTPPPTPRGSHSPRPREAPVPPTQMGLRISGLPRQG

SEQ ID NO: 2111 - protein, 293 aa, Homo sapiens
MLREPRKQGLAGRAHLLSPGTTGSMKTPVELAVSGMQTLGLQHRCRGGYRVKARTSYVDETLFGSPAGTRPTPPDFDPPWVEKANRTRGVGKEASKALGAKGSCETTPSRGSTPTLTPRKKNKYRPISHTPSYCDESLFGSRSEGASFGAPRMAKGDAAKLRALLWTPPPTPRGSHSPRPREAPLRAIHPAGPSKTEPGPAADSQKLSMGGLHSSRPLKRGLSHSLTHLNVPSTGHPATSAPHTNGPQDLRPSTSGVTFRSPLVTSRARSVSISVPSTPRRGGATQKPKPPWK

SEQ ID NO: 2112 - protein, 257 aa, Homo sapiens [sequence omitted]

SEQ ID NO: 2113 - protein, 105 aa, Homo sapiens [sequence omitted]

SEQ ID NO: 2114 - protein, 398 aa, Homo sapiens
MPVPASWPHLPSPFLLMTLLLGRLTGVAGEEELQVIQPDKSISVAAGESATLHCTVTSLIPVGPIQWFRGAGPGRELIYNQKEGHFPRVTTVSDLTKRNNMDFSIRISNITPADAGTYYCVKFRKGSPDHVEFKSGAGTELSVRAKPSAPVVSGPAARATPQHTVSFTCESHGFSPRDITLKWFKNGNELSDFQTNVDPAGDSVSYSIHSTAKVVLTREDVHSQVICEVAHVTLQGDPLRGTANLSETIRVPPTLEVTQQPVRAENQVNVTCQVRKFYPQRLQLTWLENGNVSRTETASTLTENKDGTYNWMSWLLVNVSAHRDDVKLTCQVEHDGQPAVSKSHDLKVSAHPKEQGSNTAPGPALASAAPLLIAFLLGPKVLLVVGVSVIYVYWKQKA

SEQ ID NO: 2115 - protein, 291 aa, Homo sapiens
MSMLPTFGFTQEQVACVCEVLQQGGNIERLGRFLWSLPACEHLHKNESVLKAKAVVAFHRGNFRELYKILESHQFSPHNHAKLQQLWLKAHYIEAEKLRGRPLGAVGKYRVRRKFPLPRSIWDGEETSYCFKEKSRSVLREWYAHNPYPSPREKRELAEATGLTTTQVSNWFKNRRQRDRAAEAKERENNENSNSNSHNPLNGSGKSVLGSSEDEKTPSGTPDHSSSSPALLLSPPPPGLPSLHSLGHPPGPSAVPVPVPGGGGADPLQHHHGLQDSILNPMSANLVDLGS

SEQ ID NO: 2116 - protein, 873 aa, Homo sapiens
MAEMEKEGRPPENKRSRKPAHPVKREINEEMKNFAENTMNELLGWYGYDKVELKDGEDIEFRSYPTDGESRQHISVLKENSLPKPKLPEDSVISPYNISTGYSGLATGNGLSDSPAGSKDHGSVPIIVPLIPPPFIKPPAEDDVSNVQIMCAWCQKVGIKRYSLSMGSEVKSFCSEKCFAACRRAYFKRNKARDEDGHAENFPQQHYAKETPRLAFKNNCELLVCDWCKHIRHTKEYLDFGDGERRLQFCSAKCLNQYKMDIFYKETQANLPAGLCSTLHPPMENKAEGTGVQLLTPDSWNIPLTDARRKAPSPVATAGQSQGPGPSASTTVSPSDTANCSVTKIPTPVPKSIPISETPNIPPVSVQPPASIGPPLGVPPRSPPMVMTNRGPVPLPIFMEQQIMQQIRPPFIRGPPHHASNPNSPLSNPMLPGIGPPPGGPRNLGPTSSPMHRPMLSPHIHPPSTPTMPGNPPGLLPPPPPGAPLPSLPFPPVSMMPNGPMPVPQMMNFGLPSLAPLVPPPTLLVPYPVIVPLPVPIPIPIPIPHVSDSKPPNGFSSNGENFIPNAPGDSAAAGGKPSGHSLSPRDSKQGSSKSADSPPGCSGQALSLAPTPAEHGRSEVVDLTRRAGSPPGPPGAGGQLGFPGVLQGPQDGVIDLTVGHRARLHNVIHRALHAHVKAEREPSAAERRTCGGCRDGHCSPPAAGDPGPGAPAGPEAAAACNVIVNGTRGAAAEGAKSAEPPPEQPPPPPPPAPPKKLLSPEEPAVSELESVKENNCASNCHLDGEAAKKLMGEEALAGGDKSDPNLNNPADEDHAYALRMLPKTGCVIQPVPKPAEKAAMAPCIISSPMLSAGPEDLEPPLKRRCLRIRNQNK

SEQ ID NO: 2117 - protein, 414 aa, Homo sapiens
MNPTLGLAIFLAVLLTVKGLLKPSFSPRNYKALSEVQGWKQRMAAKELARQNMDLGFKLLKKLAFYNPGRNIFLSPLSISTAFSMLCLGAQDSTLDEIKQGFNFRKMPEKDLHEGFHYIIHELTQKTQDLKLSIGNTLFIDQRLQPQRKFLEDAKNFYSAETILTNFQNLEMAQKQINDFISQKTHGKINNLIENIDPGTVMLLANYIFFRARWKHEFDPNVTKEEDFFLEKNSSVKVPMMFRSGIYQVGYDDKLSCTILEIPYQKNITAIFILPDEGKLKHLEKGLQVDTFSRWKTLLSRRVVDVSVPRLHMTGTFDLKKTLSYIGVSKIFEEHGDLTKIAPHRSLKVGEAVHKAELKMDERGTEGAAGTGAQTLPMETPLVVKIDKPYLLLIYSEKIPSVLFLGKIVNPIGK

SEQ ID NO: 2118 - protein, 387 aa, Homo sapiens
MPVPASWPHPPGPFLLLTLLLGLTEVAGEEELQMIQPEKLLLVTVGKTATLHCTVTSLLPVGPVLWFRGVGPGRELIYNQKEGHFPRVTTVSDLTKRNNMDFSIRISSITPADVGTYYCVKFRKGSPENVEFKSGPGTEMALGAKPSAPVVLGPAARTTPEHTVSFTCESHGFSPRDITLKWFKNGNELSDFQTNVDPTGQSVAYSIRSTARVVLDPWDVRSQVICEVAHVTLQGDPLRGTANLSEAIRVPPTLEVTQQPMRVGNQVNVTCQVRKFYPQSLQLTWSENGNVCQRETASTLTENKDGTYNWTSWFLVNISDQRDDVVLTCQVKHDGQLAVSKRLALEVTVHQKDQSSDATPGPASSLTALLLIAVLLGPIYVPWKQKT

SEQ ID NO: 2119 - protein, 354 aa, Homo sapiens
MIQPEKLLLVTVGKTATLHCTVTSLLPVGPVLWFRGVGPGRELIYNQKEGHFPRVTTVSDLTKRNNMDFSIRISSITPADVGTYYCVKFRKGSPENVEFKSGPGTEMALGAKPSAPVVLGPAARTTPEHTVSFTCESHGFSPRDITLKWFKNGNELSDFQTNVDPTGQSVAYSIRSTARVVLDPWDVRSQVICEVAHVTLQGDPLRGTANLSEAIRVPPTLEVTQQPMRVGNQVNVTCQVRKFYPQSLQLTWSENGNVCQRETASTLTENKDGTYNWTSWFLVNISDQRDDVVLTCQVKHDGQLAVSKRLALEVTVHQKDQSSDATPGPASSLTALLLIAVLLGPIYVPWKQKT

SEQ ID NO: 2120 - protein, 170 aa, Homo sapiens
MPVPASWPHPPGPFLLLTLLLGLTEVAGEEELQMIQPEKLLLVTVGKTATLHCTVTSLLPVGPVLWFRGVGPGRELIYNQKEGHFPRVTTVSDLTKRNNMDFSIRISSITPADVGTYYCVKFRKGSPENVEFKSGPGTEMALGGPASSLTALLLIAVLLGPIYVPWKQKT

SEQ ID NO: 2121 - protein, 276 aa, Homo sapiens
MPVPASWPHPPGPFLLLTLLLGLTEVAGEEELQMIQPEKLLLVTVGKTATLHCTVTSLLPVGPVLWFRGVGPGRELIYNQKEGHFPRVTTVSDLTKRNNMDFSIRISSITPADVGTYYCVKFRKGSPENVEFKSGPGTEMALGAKPSAPVVLGPAARTTPEHTVSFTCESHGFSPRDITLKWFKNGNELSDFQTNVDPTGQSVAYSIRSTARVVLDPWDVRSQVICEVAHVTLQGDPLRGTANLSEAIRGPASSLTALLLIAVLLGPIYVPWKQKT

SEQ ID NO: 2122 - protein, 682 aa, Homo sapiens
MQLEHCLSPSIMLSKKFLNVSSSYPHSGGSELVLHDHPIISTTDNLERSSPLKKITRGMTNQSDTDNFPDSKDSPGDVQRSKLSPVLDGVSELRHSFDGSAADRYLLSQSSQPQSAATAPSAMFPYPGQHGPAHPAFSIGSPSRYMAHHPVITNGAYNSLLSNSSPQGYPTAGYPYPQQYGHSYQGAPFYQFSSTQPGLVPGKAQVYLCNRPLWLKFHRHQTEMIITKQGRRMFPFLSFNISGLDPTAHYNIFVDVILADPNHWRFQGGKWVPCGKADTNVQGNRVYMHPDSPNTGAHWMRQEISFGKLKLTNNKGASNNNGQMVVLQSLHKYQPRLHVVEVNEDGTEDTSQPGRVQTFTFPETQFIAVTAYQNTDITQLKIDHNPFAKGFRDNYDTIYTGCDMDRLTPSPNDSPRSQIVPGARYAMAGSFLQDQFVSNYAKARFHPGAGAGPGPGTDRSVPHTNGLLSPQQAEDPGAPSPQRWFVTPANNRLDFAASAYDTATDFAGNAATLLSYAAAGVKALPLQAAGCTGRPLGYYADPSGWGARSPPQYCGTKSGSVLPCWPNSAAAAARMAGANPYLGEEAEGLAAERSPLPPGAAEDAKPKDLSDSSWIETPSSIKSIDSSDSGIYEQAKRRRISPADTPVSESSSPLKSEVLAQRDCEKNCAKDISGYYGFYSHS

SEQ ID NO: 2123 - protein, 395 aa, Homo sapiens
MHPDSPNTGAHWMRQEISFGKLKLTNNKGASNNNGQMVVLQSLHKYQPRLHVVEVNEDGTEDTSQPGRVQTFTFPETQFIAVTAYQNTDITQLKIDHNPFAKGFRDNYDTIYTGCDMDRLTPSPNDSPRSQIVPGARYAMAGSFLQDQFVSNYAKARFHPGAGAGPGPGTDRSVPHTNGLLSPQQAEDPGAPSPQRWFVTPANNRLDFAASAYDTATDFAGNAATLLSYAAAGVKALPLQAAGCTGRPLGYYADPSGWGARSPPQYCGTKSGSVLPCWPNSAAAAARMAGANPYLGEEAEGLAAERSPLPPGAAEDAKPKDLSDSSWIETPSSIKSIDSSDSGIYEQAKRRRISPADTPVSESSSPLKSEVLAQRDCEKNCAKDISGYYGFYSHS

SEQ ID NO: 2124 - protein, 162 aa, Homo sapiens
MSDTAVADTRRLNSKPQDLTDAYGPPSNFLEIDIFNPQTVGVGRARFTTYEVRMRTNLPIFKLKESCVRRRYSDFEWLKNELERDSKIVVPPLPGKALKRQLPFRGDEGIFEESFIEERRQGLEQFINKIAGHPLAQNERCLHMFLQEEAIDRNYVPGKVRQ

SEQ ID NO: 2125 - protein, 172 aa, Homo sapiens
MSDTAVADTRRLNSKPQDLTDAYGPPSNFLEIDIFNPQTVGVGRARFTTYEVRMRTNLPIFKLKESCVRRRYSDFEWLKNELERDSKIVVPPLPGKALKRQLPFRGDEGIFEESFIEERRQGLEQFINKIAGHPLAQNERCLHMFLQEEAIDRNYVPGKSLAVSCPGWSAVA

SEQ ID NO: 2126 - protein, 158 aa, Homo sapiens
MSDTAVADTRRLNSKPQDLTDAYGPPSNFLEIDIFNPQTVGVGRARFTTYETNLPIFKLKESCVRRRYSDFEWLKNELERDSKIVVPPLPGKALKRQLPFRGDEGIFEESFIEERRQGLEQFINKIAGHPLAQNERCLHMFLQEEAIDRNYVPGKVRQ

SEQ ID NO: 2127 - protein, 485 aa, Homo sapiens
METNESTEGSRSRSRSLDIQPSSEGLGPTSEPFPSSDDSPRSALAAATAAAAAAASAAAATAAFTTAKAAALSTKTPAPCSEFMEPSSDPSLLGEPCAGPGFTHNIAHGSLGFEPVYVSCIAQDTCTTTDHSSNPGPVPGSSSGPVLGSSSGAGHGSGSGSGPGCGSVPGSGSGPGPGSGPGSGPGHGSGSHPGPASGPGPDTGPDSELSPCIPPGFRNLVADRVPNYTSWSQHCPWEPQKQPPWEFLQVLEPGARGLWKPPDIKGKLMVCYETLPRGQCLLYNWEEERATNHLDQVPSMQDGSESFFFRHGHRGLLTMQLKSPMPSSTTQKDSYQPPGNVYWPLRGKREAMLEMLLQHQICKEVQAEQEPTRKLFEVESVTHHDYRMELAQAGTPAPTKPHDYRQEQPETFWIQRAPQLPGVSNIRTLDTPFRKNCSFSTPVPLSLGKLLPYEPENYPYQLGEISSLPCPGGRLGGGGGRMTPF

SEQ ID NO: 2128 - protein, 426 aa, Homo sapiens
METNESTEGSRSRSRSLDIQPSSEGLGPTSEPFPSSDDSPRSALAAATAAAAAAASAAAATAAFTTAKAAALSTKTPAPCSEFMEPSSDPSLLGEPCAGPGFTHNIAHGSLGFEPVYVSCIAQDTCTTTDHSSNPGPVPGSSSGPVLGSSSGAGHGSGSGSGPGCGSVPGSGSGPGPGSGPGSGPGHGSGSHPGPASGPGPDTGPDSELSPCIPPGFRNLVADRVPNYTSWSQHCPWEPQKQPPWEFLQVLEPGARGLWKPPDIKGKLMVCYETLPRGQCLLYNWEEERATNHLDQVPSMQDGSESFFFRHGHRGLLTMQLKSPMPSSTTQKDSYQPPGNVYWPLRGKREAMLEMLLQHQICKEVQAEQEPTRKLFEVESVTHHDYRMELAQAGTPAPTKPHDYRQEQPETFWIQRAPQLPVCEGD

SEQ ID NO: 2129 - protein, 501 aa, Homo sapiens
METNESTEGSRSRSRSLDIQPSSEGLGPTSEPFPSSDDSPRSALAAATAAAAAAASAAAATAAFTTAKAAALSTKTPAPCSEFMEPSSDPSLLGEPCAGPGFTHNIAHGSLGFEPVYVSCIAQDTCTTTDHSSNPGPVPGSSSGPVLGSSSGAGHGSGSGSGPGCGSVPGSGSGPGPGSGPGSGPGHGSGSHPGPASGPGPDTGPDSELSPCIPPGFRNLVADRVPNYTSWSQHCPWEPQKQPPWEFLQVLEPGARGLWKPPDIKGKLMVCYETLPRGQCLLYNWEEERATNHLDQVPSMQDGSESFFFRHGHRGLLTMQLKSPMPSSTTQKDSYQPPGNVYWPLRGKREAMLEMLLQHQICKEVQAEQEPTRKLFEVESVTHHDYRMELAQAGTPAPTKPHDYRQEQPETFWIQRAPQLPTWWPLPTQVPAAEDYLTWKEWGFTGVQEVLSALLRATPGEYSVNICGMNEHPVCSRTWTNRLCHQEMGSKKTVTQEDRGW

SEQ ID NO: 2130 - protein, 545 aa, Homo sapiens
MSRKQNQKDSSGFIFDLQSNTVLAQGGAFENMKEKINAVRAIVPNKSNNEIILVLQHFDNCVDKTVQAFMEGSASEVLKEWTVTGKKKNKKKKNKPKPAAEPSNGIPDSSKSVSIQEEQSAPSSEKGGMNGYHVNGAINDTESVDSLSEGLETLSIDARELEDPESAMLDTLDRTGSMLQNGVSDFETKSLTMHSIHNSQQPRNAAKSLSRPTTETQFSNMGMEDVPLATSKKLSSNIEKSVKDLQRCTVSLARYRVVVKEEMDASIKKMKQAFAELESCLMDREVALLAEMDKVKAEAMEILLSRQKKAELLKKMTHVAVQMSEQQLVELRADIKHFVSERKYDEDLGRVARFTCDVETLKKSIDSFGQVSHPKNSYSTRSRCSSVTSVSLSSPSDASAASSSTCASPPSLTSANKKNFAPGETPAAIANSSGQPYQPLREVLPGNRRGGQGYRPQGQKSNDPMNQGRHDSMGRYRNSSWYSSGSRYQSAPSQAPGNTIERGQTHSAGTNGTGVSMEPSPPTPSFKKGLPQRKPRTSQTEAVNS

SEQ ID NO: 2131 - protein, 201 aa, Homo sapiens
MFPEQQKEEFVSVWVRDPRIQKEDFWHSYIDYEICIHTNSMCFTMKTSCVRRRYREFVWLRQRLQSNALLVQLPELPSKNLFFNMNNRQHVDQRRQGLEDFLRKVLQNALLLSDSSLHLFLQSHLNSEDIEACVSGQTKYSVEEAIHKFALMNRRFPEEDEEGKKENDIDYDSESSSSGLGHSSDDSSSHGCKVNTAPQES

SEQ ID NO: 2132 - protein, 117 aa, Homo sapiens
MNNRQHVDQRRQGLEDFLRKVLQNALLLSDSSLHLFLQSHLNSEDIEACVSGQTKYSVEEAIHKFALMNRRFPEEDEEGKKENDIDYDSESSSSGLGHSSDDSSSHGCKVNTAPQES

SEQ ID NO: 2133 - protein, 411 aa, Homo sapiens
MSKRPSYAPPPTPAPATQMPSTPGFVGYNPYSHLAYNNYRLGGNPGTNSRVTASSGITIPKPPKPPDKPLMPYMRYSRKVWDQVKASNPDLKLWEIGKIIGGMWRDLTDEEKQEYLNEYEAEKIEYNESMKAYHNSPAYLAYINAKSRAEAALEEESRQRQSRMEKGEPYMSIQPAEDPDDYDDGFSMKHTATARFQRNHRLISEILSESVVPDVRSVVTTARMQVLKRQVQSLMVHQRKLEAELLQIEERHQEKKRKFLESTDSFNNELKRLCGLKVEVDMEKIAAEIAQAEEQARKRQEEREKEAAEQAERSQSSIVPEEEQAANKGEEKKDDENIPMETEETHLEETTESQQNGEEGTSTPEDKESGQEGVDSMAEEGTSDSNTGSESNSATVEEPPTDPIPEDEKKE

SEQ ID NO: 2134 - protein, 363 aa, Homo sapiens
MSKRPSYAPPPTPAPATQMPSTPGFVGYNPYSHLAYNNYRLGGNPGTNSRVTASSGITIPKPPKPPDKPLMPYMRYSRKVWDQVKASNPDLKLWEIGKIIGGMWRDLTDEEKQEYLNEYEAEKIEYNESMKAYHNSPAYLAYINAKSRAEAALEEESRQRQSRMEKGEPYMSIQPAEDPDDYDDGFSMKHTATARFQRNHRLISEILSESVVPDVRSVVTTARMQVLKRQVQSLMVHQRKLEAELLQIEERHQEKKRKFLESTDSFNNELKRLCGLKVEVDMEKIAAEIAQAEEQARKRQEEREKEAAEQAERSQSSIVPEEEQAANKGEEKKDDENIPMETEKNCQLCPRKTLTSRYTDFPD

SEQ ID NO: 2135 - protein, 341 aa, Homo sapiens
MPYMRYSRKVWDQVKASNPDLKLWEIGKIIGGMWRDLTDEEKQEYLNEYEAEKIEYNESMKAYHNSPAYLAYINAKSRAEAALEEESRQRQSRMEKGEPYMSIQPAEDPDDYDDGFSMKHTATARFQRNHRLISEILSESVVPDVRSVVTTARMQVLKRQVQSLMVHQRKLEAELLQIEERHQEKKRKFLESTDSFNNELKRLCGLKVEVDMEKIAAEIAQAEEQARKRQEEREKEAAEQAERSQSSIVPEEEQAANKGEEKKDDENIPMETEETHLEETTESQQNGEEGTSTPEDKESGQEGVDSMAEEGTSDSNTGSESNSATVEEPPTDPIPEDEKKE

SEQ ID NO: 2136 - protein, 376 aa, Homo sapiens
MSKRPSYAPPPTPAPATASSGITIPKPPKPPDKPLMPYMRYSRKVWDQVKASNPDLKLWEIGKIIGGMWRDLTDEEKQEYLNEYEAEKIEYNESMKAYHNSPAYLAYINAKSRAEAALEEESRQRQSRMEKGEPYMSIQPAEDPDDYDDGFSMKHTATARFQRNHRLISEILSESVVPDVRSVVTTARMQVLKRQVQSLMVHQRKLEAELLQIEERHQEKKRKFLESTDSFNNELKRLCGLKVEVDMEKIAAEIAQAEEQARKRQEEREKEAAEQAERSQSSIVPEEEQAANKGEEKKDDENIPMETEETHLEETTESQQNGEEGTSTPEDKESGQEGVDSMAEEGTSDSNTGSESNSATVEEPPTDPIPEDEKKE

SEQ ID NO: 2137 - protein, 328 aa, Homo sapiens
MSKRPSYAPPPTPAPATASSGITIPKPPKPPDKPLMPYMRYSRKVWDQVKASNPDLKLWEIGKIIGGMWRDLTDEEKQEYLNEYEAEKIEYNESMKAYHNSPAYLAYINAKSRAEAALEEESRQRQSRMEKGEPYMSIQPAEDPDDYDDGFSMKHTATARFQRNHRLISEILSESVVPDVRSVVTTARMQVLKRQVQSLMVHQRKLEAELLQIEERHQEKKRKFLESTDSFNNELKRLCGLKVEVDMEKIAAEIAQAEEQARKRQEEREKEAAEQAERSQSSIVPEEEQAANKGEEKKDDENIPMETEKNCQLCPRKTLTSRYTDFPD

SEQ ID NO: 2138 - protein, 293 aa, Homo sapiens
MPYMRYSRKVWDQVKASNPDLKLWEIGKIIGGMWRDLTDEEKQEYLNEYEAEKIEYNESMKAYHNSPAYLAYINAKSRAEAALEEESRQRQSRMEKGEPYMSIQPAEDPDDYDDGFSMKHTATARFQRNHRLISEILSESVVPDVRSVVTTARMQVLKRQVQSLMVHQRKLEAELLQIEERHQEKKRKFLESTDSFNNELKRLCGLKVEVDMEKIAAEIAQAEEQARKRQEEREKEAAEQAERSQSSIVPEEEQAANKGEEKKDDENIPMETEKNCQLCPRKTLTSRYTDFPD

SEQ ID NO: 2139 - protein, 385 aa, Homo sapiens
MMMMALSKTFGQKPVKFQLEDDGEFYMIGSEVGNYLRMFRGSLYKRYPSLWRRLATVEERKKIVASSHGKKTKPNTKDHGYTTLATSVTLLKASEVEEILDGNDEKYKAVSISTEPPTYLREQKAKRNSQWVPTLPNSSHHLDAVPCSTTINRNRMGRDKKRTFPLCFDDHDPAVIHENASQPEVLVPIRLDMEIDGQKLRDAFTWNMNEKLMTPEMFSEILCDDLDLNPLTFVPAIASAIRQQIESYPTDSILEDQSDQRVIIKLNIHVGNISLVDQFEWDMSEKENSPEKFALKLCSELGLGGEFVTTIAYSIRGQLSWHQKTYAFSENPLPTVEIAIRNTGDADQWCPLLETLTDAEMEKKIRDQDRNTRRMRRLANTAPAW

SEQ ID NO: 2140 - protein, 376 aa, Homo sapiens
MMMMALSKTFGQKPVKFQLEDDGEFYMIGSEVGNYLRMFRGSLYKRYPSLWRRLATVEERKKIVASSHDHGYTTLATSVTLLKASEVEEILDGNDEKYKAVSISTEPPTYLREQKAKRNSQWVPTLPNSSHHLDAVPCSTTINRNRMGRDKKRTFPLCFDDHDPAVIHENASQPEVLVPIRLDMEIDGQKLRDAFTWNMNEKLMTPEMFSEILCDDLDLNPLTFVPAIASAIRQQIESYPTDSILEDQSDQRVIIKLNIHVGNISLVDQFEWDMSEKENSPEKFALKLCSELGLGGEFVTTIAYSIRGQLSWHQKTYAFSENPLPTVEIAIRNTGDADQWCPLLETLTDAEMEKKIRDQDRNTRRMRRLANTAPAW

SEQ ID NO: 2141 - protein, 289 aa, Homo sapiens
MPQEQYTHHRSTMPGSVGPQVYKVGIYGWRKRCLYFFVLLLMILILVNLAMTIWILKVMNFTIDGMGNLRITEKGLKLEGDSEFLQPLYAKEIQSRPGNALYFKSARNVTVNILNDQTKVLTQLITGPKAVEAYGKKFEVKTVSGKLLFSADNNEVVVGAERLRVLGAEGTVFPKSIETPNVRADPFKELRLESPTRSLVMEAPKGVEINAEAGNMEATCRTELRLESKDGEIKLDAAKIRLPRLPHGSYTPTGTRQKVFEICVCANGRLFLSQAGAGSTCQINTSVCL

SEQ ID NO: 2142 - protein, 290 aa, Homo sapiens
MMPQEQYTHHRSTMPGSVGPQVYKVGIYGWRKRCLYFFVLLLMILILVNLAMTIWILKVMNFTIDGMGNLRITEKGLKLEGDSEFLQPLYAKEIQSRPGNALYFKSARNVTVNILNDQTKVLTQLITGPKAVEAYGKKFEVKTVSGKLLFSADNNEVVVGAERLRVLGAEGTVFPKSIETPNVRADPFKELRLESPTRSLVMEAPKGVEINAEAGNMEATCRTELRLESKDGEIKLDAAKIRLPRLPHGSYTPTGTRQKVFEICVCANGRLFLSQAGAGSTCQINTSVCL

SEQ ID NO: 2143 - protein, 256 aa, Homo sapiens
MMPQEQYTHHRSTMPGSVGPQVYKVGIYGWRKRCLYFFVLLLMILILVNLAMTIWILKVMNFTIDGMGNLRITEKGLKLEGDSEFLQPLYAKEIQSRPGNALYFKSARNVTVNILNDQTKVLTQLITGPKAVEAYGKKFEVKTVSGKLLFSADNNEVVVGAERLRVLGAEGTVFPKSIETPNVRADPFKELRLESPTRSLVMEAPKGVEINAEAGNMEATCRTELRLESKDGEVRDEKDRSSKSYSFNRPTLPITG

SEQ ID NO: 2144 - protein, 141 aa, Homo sapiens
MEQPTSSTNGEKTKSPCESNNKKNDEMQEVPNRVLAPEQSLKKTKTSEYPIIFVYYLRKGKKINSNQLENEQSQENSINPIQKEEDEGVDLSEGSSNEDEDLGPCEGPSKEDKDLDSSEGSSQEDEDLGLSEGSSQDSGED

SEQ ID NO: 2145 - protein, 392 aa, Homo sapiens
MSREPTPPLPGDMSTGPIAESWCYTQVKVVKFSYMWTINNFSFCREEMGEVLKSSTFSSGPSDKMKWCLRVNPKGLDDESKDYLSLYLLLVSCPKSEVRAKFKFSLLNAKREETKAMESQRAYRFVQGKDWGFKKFIRRDFLLDEANGLLPDDKLTLFCEVSVVQDSVNISGHTNTNTLKVPECRLAEDLGNLWENTRFTDCSFFVRGQEFKAHKSVLAARSPVFNAMFEHEMEESKKNRVEINDLDPEVFKEMMRFIYTGRAPNLDKMADNLLAAADKYALERLKVMCEEALCSNLSVENVADTLVLADLHSAEQLKAQAIDFINRCSVLRQLGCKDGKNWNSNQATDIMETSGWKSMIQSHPHLVAEAFRALASAQCPQFGIPRKRLKQS

SEQ ID NO: 2146 - protein, 374 aa, Homo sapiens
MSRVPSPPPPAEMSSGPVAESWCYTQIKVVKFSYMWTINNFSFCREEMGEVIKSSTFSSGANDKLKWCLRVNPKGLDEESKDYLSLYLLLVSCPKSEVRAKFKFSILNAKGEETKAMESQRAYRFVQGKDWGFKKFIRRDFLLDEANGLLPDDKLTLFCEVSVVQDSVNISGQNTMNMVKVPECRLADELGGLWENSRFTDCCLCVAGQEFQAHKAILAARSPVFSAMFEHEMEESKKNRVEINDVEPEVFKEMMCFIYTGKAPNLDKMADDLLAAADKYALERLKVMCEDALCSNLSVENAAEILILADLHSADQLKTQAVDFINYHASDVLETSGWKSMVVSHPHLVAEAYRSLASAQCPFLGPPRKRLKQS

SEQ ID NO: 2147 - protein, 684 aa, Homo sapiens
MACLGFLLPVGFLLLISTVAGGKYGVAHVVSENWSKDYCILFSSDYITLPRDLHHAPLLPLYDGTKAPWCPGEDSPHQAQLRSPSQRPLRQTTAMVMRGNCSFHTKGWLAQGQGAHGLLIVSRVSDQQCSDTTLAPQDPRQPLADLTIPVAMLHYADMLDILSHTRGEAVVRVAMYAPPEPIIDYNMLVIFILAVGTVAAGGYWAGLTEANRLQRRRARRGGGSGGHHQLQEAAAAEGAQKEDNEDIPVDFTPAMTGVVVTLSCSLMLLLYFFYDHFVYVTIGIFGLGAGIGLYSCLSPLVCRLSLRQYQRPPHSLWASLPLPLLLLASLCATVIIFWVAYRNEDRWAWLLQDTLGISYCLFVLHRVRLPTLKNCSSFLLALLAFDVFFVFVTPFFTKTGESIMAQVALGPAESSSHERLPMVLKVPRLRVSALTLCSQPFSILGFGDIVVPGFLVAYCCRFDVQVCSRQIYFVACTVAYAVGLLVTFMAMVLMQMGQPALLYLVSSTLLTSLAVAACRQELSLFWTGQGRAKMCGLGCAPSAGSRQKQEGAADAHTASTLERGTSRGAGDLDSNPGEDTTEIVTISENEATNPEDRSDSSEGWSDAHLDPNELPFIPPGASEELMPLMPMAMLIPLMPLMPPPSELGHVHAQAQAHETGLPWAGLHKRKGLKVRKSMSTQAPL

SEQ ID NO: 2148 - protein, 405 aa, Homo sapiens
MDTIFLWSLLLLFFGSQASRCSAQKNTEFAVDLYQEVSLSHKDNIIFSPLGITLVLEMVQLGAKGKAQQQIRQTLKQQETSAGEEFFVLKSFFSAISEKKQEFTFNLANALYLQEGFTVKEQYLHGNKEFFQSAIKLVDFQDAKACAEMISTWVERKTDGKIKDMFSGEEFGPLTRLVLVNAIYFKGDWKQKFRKEDTQLINFTKKNGSTVKIPMMKALLRTKYGYFSESSLNYQVLELSYKGDEFSLIIILPAEGMDIEEVEKLITAQQILKWLSEMQEEEVEISLPRFKVEQKVDFKDVLYSLNITEIFSGGCDLSGITDSSEVYVSQVTQKVFFEINEDGSEAATSTGIHIPVIMSLAQSQFIANHPFLFIMKHNPTESILFMGRVTNPDTQEIKGRDLDSL

SEQ ID NO: 2149 - protein, 238 aa, Homo sapiens
MSKAAPAKKPVAVAPAPGCTLDINDPQVQSAAIRIQASYRGHRSRKELREKGPPRVLEPLKDVVLIEGSAAKLTCRISAFPDPFIRWSKDGKELRDGPKYRYVFEDPDVVALVVRDGELADLGQYSINVTNPFGQCSDSARILVEVPTKIQKGPDNTKARKGTTVTLTAEILGEPAPDVGWTKDGEDIEEDDRVFFEIGSTTTTLTIRRATPQDSGKYEVYVENSLGMDQSFARVDVA

SEQ ID NO: 2150 - protein, 451 aa, Homo sapiens
MVGSALRRGAHAYVYLVSKASHISRGHQHQAWGSRPPAAECATQRAPGSVVELLGKSYPQDDHSNLTRKVLTRVGRNLHNQQHHPLWLIKERVKEHFYKQYVGRFGTPLFSVYDNLSPVVTTWQNFDSLLIPADHPSRKKGDNYYLNRTHMLRAHTSAHQWDLLHAGLDAFLVVGDVYRRDQIDSQHYPIFHQLEAVRLFSKHELFAGIKDGESLQLFEQSSRSAHKQETHTMEAVKLVEFDLKQTLTRLMAHLFGDELEIRWVDCYFPFTHPSFEMEINFHGEWLEVLGCGVMEQQLVNSAGAQDRIGWAFGLGLERLAMILYDIPDIRLFWCEDERFLKQFCVSNINQKVKFQPLSKYPAVINDISFWLPSENYAENDFYDLVRTIGGDLVEKVDLIDKFVHPKTHKTSHCYRITYRHMERTLSQREVRHIHQALQEAAVQLLGVEGRF

SEQ ID NO: 2151 - protein, 1749 aa, Homo sapiens
MADEEAGGTERMEISAELPQTPQRLASWWDQQVDFYTAFLHHLAQLVPEIYFAEMDPDLEKQEESVQMSIFTPLEWYLFGEDPDICLEKLKHSGAFQLCGRVFKSGETTYSCRDCAIDPTCVLCMDCFQDSVHKNHRYKMHTSTGGGFCDCGDTEAWKTGPFCVNHEPGRAGTIKENSRCPLNEEVIVQARKIFPSVIKYVVEMTIWEEEKELPPELQIREKNERYYCVLFNDEHHSYDHVIYSLQRALDCELAEAQLHTTAIDKEGRRAVKAGAYAACQEAKEDIKSHSENVSQHPLHVEVLHSEIMAHQKFALRLGSWMNKIMSYSSDFRQIFCQACLREEPDSENPCLISRLMLWDAKLYKGARKILHELIFSSFFMEMEYKKLFAMEFVKYYKQLQKEYISDDHDRSISITALSVQMFTVPTLARHLIEEQNVISVITETLLEVLPEYLDRNNKFNFQGYSQDKLGRVYAVICDLKYILISKPTIWTERLRMQFLEGFRSFLKILTCMQGMEEIRRQVGQHIEVDPDWEAAIAIQMQLKNILLMFQEWCACDEELLLVAYKECHKAVMRCSTSFISSSKTVVQSCGHSLETKSYRVSEDLVSIHLPLSRTLAGLHVRLSRLGAVSRLHEFVSFEDFQVEVLVEYPLRCLVLVAQVVAEMWRRNGLSLISQVFYYQDVKCREEMYDKDIIMLQIGASLMDPNKFLLLVLQRYELAEAFNKTISTKDQDLIKQYNTLIEEMLQVLIYIVGERYVPGVGNVTKEEVTMREIIHLLCIEPMPHSAIAKNLPENENNETGLENVINKVATFKKPGVSGHGVYELKDESLKDFNMYFYHYSKTQHSKAEHMQKKRRKQENKDEALPPPPPPEFCPAFSKVINLLNCDIMMYILRTVFERAIDTDSNLWTEGMLQMAFHILALGLLEEKQQLQKAPEEEVTFDFYHKASRLGSSAMNIQMLLEKLKGIPQLEGQKDMITWILQMFDTVKRLREKSCLIVATTSGSESIKNDEITHDKEKAERKRKAEAARLHRQKIMAQMSALQKNFIETHKLMYDNTSEMPGKEDSIMEEESTPAVSDYSRIALGPKRGPSVTEKEVLTCILCQEEQEVKIENNAMVLSACVQKSTALTQHRGKPIELSGEALDPLFMDPDLAYGTYTGSCGHVMHAVCWQKYFEAVQLSSQQRIHVDLFDLESGEYLCPLCKSLCNTVIPIIPLQPQKINSENADALAQLLTLARWIQTVLARISGYNIRHAKGENPIPIFFNQGMGDSTLEFHSILSFGVESSIKYSNSIKEMVILFATTIYRIGLKVPPDERDPRVPMLTWSTCAFTIQAIENLLGDEGKPLFGALQNRQHNGLKALMQFAVAQRITCPQVLIQKHLVRLLSVVLPNIKSEDTPCLLSIDLFHVLVGAVLAFPSLYWDDPVDLQPSSVSSSYNHLYLFHLITMAHMLQILLTVDTGLPLAQVQEDSEEAHSASSFFAEISQYTSGSIGCDIPGWYLWVSLKNGITPYLRCAALFFHYLLGVTPPEELHTNSAEGEYSALCSYLSLPTNLFLLFQEYWDTVRPLLQRWCADPALLNCLKQKNTVVRYPRKRNSLIELPDDYSCLLNQASHFRCPRSADDERKHPVLCLFCGAILCSQNICCQEIVNGEEVGACIFHALHCGAGVCIFLKIRECRVVLVEGKARGCAYPAPYLDEYGETDPGLKRGNPLHLSRERYRKLHLVWQQHCIIEEIARSQETNQMLFGFNWQLL

SEQ ID NO: 2152 - protein, 803 aa, Homo sapiens
MADEEAGGTERMEISAELPQTPQRLASWWDQQVDFYTAFLHHLAQLVPEIYFAEMDPDLEKQEESVQMSIFTPLEWYLFGEDPDICLEKLKHSGAFQLCGRVFKSGETTYSCRDCAIDPTCVLCMDCFQDSVHKNHRYKMHTSTGGGFCDCGDTEAWKTGPFCVNHEPGRAGTIKENSRCPLNEEVIVQARKIFPSVIKYVVEMTIWEEEKELPPELQIREKNERYYCVLFNDEHHSYDHVIYSLQRALDCELAEAQLHTTAIDKEGRRAVKAGAYAACQEAKEDIKSHSENVSQHPLHVEVLHSEIMAHQKFALRLGSWMNKIMSYSSDFRQIFCQACLREEPDSENPCLISRLMLWDAKLYKGARKILHELIFSSFFMEMEYKKLFAMEFVKYYKQLQKEYISDDHDRSISITALSVQMFTVPTLARHLIEEQNVISVITETLLEVLPEYLDRNNKFNFQGYSQDKLGRVYAVICDLKYILISKPTIWTERLRMQFLEGFRSFLKILTCMQGMEEIRRQVGQHIEVDPDWEAAIAIQMQLKNILLMFQEWCACDEELLLVAYKECHKAVMRCSTSFISSSKTVVQSCGHSLETKSYRVSEDLVSIHLPLSRTLAGLHVRLSRLGAVSRLHEFVSFEDFQVEVLVEYPLRCLVLVAQVVAEMWRRNGLSLISQVFYYQDVKCREEMYDKDIIMLQIGASLMDPNKFLLLVLQRYELAEAFNKTISTKDQDLIKQYNTLIEEMLQVLIYIVGERYVPGVGNVTKEEVTMREIIHLLCIEPMPHSAIAKNLPENETRCIRPWSL

SEQ ID NO: 2153 - protein, 538 aa, Homo sapiens
MGLLLLVLILTPSLAAYRHPDFPLLEKAQQLLQSTGSPYSTNCWLCTSSSTETPGTAYPASPREWTSIEAELHISYRWDPNLKGLMRPANSLLSTVKQDFPDIRQKPPIFGPIFTNINLMGIAPICVMAKRKNGTNVGTLPSTVCNVTFTVDSNQQTYQTYTHNQFRHQPRFPKPPNITFPQGTLLDKSSRFCQGRPSSCSTRNFWFRPADYNQCLQISNLSSTAEWVLLDQTRNSLFWENKTKGANQSQTPCVQVLAGMTIATSYLGISAVSEFFGTSLTPLFHFHISTCLKTQGAFYICGQSIHQCLPSNWTGTCTIGYVTPDIFIAPGNLSLPIPIYGNSPLPRVRRAIHFIPLLAGLGILAGTGTGIAGITKASLTYSQLSKEIANNIDTMAKALTTMQEQIDSLAAVVLQNRRGLDMLTAAQGGICLALDEKCCFWVNQSGKVQDNIRQLLNQASSLRERATQGWLNWEGTWKWFSWVLPLTGPLVSLLLLLLFGPCLLNLITQFVSSRLQAIKLQTNLSAGRHPRNIQESPF

SEQ ID NO: 2154 - protein, 221 aa, Homo sapiens
MLTLEDKDMKGFSWAIVPALTSLGYLIILVVSIFPFWVRLTNEESHEVFFSGLFENCFNAKCWKPRPLSIYIILGRVFLLSAVFLAFVTTFIMMPFASEFFPRTWKQNFVLACISFFTGACAFLALVLHALEIKALRMKLGPLQFSVLWPYYVLGFGIFLFIVAGTICLIQEMVCPCWHLLSTSQSMEEDHGSLYLDNLESLGGEPSSVQKETQVTAETVI

SEQ ID NO: 2155 - protein, 450 aa, Homo sapiens
MRECISIHVGQAGVQIGNACWELYCLEHGIQPDGQMPSDKTIGGGDDSFNTFFSETGAGKHVPRAVFVDLEPTVVDEVRTGTYRQLFHPEQLITGKEDAASNYARGHYTIGKEIVDLVLDRIRKLADLCTGLQGFLIFHSFGGGTGSGFASLLMERLSVDYSKKSKLEFAIYPAPQVSTAVVEPYNSILTTHTTLEHSDCAFMVDNEAIYDICRRNLDIERPTYTNLNRLIGQIVSSITASLRFDGALNVDLTEFQTNLVPYPRIHFPLATYAPVISAEKAYHEQLSVAEITNACFEPANQMVKCDPRHGKYMACCMLYRGDVVPKDVNAAIATIKTKRTIQFVDWCPTGFKVGINYQPPTVVPGGDLAKVQRAVCMLSNTTAIAEAWARLVHKFDLMYAKWAFVHWYVGEGMEEGEFSEAREDLAALEKDCEEVGVDSVEAEAEEGEAY

SEQ ID NO: 2156 - protein, 293 aa, Homo sapiens
MTEDSQRNFRSVYYEKVGFRGVEEKKSLEILLKDDRLDTEKLCTFSQRFPLPSMYRALVWKVLLGILPPHHESHAKVMMYRKEQYLDVLHALKVVRFVSDATPQAEVYLRMYQLESGKLPRSPSFPLEPDDEVFLAIAKAMEEMVEDSVDCYWITRRFVNQLNTKYRDSLPQLPKAFEQYLNLEDGRLLTHLRMCSAAPKLPYDLWFKRCFAGCLPESSLQRVWDKVVSGSCKILVFVAVEILLTFKIKVMALNSAEKITKFLENIPQDSSDAIVSKAIDLWHKHCGTPVHSS

SEQ ID NO: 2157 - protein, 266 aa, Homo sapiens
MTEDSQRNFRSVYYEKVGFRGVEEKKSLEILLKDDRLGILPPHHESHAKVMMYRKEQYLDVLHALKVVRFVSDATPQAEVYLRMYQLESGKLPRSPSFPLEPDDEVFLAIAKAMEEMVEDSVDCYWITRRFVNQLNTKYRDSLPQLPKAFEQYLNLEDGRLLTHLRMCSAAPKLPYDLWFKRCFAGCLPESSLQRVWDKVVSGSCKILVFVAVEILLTFKIKVMALNSAEKITKFLENIPQDSSDAIVSKAIDLWHKHCGTPVHSS

SEQ ID NO: 2158 - protein, 234 aa, Homo sapiens
MEGASRNLASTPRVHAKVMMYRKEQYLDVLHALKVVRFVSDATPQAEVYLRMYQLESGKLPRSPSFPLEPDDEVFLAIAKAMEEMVEDSVDCYWITRRFVNQLNTKYRDSLPQLPKAFEQYLNLEDGRLLTHLRMCSAAPKLPYDLWFKRCFAGCLPESSLQRVWDKVVSGSCKILVFVAVEILLTFKIKVMALNSAEKITKFLENIPQDSSDAIVSKAIDLWHKHCGTPVHSS

SEQ ID NO: 2159 - protein, 247 aa, Homo sapiens
MTEDSQRNFRSVYYEKVGFRGVEEKKSLEILLKDDRLDTEKLCTFSQRFPLPSMYRALVWKVLLGILPPHHESHAKVMMYRKEQYLDVLHALKVVRFVSDATPQAEVYLRMYQLESGKLPRSPSFPLPKAFEQYLNLEDGRLLTHLRMCSAAPKLPYDLWFKRCFAGCLPESSLQRVWDKVVSGSCKILVFVAVEILLTFKIKVMALNSAEKITKFLENIPQDSSDAIVSKAIDLWHKHCGTPVHSS

SEQ ID NO: 2160 - protein, 210 aa, Homo sapiens
MEMDEDPDNLPAQGQGNIIITKYEQGHRAGAAVDLGHEQVDVRKYTNNLGIVHEMELPRVSALEVKQRRKESKRTNKWQKMLADWTKYRSTKKLSQRVCKVIPLAVRGRALSLLLDIDKIKSQNPGKYKVMKEKGKRSSRIIHCIQLDVSHTLQKHMMFIQRFGVKQQELCDILVAYSAYNPVSIPGQRYSWYLCPYSQAWVSLGGVATS

SEQ ID NO: 2161 - protein, 517 aa, Homo sapiens
MASDGARKQFWKRSNSKLPGSIQHVYGAQHPPFDPLLHGTLLRSTAKMPTTPVKAKRVSTFQEFESNTSDAWDAGEDDDELLAMAAESLNSEVVMETANRVLRNHSQRQGRPTLQEGPGLQQKPRPEAEPPSPPSGDLRLVKSVSESHTSCPAESASDAAPLQRSQSLPHSATVTLGGTSDPSTLSSSALSEREASRLDKFKQLLAGPNTDLEELRRLSWSGIPKPVRPMTWKLLSGYLPANVDRRPATLQRKQKEYFAFIEHYYDSRNDEVHQDTYRQIHIDIPRMSPEALILQPKVTEIFERILFIWAIRHPASGYVQGINDLVTPFFVVFICEYIEAEEVDTVDVSGVPAEVLCNIEADTYWCMSKLLDGIQDNYTFAQPGIQMKVKMLEELVSRIDEQVHRHLDQHEVRYLQFAFRWMNNLLMREVPLRCTIRLWDTYQSEPDGFSHFHLYVCAAFLVRWRKEILEEKDFQELLLFLQNLPTAHWDDEDISLLLAEAYRLKFAFADAPNHYKK

SEQ ID NO: 2162 - protein, 439 aa, Homo sapiens
MASDGARKQFWKRSNSKLPGSLLRSTAKMPTTPVKAKRVSTFQEFESNTSDAWDAGEDDDELLAMAAESLNSEVVMETANRVLRNHSQRQGRPTLQEGPGLQQKPRPEAEPPSPPSGDLRLVKSVSESHTSCPAEELRRLSWSGIPKPVRPMTWKLLSGYLPANVDRRPATLQRKQKEYFAFIEHYYDSRNDEVHQDTYRQIHIDIPRMSPEALILQPKVTEIFERILFIWAIRHPASGYVQGINDLVTPFFVVFICEYIEAEEVDTVDVSGVPAEVLCNIEADTYWCMSKLLDGIQDNYTFAQPGIQMKVKMLEELVSRIDEQVHRHLDQHEVRYLQFAFRWMNNLLMREVPLRCTIRLWDTYQSEPDGFSHFHLYVCAAFLVRWRKEILEEKDFQELLLFLQNLPTAHWDDEDISLLLAEAYRLKFAFADAPNHYKK

SEQ ID NO: 2163 - protein, 324 aa, Homo sapiens
MPTTPVKAKRVSTFQEFESNTSDAWDAGEDDDELLAMAAESLNSEVVMETANRVLRNHSQRQGRPTLQEGPGLQQKPRPEAEPPSPPSGDLRLVKSVSESHTSCPAESASDAAPLQRSQSLPHSATVTLGGTSDPSTLSSSALSEREASRLDKFKQLLAGPNTDLEELRRLSWSGIPKPVRPMTWKLLSGYLPANVDRRPATLQRKQKEYFAFIEHYYDSRNDEVHQDTYRQIHIDIPRMSPEALILQPKVTEIFERILFIWAIRHPASGYVQGINDLVTPFFVVFICEYIAFPGCGRPQIPILAVIWRDEPYPRTDEQIILRR

SEQ ID NO: 2164 - protein, 470 aa, Homo sapiens
MPTTPVKAKRVSTFQEFESNTSDAWDAGEDDDELLAMAAESLNSEVVMETANRVLRNHSQRQGRPTLQEGPGLQQKPRPEAEPPSPPSGDLRLVKSVSESHTSCPAESASDAAPLQRSQSLPHSATVTLGGTSDPSTLSSSALSEREASRLDKFKQLLAGPNTDLEELRRLSWSGIPKPVRPMTWKLLSGYLPANVDRRPATLQRKQKEYFAFIEHYYDSRNDEVHQDTYRQIHIDIPRMSPEALILQPKVTEIFERILFIWAIRHPASGYVQGINDLVTPFFVVFICEYIEAEEVDTVDVSGVPAEVLCNIEADTYWCMSKLLDGIQDNYTFAQPGIQMKVKMLEELVSRIDEQVHRHLDQHEVRYLQFAFRWMNNLLMREVPLRCTIRLWDTYQSEPDGFSHFHLYVCAAFLVRWRKEILEEKDFQELLLFLQNLPTAHWDDEDISLLLAEAYRLKFAFADAPNHYKK

SEQ ID NO: 2165 - protein, 444 aa, Homo sapiens
MREIVLTQTGQCGNQIGAKFWEVISDEHAIDSAGTYHGDSHLQLERINVHHHEASGGRYVPRAVLVDLEPGTMDSVHSGPFGQVFRPDNFISGQCGAGNNWAKGRYTEGAELTESVMDVVRKEAESCDCLQGFQLTHSLGGGTGSGMGTLLISKIREEYPDRIINTFSILPSPKVSDTVVEPYNATLSVHQLIENADETFCIDNEALYDICSRTLKLPTPTYGDLNHLVSATMSGVTTCLRFPGQLNADLRKLAVNMVPFPRLHFFMPGFAPLTSRGSQQYRALTVAELTQQMFDAKNMMAACDPRHGCYLTVAAIFRGRMPMREVDEQMFNIQDKNSSYFADWFPDNVKTAVCDIPPRGLKMSATFIGNNAAIQELFTCVSEQFTAMFRRKAFLHWYTGEGMDEMEFTEAESNMNDLVSEYQQYQDATAEEEEDEEYAEEEVA

SEQ ID NO: 2166 - protein, 1360 aa, Homo sapiens
MASDSPARSLDEIDLSALRDPAGIFELVELVGNGTYGQVYKGRHVKTGQLAAIKVMDVTGDEEEEIKQEINMLKKYSHHRNIATYYGAFIKKNPPGMDDQLWLVMEFCGAGSVTDLIKNTKGNTLKEEWIAYICREILRGLSHLHQHKVIHRDIKGQNVLLTENAEVKLVDFGVSAQLDRTVGRRNTFIGTPYWMAPEVIACDENPDATYDFKSDLWSLGITAIEMAEGAPPLCDMHPMRALFLIPRNPAPRLKSKKWSKKFQSFIESCLVKNHSQRPATEQLMKHPFIRDQPNERQVRIQLKDHIDRTKKKRGEKDETEYEYSGSEEEEEENDSGEPSSILNLPGESTLRRDFLRLQLANKERSEALRRQQLEQQQRENEEHKRQLLAERQKRIEEQKEQRRRLEEQQRREKELRKQQEREQRRHYEEQMRREEERRRAEHEQEYIRRQLEEEQRQLEILQQQLLHEQALLLEYKRKQLEEQRQAERLQRQLKQERDYLVSLQHQRQEQRPVEKKPLYHYKEGMSPSEKPAWAKEVEERSRLNRQSSPAMPHKVANRISDPNLPPRSESFSISGVQPARTPPMLRPVDPQIPHLVAVKSQGPALTASQSVHEQPTKGLSGFQEALNVTSHRVEMPRQNSDPTSENPPLPTRIEKFDRSSWLRQEEDIPPKVPQRTTSISPALARKNSPGNGSALGPRLGSQPIRASNPDLRRTEPILESPLQRTSSGSSSSSSTPSSQPSSQGGSQPGSQAGSSERTRVRANSKSEGSPVLPHEPAKVKPEESRDITRPSRPASYKKAIDEDLTALAKELRELRIEETNRPMKKVTDYSSSSEESESSEEEEEDGESETHDGTVAVSDIPRLIPTGAPGSNEQYNVGMVGTHGLETSHADSFSGSISREGTLMIRETSGEKKRSGHSDSNGFAGHINLPDLVQQSHSPAGTPTEGLGRVSTHSQEMDSGTEYGMGSSTKASFTPFVDPRVYQTSPTDEDEEDEESSAAALFTSELLRQEQAKLNEARKISVVNVNPTNIRPHSDTPEIRKYKKRFNSEILCAALWGVNLLVGTENGLMLLDRSGQGKVYNLINRRRFQQMDVLEGLNVLVTISGKKNKLRVYYLSWLRNRILHNDPEVEKKQGWITVGDLEGCIHYKVVKYERIKFLVIALKNAVEIYAWAPKPYHKFMAFKSFADLQHKPLLVDLTVEEGQRLKVIFGSHTGFHVIDVDSGNSYDIYIPSHIQGNITPHAIVILPKTDGMEMLVCYEDEGVYVNTYGRITKDVVLQWGEMPTSVAYIHSNQIMGWGEKAIEIRSVETGHLDGVFMHKRAQRLKFLCERNDKVFFASVRSGGSSQVFFMTLNRNSMMNW

SEQ ID NO: 2167 - protein, 1331 aa, Homo sapiens
MASDSPARSLDEIDLSALRDPAGIFELVELVGNGTYGQVYKGRHVKTGQLAAIKVMDVTGDEEEEIKQEINMLKKYSHHRNIATYYGAFIKKNPPGMDDQLWLVMEFCGAGSVTDLIKNTKGNTLKEEWIAYICREILRGLSHLHQHKVIHRDIKGQNVLLTENAEVKLVDFGVSAQLDRTVGRRNTFIGTPYWMAPEVIACDENPDATYDFKSDLWSLGITAIEMAEGAPPLCDMHPMRALFLIPRNPAPRLKSKKWSKKFQSFIESCLVKNHSQRPATEQLMKHPFIRDQPNERQVRIQLKDHIDRTKKKRGEKDETEYEYSGSEEEEEENDSGEPSSILNLPGESTLRRDFLRLQLANKERSEALRRQQLEQQQRENEEHKRQLLAERQKRIEEQKEQRRRLEEQQRREKELRKQQEREQRRHYEEQMRREEERRRAEHEQEYKRKQLEEQRQAERLQRQLKQERDYLVSLQHQRQEQRPVEKKPLYHYKEGMSPSEKPAWAKEVEERSRLNRQSSPAMPHKVANRISDPNLPPRSESFSISGVQPARTPPMLRPVDPQIPHLVAVKSQGPALTASQSVHEQPTKGLSGFQEALNVTSHRVEMPRQNSDPTSENPPLPTRIEKFDRSSWLRQEEDIPPKVPQRTTSISPALARKNSPGNGSALGPRLGSQPIRASNPDLRRTEPILESPLQRTSSGSSSSSSTPSSQPSSQGGSQPGSQAGSSERTRVRANSKSEGSPVLPHEPAKVKPEESRDITRPSRPASYKKAIDEDLTALAKELRELRIEETNRPMKKVTDYSSSSEESESSEEEEEDGESETHDGTVAVSDIPRLIPTGAPGSNEQYNVGMVGTHGLETSHADSFSGSISREGTLMIRETSGEKKRSGHSDSNGFAGHINLPDLVQQSHSPAGTPTEGLGRVSTHSQEMDSGTEYGMGSSTKASFTPFVDPRVYQTSPTDEDEEDEESSAAALFTSELLRQEQAKLNEARKISVVNVNPTNIRPHSDTPEIRKYKKRFNSEILCAALWGVNLLVGTENGLMLLDRSGQGKVYNLINRRRFQQMDVLEGLNVLVTISGKKNKLRVYYLSWLRNRILHNDPEVEKKQGWITVGDLEGCIHYKVVKYERIKFLVIALKNAVEIYAWAPKPYHKFMAFKSFADLQHKPLLVDLTVEEGQRLKVIFGSHTGFHVIDVDSGNSYDIYIPSHIQGNITPHAIVILPKTDGMEMLVCYEDEGVYVNTYGRITKDVVLQWGEMPTSVAYIHSNQIMGWGEKAIEIRSVETGHLDGVFMHKRAQRLKFLCERNDKVFFASVRSGGSSQVFFMTLNRNSMMNW

SEQ ID NO: 2168 - protein, 1305 aa, Homo sapiens
MASDSPARSLDEIDLSALRDPAGIFELVELVGNGTYGQVYKGRHVKTGQLAAIKVMDVTGDEEEEIKQEINMLKKYSHHRNIATYYGAFIKKNPPGMDDQLWLVMEFCGAGSVTDLIKNTKGNTLKEEWIAYICREILRGLSHLHQHKVIHRDIKGQNVLLTENAEVKLVDFGVSAQLDRTVGRRNTFIGTPYWMAPEVIACDENPDATYDFKSDLWSLGITAIEMAEGAPPLCDMHPMRALFLIPRNPAPRLKSKKWSKKFQSFIESCLVKNHSQRPATEQLMKHPFIRDQPNERQVRIQLKDHIDRTKKKRGEKDETEYEYSGSEEEEEENDSGEPSSILNLPGESTLRRDFLRLQLANKERSEALRRQQLEQQQRENEEHKRQLLAERQKRIEEQKEQRRRLEEQQRREKELRKQQEREQRRHYEEQMRREEERRRAEHEQEYIRRQLEEEQRQLEILQQQLLHEQALLLEYKRKQLEEQRQAERLQRQLKQERDYLVSLQHQRQEQRPVEKKPLYHYKEGMSPSEKPAWAKEIPHLVAVKSQGPALTASQSVHEQPTKGLSGFQEALNVTSHRVEMPRQNSDPTSENPPLPTRIEKFDRSSWLRQEEDIPPKVPQRTTSISPALARKNSPGNGSALGPRLGSQPIRASNPDLRRTEPILESPLQRTSSGSSSSSSTPSSQPSSQGGSQPGSQAGSSERTRVRANSKSEGSPVLPHEPAKVKPEESRDITRPSRPASYKKAIDEDLTALAKELRELRIEETNRPMKKVTDYSSSSEESESSEEEEEDGESETHDGTVAVSDIPRLIPTGAPGSNEQYNVGMVGTHGLETSHADSFSGSISREGTLMIRETSGEKKRSGHSDSNGFAGHINLPDLVQQSHSPAGTPTEGLGRVSTHSQEMDSGTEYGMGSSTKASFTPFVDPRVYQTSPTDEDEEDEESSAAALFTSELLRQEQAKLNEARKISVVNVNPTNIRPHSDTPEIRKYKKRFNSEILCAALWGVNLLVGTENGLMLLDRSGQGKVYNLINRRRFQQMDVLEGLNVLVTISGKKNKLRVYYLSWLRNRILHNDPEVEKKQGWITVGDLEGCIHYKVVKYERIKFLVIALKNAVEIYAWAPKPYHKFMAFKSFADLQHKPLLVDLTVEEGQRLKVIFGSHTGFHVIDVDSGNSYDIYIPSHIQGNITPHAIVILPKTDGMEMLVCYEDEGVYVNTYGRITKDVVLQWGEMPTSVAYIHSNQIMGWGEKAIEIRSVETGHLDGVFMHKRAQRLKFLCERNDKVFFASVRSGGSSQVFFMTLNRNSMMNW

SEQ ID NO: 2169 - protein, 1352 aa, Homo sapiens
MASDSPARSLDEIDLSALRDPAGIFELVELVGNGTYGQVYKGRHVKTGQLAAIKVMDVTGDEEEEIKQEINMLKKYSHHRNIATYYGAFIKKNPPGMDDQLWLVMEFCGAGSVTDLIKNTKGNTLKEEWIAYICREILRGLSHLHQHKVIHRDIKGQNVLLTENAEVKLVDFGVSAQLDRTVGRRNTFIGTPYWMAPEVIACDENPDATYDFKSDLWSLGITAIEMAEGAPPLCDMHPMRALFLIPRNPAPRLKSKKWSKKFQSFIESCLVKNHSQRPATEQLMKHPFIRDQPNERQVRIQLKDHIDRTKKKRGEKDETEYEYSGSEEEEEENDSGEPSSILNLPGESTLRRDFLRLQLANKERSEALRRQQLEQQQRENEEHKRQLLAERQKRIEEQKEQRRRLEEQQRREKELRKQQEREQRRHYEEQMRREEERRRAEHEQEYIRRQLEEEQRQLEILQQQLLHEQALLLEYKRKQLEEQRQAERLQRQLKQERDYLVSLQHQRQEQRPVEKKPLYHYKEGMSPSEKPAWAKEVEERSRLNRQSSPAMPHKVANRISDPNLPPRSESFSISGVQPARTPPMLRPVDPQIPHLVAVKSQGPALTASQSVHEQPTKGLSGFQEALNVTSHRVEMPRQNSDPTSENPPLPTRIEKFDRSSWLRQEEDIPPKVPQRTTSISPALARKNSPGNGSALGPRLGSQPIRASNPDLRRTEPILESPLQRTSSGSSSSSSTPSSQPSSQGGSQPGSQAGSSERTRVRANSKSEGSPVLPHEPAKVKPEESRDITRPSRPADLTALAKELRELRIEETNRPMKKVTDYSSSSEESESSEEEEEDGESETHDGTVAVSDIPRLIPTGAPGSNEQYNVGMVGTHGLETSHADSFSGSISREGTLMIRETSGEKKRSGHSDSNGFAGHINLPDLVQQSHSPAGTPTEGLGRVSTHSQEMDSGTEYGMGSSTKASFTPFVDPRVYQTSPTDEDEEDEESSAAALFTSELLRQEQAKLNEARKISVVNVNPTNIRPHSDTPEIRKYKKRFNSEILCAALWGVNLLVGTENGLMLLDRSGQGKVYNLINRRRFQQMDVLEGLNVLVTISGKKNKLRVYYLSWLRNRILHNDPEVEKKQGWITVGDLEGCIHYKVVKYERIKFLVIALKNAVEIYAWAPKPYHKFMAFKSFADLQHKPLLVDLTVEEGQRLKVIFGSHTGFHVIDVDSGNSYDIYIPSHIQGNITPHAIVILPKTDGMEMLVCYEDEGVYVNTYGRITKDVVLQWGEMPTSVAYIHSNQIMGWGEKAIEIRSVETGHLDGVFMHKRAQRLKFLCERNDKVFFASVRSGGSSQVFFMTLNRNSMMNW

SEQ ID NO: 2170 - protein, 1276 aa, Homo sapiens
MASDSPARSLDEIDLSALRDPAGIFELVELVGNGTYGQVYKGRHVKTGQLAAIKVMDVTGDEEEEIKQEINMLKKYSHHRNIATYYGAFIKKNPPGMDDQLWLVMEFCGAGSVTDLIKNTKGNTLKEEWIAYICREILRGLSHLHQHKVIHRDIKGQNVLLTENAEVKLVDFGVSAQLDRTVGRRNTFIGTPYWMAPEVIACDENPDATYDFKSDLWSLGITAIEMAEGAPPLCDMHPMRALFLIPRNPAPRLKSKKWSKKFQSFIESCLVKNHSQRPATEQLMKHPFIRDQPNERQVRIQLKDHIDRTKKKRGEKDETEYEYSGSEEEEEENDSGEPSSILNLPGESTLRRDFLRLQLANKERSEALRRQQLEQQQRENEEHKRQLLAERQKRIEEQKEQRRRLEEQQRREKELRKQQEREQRRHYEEQMRREEERRRAEHEQEYKRKQLEEQRQAERLQRQLKQERDYLVSLQHQRQEQRPVEKKPLYHYKEGMSPSEKPAWAKEIPHLVAVKSQGPALTASQSVHEQPTKGLSGFQEALNVTSHRVEMPRQNSDPTSENPPLPTRIEKFDRSSWLRQEEDIPPKVPQRTTSISPALARKNSPGNGSALGPRLGSQPIRASNPDLRRTEPILESPLQRTSSGSSSSSSTPSSQPSSQGGSQPGSQAGSSERTRVRANSKSEGSPVLPHEPAKVKPEESRDITRPSRPASYKKAIDEDLTALAKELRELRIEETNRPMKKVTDYSSSSEESESSEEEEEDGESETHDGTVAVSDIPRLIPTGAPGSNEQYNVGMVGTHGLETSHADSFSGSISREGTLMIRETSGEKKRSGHSDSNGFAGHINLPDLVQQSHSPAGTPTEGLGRVSTHSQEMDSGTEYGMGSSTKASFTPFVDPRVYQTSPTDEDEEDEESSAAALFTSELLRQEQAKLNEARKISVVNVNPTNIRPHSDTPEIRKYKKRFNSEILCAALWGVNLLVGTENGLMLLDRSGQGKVYNLINRRRFQQMDVLEGLNVLVTISGKKNKLRVYYLSWLRNRILHNDPEVEKKQGWITVGDLEGCIHYKVVKYERIKFLVIALKNAVEIYAWAPKPYHKFMAFKSFADLQHKPLLVDLTVEEGQRLKVIFGSHTGFHVIDVDSGNSYDIYIPSHIQGNITPHAIVILPKTDGMEMLVCYEDEGVYVNTYGRITKDVVLQWGEMPTSVAYIHSNQIMGWGEKAIEIRSVETGHLDGVFMHKRAQRLKFLCERNDKVFFASVRSGGSSQVFFMTLNRNSMMNW

SEQ ID NO: 2171 - protein, 1323 aa, Homo sapiens
MASDSPARSLDEIDLSALRDPAGIFELVELVGNGTYGQVYKGRHVKTGQLAAIKVMDVTGDEEEEIKQEINMLKKYSHHRNIATYYGAFIKKNPPGMDDQLWLVMEFCGAGSVTDLIKNTKGNTLKEEWIAYICREILRGLSHLHQHKVIHRDIKGQNVLLTENAEVKLVDFGVSAQLDRTVGRRNTFIGTPYWMAPEVIACDENPDATYDFKSDLWSLGITAIEMAEGAPPLCDMHPMRALFLIPRNPAPRLKSKKWSKKFQSFIESCLVKNHSQRPATEQLMKHPFIRDQPNERQVRIQLKDHIDRTKKKRGEKDETEYEYSGSEEEEEENDSGEPSSILNLPGESTLRRDFLRLQLANKERSEALRRQQLEQQQRENEEHKRQLLAERQKRIEEQKEQRRRLEEQQRREKELRKQQEREQRRHYEEQMRREEERRRAEHEQEYKRKQLEEQRQAERLQRQLKQERDYLVSLQHQRQEQRPVEKKPLYHYKEGMSPSEKPAWAKEVEERSRLNRQSSPAMPHKVANRISDPNLPPRSESFSISGVQPARTPPMLRPVDPQIPHLVAVKSQGPALTASQSVHEQPTKGLSGFQEALNVTSHRVEMPRQNSDPTSENPPLPTRIEKFDRSSWLRQEEDIPPKVPQRTTSISPALARKNSPGNGSALGPRLGSQPIRASNPDLRRTEPILESPLQRTSSGSSSSSSTPSSQPSSQGGSQPGSQAGSSERTRVRANSKSEGSPVLPHEPAKVKPEESRDITRPSRPADLTALAKELRELRIEETNRPMKKVTDYSSSSEESESSEEEEEDGESETHDGTVAVSDIPRLIPTGAPGSNEQYNVGMVGTHGLETSHADSFSGSISREGTLMIRETSGEKKRSGHSDSNGFAGHINLPDLVQQSHSPAGTPTEGLGRVSTHSQEMDSGTEYGMGSSTKASFTPFVDPRVYQTSPTDEDEEDEESSAAALFTSELLRQEQAKLNEARKISVVNVNPTNIRPHSDTPEIRKYKKRFNSEILCAALWGVNLLVGTENGLMLLDRSGQGKVYNLINRRRFQQMDVLEGLNVLVTISGKKNKLRVYYLSWLRNRILHNDPEVEKKQGWITVGDLEGCIHYKVVKYERIKFLVIALKNAVEIYAWAPKPYHKFMAFKSFADLQHKPLLVDLTVEEGQRLKVIFGSHTGFHVIDVDSGNSYDIYIPSHIQGNITPHAIVILPKTDGMEMLVCYEDEGVYVNTYGRITKDVVLQWGEMPTSVAYIHSNQIMGWGEKAIEIRSVETGHLDGVFMHKRAQRLKFLCERNDKVFFASVRSGGSSQVFFMTLNRNSMMNW

SEQ ID NO: 2172 - protein, 1297 aa, Homo sapiens
MASDSPARSLDEIDLSALRDPAGIFELVELVGNGTYGQVYKGRHVKTGQLAAIKVMDVTGDEEEEIKQEINMLKKYSHHRNIATYYGAFIKKNPPGMDDQLWLVMEFCGAGSVTDLIKNTKGNTLKEEWIAYICREILRGLSHLHQHKVIHRDIKGQNVLLTENAEVKLVDFGVSAQLDRTVGRRNTFIGTPYWMAPEVIACDENPDATYDFKSDLWSLGITAIEMAEGAPPLCDMHPMRALFLIPRNPAPRLKSKKWSKKFQSFIESCLVKNHSQRPATEQLMKHPFIRDQPNERQVRIQLKDHIDRTKKKRGEKDETEYEYSGSEEEEEENDSGEPSSILNLPGESTLRRDFLRLQLANKERSEALRRQQLEQQQRENEEHKRQLLAERQKRIEEQKEQRRRLEEQQRREKELRKQQEREQRRHYEEQMRREEERRRAEHEQEYIRRQLEEEQRQLEILQQQLLHEQALLLEYKRKQLEEQRQAERLQRQLKQERDYLVSLQHQRQEQRPVEKKPLYHYKEGMSPSEKPAWAKEIPHLVAVKSQGPALTASQSVHEQPTKGLSGFQEALNVTSHRVEMPRQNSDPTSENPPLPTRIEKFDRSSWLRQEEDIPPKVPQRTTSISPALARKNSPGNGSALGPRLGSQPIRASNPDLRRTEPILESPLQRTSSGSSSSSSTPSSQPSSQGGSQPGSQAGSSERTRVRANSKSEGSPVLPHEPAKVKPEESRDITRPSRPADLTALAKELRELRIEETNRPMKKVTDYSSSSEESESSEEEEEDGESETHDGTVAVSDIPRLIPTGAPGSNEQYNVGMVGTHGLETSHADSFSGSISREGTLMIRETSGEKKRSGHSDSNGFAGHINLPDLVQQSHSPAGTPTEGLGRVSTHSQEMDSGTEYGMGSSTKASFTPFVDPRVYQTSPTDEDEEDEESSAAALFTSELLRQEQAKLNEARKISVVNVNPTNIRPHSDTPEIRKYKKRFNSEILCAALWGVNLLVGTENGLMLLDRSGQGKVYNLINRRRFQQMDVLEGLNVLVTISGKKNKLRVYYLSWLRNRILHNDPEVEKKQGWITVGDLEGCIHYKVVKYERIKFLVIALKNAVEIYAWAPKPYHKFMAFKSFADLQHKPLLVDLTVEEGQRLKVIFGSHTGFHVIDVDSGNSYDIYIPSHIQGNITPHAIVILPKTDGMEMLVCYEDEGVYVNTYGRITKDVVLQWGEMPTSVAYIHSNQIMGWGEKAIEIRSVETGHLDGVFMHKRAQRLKFLCERNDKVFFASVRSGGSSQVFFMTLNRNSMMNW

SEQ ID NO: 2173 - protein, 1268 aa, Homo sapiens
MASDSPARSLDEIDLSALRDPAGIFELVELVGNGTYGQVYKGRHVKTGQLAAIKVMDVTGDEEEEIKQEINMLKKYSHHRNIATYYGAFIKKNPPGMDDQLWLVMEFCGAGSVTDLIKNTKGNTLKEEWIAYICREILRGLSHLHQHKVIHRDIKGQNVLLTENAEVKLVDFGVSAQLDRTVGRRNTFIGTPYWMAPEVIACDENPDATYDFKSDLWSLGITAIEMAEGAPPLCDMHPMRALFLIPRNPAPRLKSKKWSKKFQSFIESCLVKNHSQRPATEQLMKHPFIRDQPNERQVRIQLKDHIDRTKKKRGEKDETEYEYSGSEEEEEENDSGEPSSILNLPGESTLRRDFLRLQLANKERSEALRRQQLEQQQRENEEHKRQLLAERQKRIEEQKEQRRRLEEQQRREKELRKQQEREQRRHYEEQMRREEERRRAEHEQEYKRKQLEEQRQAERLQRQLKQERDYLVSLQHQRQEQRPVEKKPLYHYKEGMSPSEKPAWAKEIPHLVAVKSQGPALTASQSVHEQPTKGLSGFQEALNVTSHRVEMPRQNSDPTSENPPLPTRIEKFDRSSWLRQEEDIPPKVPQRTTSISPALARKNSPGNGSALGPRLGSQPIRASNPDLRRTEPILESPLQRTSSGSSSSSSTPSSQPSSQGGSQPGSQAGSSERTRVRANSKSEGSPVLPHEPAKVKPEESRDITRPSRPADLTALAKELRELRIEETNRPMKKVTDYSSSSEESESSEEEEEDGESETHDGTVAVSDIPRLIPTGAPGSNEQYNVGMVGTHGLETSHADSFSGSISREGTLMIRETSGEKKRSGHSDSNGFAGHINLPDLVQQSHSPAGTPTEGLGRVSTHSQEMDSGTEYGMGSSTKASFTPFVDPRVYQTSPTDEDEEDEESSAAALFTSELLRQEQAKLNEARKISVVNVNPTNIRPHSDTPEIRKYKKRFNSEILCAALWGVNLLVGTENGLMLLDRSGQGKVYNLINRRRFQQMDVLEGLNVLVTISGKKNKLRVYYLSWLRNRILHNDPEVEKKQGWITVGDLEGCIHYKVVKYERIKFLVIALKNAVEIYAWAPKPYHKFMAFKSFADLQHKPLLVDLTVEEGQRLKVIFGSHTGFHVIDVDSGNSYDIYIPSHIQGNITPHAIVILPKTDGMEMLVCYEDEGVYVNTYGRITKDVVLQWGEMPTSVAYIHSNQIMGWGEKAIEIRSVETGHLDGVFMHKRAQRLKFLCERNDKVFFASVRSGGSSQVFFMTLNRNSMMNW

SEQ ID NO: 2174 - protein, 612 aa, Homo sapiens
MGAAPSPTQASSRGGGPGPPAPTRAVSSSSRARGGALSALGPSPARPLTTSPAPAPPPRSRPARQQPDPQCWEKRGGAGGDTKGGAAGPGPGRLRGMDAEYPAFEPPLCSELKHLCRRLREAYRELKEDLTPFKDDRYYRLAPMRLYTLSKRHFVLVFVVFFICFGLTIFVGIRGPKVIQTSAANFSLNNSKKLKPIQILSNPLSTYNQQLWLTCVVELDQSKETSIKTSFPMTVKVDGVAQDGTTMYIHNKVHNRTRTLTCAGKCAEIIVAHLGYLNYTQYTVIVGFEHLKLPIKGMNFTWKTYNPAFSRLEIWFRFFFVVLTFIVTCLFAHSLRKFSMRDWGIEQKWMSVLLPLLLLYNDPFFPLSFLVNSWLPGMLDDLFQSMFLCALLLFWLCVYHGIRVQGERKCLTFYLPKFFIVGLLWLASVTLGIWQTVNELHDPMYQYRVDTGNFQGMKVFFMVVAAVYILYLLFLIVRACSELRHMPYVDLRLKFLTALTFVVLVISIAILYLRFGAQVLQDNFVAELSTHYQNSAEFLSFYGLLNFYLYTLAFVYSPSKNALYESQLKDNPAFSMLNDSDDDVIYGSDYEEMPLQNGQAIRAKYKEESDSD

SEQ ID NO: 2175 - protein, 173 aa, Homo sapiens
MAPKGKVGTRGKKQIFEENRETLKFYLRIILGANAIYCLVTLVFFYSSASFWAWLALGFSLAVYGASYHSMSSMARAAFSEDGALMDGGMDLNMEQGMAEHLKDVILLTAIVQVLSCFSLYVWSFWLLAPGRALYLLWVNVLGPWFTADSGTPAPEHNEKRQRRQERRQMKRL

SEQ ID NO: 2176 - protein, 100 aa, Homo sapiens
MAPKGKVGTRGKKQIFEENRETLKFYLRIILGANAIYCLVTLVFFYSSASFWAWLALGFSLAVYGASYHSMSSMARAAFSEDGALMDGGMDLNMEQGMAE

SEQ ID NO: 2177 - protein, 136 aa, Homo sapiens
MLFSLRELVQWLGFATFEIFVHLLALLVFSVLLALRVDGLVPGLSWWNVFVPFFAADGLSTYFTTIVSVRLFQDGEKRLAVLRLFWVLTVLSLKFVFEMLLCQKLAEQTRELWFGLITSPLFILLQLLMIRACRVN

SEQ ID NO: 2178 - protein, 145 aa, Homo sapiens
MLPRGLKMAPRGKRLSSTPLEILFFLNGWYNATYFLLELFIFLYKGVLLPYPTANLVLDVVMLLLYLGIEVIRLFFGTKGNLCQRKMPLSISVALTFPSAMMASYYLLLQTYVLRLEAIMNGILLFFCGSELLLEVLTLAAFSRI

SEQ ID NO: 2179 - protein, 87 aa, Homo sapiens
MLLLYLGIEVIRLFFGTKGNLCQRKMPLSISVALTFPSAMMASYYLLLQTYVLRLEAIMNGILLFFCGSELLLEVLTLAAFSSMDRI

SEQ ID NO: 2180 - protein, 148 aa, Homo sapiens
MLPRGLKMAPRGKRLSSTPLEILFFLNGWYNATYFLLELFIFLYKGVLLPYPTANLVLDVVMLLLYLGIEVIRLFFGTKGNLCQRKMPLSISVALTFPSAMMASYYLLLQTYVLRLEAIMNGILLFFCGSELLLEVLTLAAFSSMDRI

SEQ ID NO: 2181 - protein, 728 aa, Homo sapiens
MSESGEMSEFGYIMELIAKGKVTIKNIERELICPACKELFTHPLILPCQHSICHKCVKELLLTLDDSFNDVGSDNSNQSSPRLRLPSPSMDKIDRINRPGWKRNSLTPRTTVFPCPGCEHDVDLGERGINGLFRNFTLETIVERYRQAARAATAIMCDLCKPPPQESTKSCMDCSASYCNECFKIHHPWGTIKAQHEYVGPTTNFRPKILMCPEHETERINMYCELCRRPVCHLCKLGGNHANHRVTTMSSAYKTLKEKLSKDIDYLIGKESQVKSQISELNLLMKETECNGERAKEEAITHFEKLFEVLEERKSSVLKAIDSSKKLRLDKFQTQMEEYQGLLENNGLVGYAQEVLKETDQSCFVQTAKQLHLRIQKATESLKSFRPAAQTSFEDYVVNTSKQTELLGELSFFSSGIDVPEINEEQSKVYNNALINWHHPEKDKADSYVLEYRKINRDDEMSWNEIEVCGTSKIIQDLENSSTYAFRVRAYKGSICSPCSRELILHTPPAPVFSFLFDEKCGYNNEHLLLNLKRDRVESRAGFNLLLAAERIQVGYYTSLDYIIGDTGITKGKHFWAFRVEPYSYLVKVGVASSDKLQEWLRSPRDAVSPRYEQDSGHDSGSEDACFDSSQPFTLVTIGMQKFFIPKSPTSSNEPENRVLPMPTSIGIFLDCDKGKVDFYDMDQMKCLYERQVDCSHTLYPAFALMGSGGIQLEEPITAKYLEYQEDM

SEQ ID NO: 2182 - protein, 60 aa, Homo sapiens
MSESGEMSEFGYIMELIAKGKMPDWRRGYRCRQGCGKTTELATATDFSQTGNKSGKHFKT

SEQ ID NO: 2183 - protein, 61 aa, Homo sapiens
MSESGEMSEFGYIMELIAKGKASAMGLQQTHEHSRLTSKGGEARCPFEISEVGKQSLPRRT

SEQ ID NO: 2184 - protein, 716 aa, Homo sapiens
MEGDGSDSPVTIKNIERELICPACKELFTHPLILPCQHSICHKCVKELLLTLDDSFNDVGSDNSNQSSPRLRLPSPSMDKIDRINRPGWKRNSLTPRTTVFPCPGCEHDVDLGERGINGLFRNFTLETIVERYRQAARAATAIMCDLCKPPPQESTKSCMDCSASYCNECFKIHHPWGTIKAQHEYVGPTTNFRPKILMCPEHETERINMYCELCRRPVCHLCKLGGNHANHRVTTMSSAYKTLKEKLSKDIDYLIGKESQVKSQISELNLLMKETECNGERAKEEAITHFEKLFEVLEERKSSVLKAIDSSKKLRLDKFQTQMEEYQGLLENNGLVGYAQEVLKETDQSCFVQTAKQLHLRIQKATESLKSFRPAAQTSFEDYVVNTSKQTELLGELSFFSSGIDVPEINEEQSKVYNNALINWHHPEKDKADSYVLEYRKINRDDEMSWNEIEVCGTSKIIQDLENSSTYAFRVRAYKGSICSPCSRELILHTPPAPVFSFLFDEKCGYNNEHLLLNLKRDRVESRAGFNLLLAAERIQVGYYTSLDYIIGDTGITKGKHFWAFRVEPYSYLVKVGVASSDKLQEWLRSPRDAVSPRYEQDSGHDSGSEDACFDSSQPFTLVTIGMQKFFIPKSPTSSNEPENRVLPMPTSIGIFLDCDKGKVDFYDMDQMKCLYERQVDCSHTLYPAFALMGSGGIQLEEPITAKYLEYQEDM

SEQ ID NO: 2185 - protein, 297 aa, Homo sapiens
MDCQENEYWDQWGRCVTCQRCGPGQELSKDCGYGEGGDAYCTACPPRRYKSSWGHHRCQSCITCAVINRVQKVNCTATSNAVCGDCLPRFYRKTRIGGLQDQECIPCTKQTPTSEVQCAFQLSLVEADTPTVPPQEATLVALVSSLLVVFTLAFLGLFFLYCKQFFNRHCQRGGLLQFEADKTAKEESLFPVPPSKETSAESQVSENIFQTQPLNPILEDDCSSTSGFPTQESFTMASCTSESHSHWVHSPIECTELDLQKFSSSASYTGAETLGGNTVESTGDRLELNVPFEVPSP

SEQ ID NO: 2186 - protein, 318 aa, Homo sapiens
MDCQENEYWDQWGRCVTCQRCGPGQELSKDCGYGEGGDAYCTACPPRRYKSSWGHHRCQSCITCAVINRVQKVNCTATSNAVCGDCLPRFYRKTRIGGLQDQECIPCTKQTPTSEVQCAFQLSLVEADTPTVPPQEATLVALVSSLLVVFTLAFLGLFFLYCKQFFNRHCQREKLIIFSDPVPASLNLIPEFAGGLLQFEADKTAKEESLFPVPPSKETSAESQVSENIFQTQPLNPILEDDCSSTSGFPTQESFTMASCTSESHSHWVHSPIECTELDLQKFSSSASYTGAETLGGNTVESTGDRLELNVPFEVPSP

SEQ ID NO: 2187 - protein, 299 aa, Homo sapiens
MDCQENEYWDQWGRCVTCQRCGPGQELSKDCGYGEGGDAYCTACPPRRYKSSWGHHRCQSCITCAVINRVQKVNCTATSNAVCGDCLPRFYRKTRIGGLQDQECIPCTKQTPTSEVQCAFQLSLVEADTPTVPPQEATLVALVSSLLVVFTLAFLGLFFLYCKQFFNRHCQRVTGGLLQFEADKTAKEESLFPVPPSKETSAESQVSENIFQTQPLNPILEDDCSSTSGFPTQESFTMASCTSESHSHWVHSPIECTELDLQKFSSSASYTGAETLGGNTVESTGDRLELNVPFEVPSP

SEQ ID NO: 2188 - protein, 463 aa, Homo sapiens
MALSCTLNRYLLLMAQEHLEFRLPEIKSLLLLFGGQFASSQETYGKSPFWILSIPSEDIARNLMKRTVCAKSIFELWGHGQSPEELYSSLKNYPVEKMVPFLHSDSTYKIKIHTFNKTLTQEEKIKRIDALEFLPFEGKVNLKKPQHVFSVLEDYGLDPNCIPENPHNIYFGRWIADGQRELIESYSVKKRHFIGNTSMDAGLSFIMANHGKVKENDIVFDPFVGTGGLLIACAHFGAYVYGTDIDYNTVHGLGKATRKNQKWRGPDENIRANLRQYGLEKYYLDVLVSDASKPSWRKGTYFDAIITDPPYGIRESTRRTGSQKEIPKGIEKWEKCPESHVPVSLSYHLSDMFLDLLNFAAETLVLGGRLVYWLPVYTPEYTEEMVPWHPCLELVSNCEQKLSSHTSRRLITMEKVKKFENRDQYSHLLSDHFLPYQGHNSFREKYFSGVTKRIAKEEKSTQE

SEQ ID NO: 2189 - protein, 458 aa, Homo sapiens
MALSCTLNRYLLLMAQEHLEFRLPEIKSLLLLFGGQFASSQETYGKSPFWILSIPSEDIARNLMKRTVCAKSIFELWGHGQSPEELYSSLKNYPVEKMVPFLHSDSTYKIKIHTFNKTLTQEEKIKRIDALEFLPFEGKVNLKKPQHVFSVLEDYGLDPNCIPENPHNIYFGRWIADGQRELIESYSVKKRHFIGNTSMDAGLSFIMANHGKVKENDIVFDPFVGTGGLLIACAHFGAYVYGTDIDYNTVHGLGKATRKNQKWRGPDENIRANLRQYGLEKYYLDVLVSDASKPSWRKGTYFDAIITDPPYGIRESTRRTGSQKEIPKGIEKWEKCPESHVPVSLSYHLSDMFLDLLNFAAETLVLGGRLVYWLPVYTPEYTEEMVPWHPCLELVSNCEQKLSSHTSRRLITMEKNRDQYSHLLSDHFLPYQGHNSFREKYFSGVTKRIAKEEKSTQE

SEQ ID NO: 2190 - protein, 257 aa, Homo sapiens
MALSCTLNRYLLLMAQEHLEFRLPEIKSLLLLFGGQFASSQETYGKSPFWILSIPSEDIARNLMKRTVCAKSIFELWGHGQSPEELYSSLKNYPVEKMVPFLHSDSTYKIKIHTFNKTLTQEEKIKRIDALEFLPFEGKVNLKKPQHVFSVLEDYGLDPNCIPENPHNIYFGRWIADGQRELIESYSVKKRHFIGNTSMDAGLSFIMANHGKVKENDIVFDPFVGTGGLLIACAHFGAYVYGTDIDYNTVHGLACST

SEQ ID NO: 2191 - protein, 219 aa, Homo sapiens
MADKAKPAKAANRTPPKSPGDPSKDRAAKRLSLESEGAGEGAAASPELSALEEAFRRFAVHGDARATGREMHGKNWSKLCKDCQVIDGRNVTVTDVDIVFSKIKGKSCRTITFEQFQEALEELAKKRFKDKSSEEAVREVHRLIEGKAPIISGVTKAISSPTVSRLTDTTKFTGSHKERFDPSGKGKGKAGRVDLVDESGYVSGYKHAGTYDQKVQGGK

SEQ ID NO: 2192 - protein, 184 aa, Homo sapiens
MRRGPRSLRGRDAPAPTPCVPAECFDLLVRHCVACGLLRTPRPKPAGASSPAPRTALQPQESVGAGAGEAALPLPGLLFGAPALLGLALVLALVLVGLVSWRRRQRRLRGASSAEAPDGDKDAPEPLDKVIILSPGISDATAPAWPPPGEDPGTTPPGHSVPVPATELGSTELVTTKTAGPEQQ

SEQ ID NO: 2193 - protein, 185 aa, Homo sapiens
MRRGPRSLRGRDAPAPTPCVPAECFDLLVRHCVACGLLRTPRPKPAGASSPAPRTALQPQESVGAGAGEAALPLPGLLFGAPALLGLALVLALVLVGLVSWRRRQRRLRGASSAEAPDGDKDAPEPLDKVIILSPGISDATAPAAWPPPGEDPGTTPPGHSVPVPATELGSTELVTTKTAGPEQQ

SEQ ID NO: 2194 - protein, 1216 aa, Homo sapiens
MARNCSECKEKRAAHILCTYCNRWLCSSCTEEHRHSPVPGGPFFPRAQKGSPGVNGGPGDFTLYCPLHTQEVLKLFCETCDMLTCHSCLVVEHKEHRCRHVEEVLQNQRMLLEGVTTQVAHKKSSLQTSAKQIEDRIFEVKHQHRKVENQIKMAKMVLMNELNKQANGLIEELEGITNERKRKLEQQLQSIMVLNRQFEHVQNFINWAVCSKTSVPFLFSKELIVFQMQRLLETSCNTDPGSPWSIRFTWEPNFWTKQLASLGCITTEGGQMSRADAPAYGGLQGSSPFYQSHQSPVAQQEALSHPSHKFQSPAVCSSSVCCSHCSPVSPSLKGQVPPPSIHPAHSFRQPPEMVPQQLGSLQCSALLPREKELACSPHPPKLLQPWLETQPPVEQESTSQRLGQQLTSQPVCIVPPQDVQQGAHAQPTLQTPSIQVQFGHHQKLKLSHFQQQPQQQLPPPPPPLPHPPPPLPPPPQQPHPPLPPSQHLASSQHESPPGPACSQNMDIMHHKFELEEMQKDLELLLQAQQPSLQLSQTKSPQHLQQTIVGQINYIVRQPAPVQSQSQEETLQATDEPPASQGSKPALPLDKNTAAALPQASGEETPLSVPPVDSTIQHSSPNVVRKHSTSLSIMGFSNTLEMELSSTRLERPLEPQIQSVSNLTAGAPQAVPSLLSAPPKMVSSLTSVQNQAMPSLTTSHLQTVPSLVHSTFQSMPNLISDSPQAMASLASDHPQAGPSLMSGHTQAVPSLATCPLQSIPPVSDMQPETGSSSSSGRTSGSLCPRDGADPSLENALCKVKLEEPINLSVKKPPLAPVVSTSTALQQYQNPKECENFEQGALELDAKENQSIRAFNSEHKIPYVRLERLKICAASSGEMPVFKLKPQKNDQDGSFLLIIECGTESSSMSIKVSQDRLSEATQAPGLEGRKVTVTSLAGQRPPEVEGTSPEEHRLIPRTPGAKKGPPAPIENEDFCAVCLNGGELLCCDRCPKVFHLSCHVPALLSFPGGEWVCTLCRSLTQPEMEYDCENACYNQPGMRASPGLSMYDQKKCEKLVLSLCCNNLSLPFHEPVSPLARHYYQIIKRPMDLSIIRRKLQKKDPAHYTTPEEVVSDVRLMFWNCAKFNYPDSEVAEAGRCLEVFFEGWLKEIYPEKRFAQPRQEDSDSEEVSSESGCSTPQGFPWPPYMQEGIQPKRRRRHMENERAKRMSFRLANSISQV

SEQ ID NO: 2195 - protein, 1214 aa, Homo sapiens
MARNCSECKEKRAAHILCTYCNRWLCSSCTEEHRHSPVPGGPFFPRAQKGSPGVNGGPGDFTLYCPLHTQEVLKLFCETCDMLTCHSCLVVEHKEHRHVEEVLQNQRMLLEGVTTQVAHKKSSLQTSAKQIEDRIFEVKHQHRKVENQIKMAKMVLMNELNKQANGLIEELEGITNERKRKLEQQLQSIMVLNRQFEHVQNFINWAVCSKTSVPFLFSKELIVFQMQRLLETSCNTDPGSPWSIRFTWEPNFWTKQLASLGCITTEGGQMSRADAPAYGGLQGSSPFYQSHQSPVAQQEALSHPSHKFQSPAVCSSSVCCSHCSPVSPSLKGQVPPPSIHPAHSFRQPPEMVPQQLGSLQCSALLPREKELACSPHPPKLLQPWLETQPPVEQESTSQRLGQQLTSQPVCIVPPQDVQQGAHAQPTLQTPSIQVQFGHHQKLKLSHFQQQPQQQLPPPPPPLPHPPPPLPPPPQQPHPPLPPSQHLASSQHESPPGPACSQNMDIMHHKFELEEMQKDLELLLQAQQPSLQLSQTKSPQHLQQTIVGQINYIVRQPAPVQSQSQEETLQATDEPPASQGSKPALPLDKNTAAALPQASGEETPLSVPPVDSTIQHSSPNVVRKHSTSLSIMGFSNTLEMELSSTRLERPLEPQIQSVSNLTAGAPQAVPSLLSAPPKMVSSLTSVQNQAMPSLTTSHLQTVPSLVHSTFQSMPNLISDSPQAMASLASDHPQAGPSLMSGHTQAVPSLATCPLQSIPPVSDMQPETGSSSSSGRTSGSLCPRDGADPSLENALCKVKLEEPINLSVKKPPLAPVVSTSTALQQYQNPKECENFEQGALELDAKENQSIRAFNSEHKIPYVRLERLKICAASSGEMPVFKLKPQKNDQDGSFLLIIECGTESSSMSIKVSQDRLSEATQAPGLEGRKVTVTSLAGQRPPEVEGTSPEEHRLIPRTPGAKKGPPAPIENEDFCAVCLNGGELLCCDRCPKVFHLSCHVPALLSFPGGEWVCTLCRSLTQPEMEYDCENACYNQPGMRASPGLSMYDQKKCEKLVLSLCCNNLSLPFHEPVSPLARHYYQIIKRPMDLSIIRRKLQKKDPAHYTTPEEVVSDVRLMFWNCAKFNYPDSEVAEAGRCLEVFFEGWLKEIYPEKRFAQPRQEDSDSEEVSSESGCSTPQGFPWPPYMQEGIQPKRRRRHMENERAKRMSFRLANSISQV

SEQ ID NO: 2196 - protein, 465 aa, Homo sapiens
MASTTSTKKMMEEATCSICLSLMTNPVSINCGHSYCHLCITDFFKNPSQKQLRQETFCCPQCRAPFHMDSLRPNKQLGSLIEALKETDQEMSCEEHGEQFHLFCEDEGQLICWRCERAPQHKGHTTALVEDVCQGYKEKLQKAVTKLKQLEDRCTEQKLSTAMRITKWKEKVQIQRQKIRSDFKNLQCFLHEEEKSYLWRLEKEEQQTLSRLRDYEAGLGLKSNELKSHILELEEKCQGSAQKLLQNVNDTLSRSWAVKLETSEAVSLELHTMCNVSKLYFDVKKMLRSHQVSVTLDPDTAHHELILSEDRRQVTRGYTQENQDTSSRRFTAFPCVLGCEGFTSGRRYFEVDVGEGTGWDLGVCMENVQRGTGMKQEPQSGFWTLRLCKKKGYVALTSPPTSLHLHEQPLLVGIFLDYEAGVVSFYNGNTGCHIFTFPKASFSDTLRPYFQVYQYSPLFLPPPGD

SEQ ID NO: 2197 - protein, 276 aa, Homo sapiens
MAAETRNVAGAEAPPPQKRYYRQRAHSNPMADHTLRYPVKPEEMDWSELYPEFFAPLTQNQSHDDPKDKKEKRAQAQVEFADIGCGYGGLLVELSPLFPDTLILGLEIRVKVSDYVQDRIRALRAAPAGGFQNIACLRSNAMKHLPNFFYKGQLTKMFFLFPDPHFKRTKHKWRIISPTLLAEYAYVLRVGGLVYTITDVLELHDWMCTHFEEHPLFERVPLEDLSEDPVVGHLGTSTEEGKKVLRNGGKNFPAIFRRIQDPVLQAVTSQTSLPGH

SEQ ID NO: 2198 - protein, 155 aa, Homo sapiens
MAAETRNVAGAEAPPPQKRYYRQRAHSNPMADHTLRYPVKPEEMDWSELYPEFFAPLTQNQSHDDPKDKKEKRAQAQVEFADIGCGYGGLLADKDVLPLPRPTFQADKAQVANHQSHPASRICLRAKSWGAGVYHNRCAGATRLDVHSFRRAPTV

SEQ ID NO: 2199 - protein, 229 aa, Homo sapiens
MKQQQWCGMTAKMGTVLSGVFTIMAVDMYLIFEQKHLGNGSCTEITPKYRGASNIINNFIICWSFKIVLFLSFITILISCFLLYSVYAQIFRGLVIYIVWIFFYETANVVIQILTNNDFDIKEVRIMRWFGLVSRTVMHCFWMFFVINYAHITYKNRSQGNIISYKRRISTAEILHSRNKRLSISSGFSGSHLESQYFERQSFHTSIFTCLSPVPSSAPSTCRYTIDVC

SEQ ID NO: 2200 - protein, 211 aa, Homo sapiens
MKQQQWCGMTAKMGTVLSGVFTIMAVDMYLIFEQKHLGNGSCTEITPKYRGASNIINNFIICWSFKIVLFLSFITILISCFLLYSVYAQIFRGLVIYIVWIFFYETANVVIQILTNNDFDIKEVRIMRWFGLVSRTVMHCFWMFFVINYAHITYKNRSQGNIISYKRRISTAEILHSRNKRLSISSGFSGSHLESQYFERQRRCSGKTSIK

SEQ ID NO: 2201 - protein, 897 aa, Homo sapiens
MDWQPDEQGLQQVLQLLKDSQSPNTATQRIVQDKLKQLNQFPDFNNYLIFVLTRLKSEDEPTRSLSGLILKNNVKAHYQSFPPPVADFIKQECLNNIGDASSLIRATIGILITTIASKGELQMWPELLPQLCNLLNSEDYNTCEGAFGALQKICEDSSELLDSDALNRPLNIMIPKFLQFFKHCSPKIRSHAIACVNQFIMDRAQALMDNIDTFIEHLFALAVDDDPEVRKNVCRALVMLLEVRIDRLIPHMHSIIQYMLQRTQDHDENVALEACEFWLTLAEQPICKEVLASHLVQLIPILVNGMKYSEIDIILLKGDVEEDEAVPDSEQDIKPRFHKSRTVTLPHEAERPDGSEDAEDDDDDDALSDWNLRKCSAAALDVLANVFREELLPHLLPLLKGLLFHPEWVVKESGILVLGAIAEGCMQGMVPYLPELIPHLIQCLSDKKALVRSIACWTLSRYAHWVVSQPPDMHLKPLMTELLKRILDGNKRVQEAACSAFATLEEEACTELVPYLSYILDTLVFAFGKYQHKNLLILYDAIGTLADSVGHHLNQPEYIQKLMPPLIQKWNELKDEDKDLFPLLECLSSVATALQSGFLPYCEPVYQRCVTLVQKTLAQAMMYTQHPEQYEAPDKDFMIVALDLLSGLAEGLGGHVEQLVARSNIMTLLFQCMQDSMPEVRQSSFALLGDLTKACFIHVKPCIAEFMPILGTNLNPEFISVCNNATWAIGEICMQMGAEMQPYVQMVLNNLVEIINRPNTPKTLLENTGRLTSPSAIPAITIGRLGYVCPQEVAPMLQQFIRPWCTSLRNIRDNEEKDSAFRGICMMIGVNPGGVVQDFIFFCDAVASWVSPKDDLRDMFYKILHGFKDQVGEDNWQQFSEQFPPLLKERLAAFYGV

SEQ ID NO: 2202 - protein, 887 aa, Homo sapiens
MDWQPDEQGLQQVLQLLKDSQSPNTATQRIVQDKLKQLNQFPDFNNYLIFVLTRLKSEDEPTRSLSGLILKNNVKAHYQSFPPPVADFIKQECLNNIGDASSLIRATIGILITTIASKGELQMWPELLPQLCNLLNSEDYNTCEGAFGALQKICEDSSELLDSDALNRPLNIMIPKFLQFFKHCSPKIRSHAIACVNQFIMDRAQALMDNIDTFIEHLFALAVDDDPEVRKNVCRALVMLLEVRIDRLIPHMHSIIQYMLQRTQDHDENVALEACEFWLTLAEQPICKEVLASHLVQLIPILVNGMKYSEIDIILLKGDVEEDEAVPDSEQDIKPRFHKSRTVTLPHEAERPDGSEDAEDDDDDDALSDWNLRKCSAAALDVLANVFREELLPHLLPLLKGLLFHPEWVVKESGILVLGAIAEGCMQGMVPYLPELIPHLIQCLSDKKALVRSIACWTLSRYAHWVVSQPPDMHLKPLMTELLKRILDGNKRVQEAACSAFATLEEEACTELVPYLSYILDTLVFAFGKYQHKNLLILYDAIGTLADSVGHHLNQPEYIQKLMPPLIQKWNELKDEDKDLFPLLECLSSVATALQSGFLPYCEPVYQRCVTLVQKTLAQAMMYTQHPEQYEAPDKDFMIVALDLLSGLAEGLGGHVEQLVARSNIMTLLFQCMQDSMPEVRQSSFALLGDLTKACFIHVKPCIAEFMPILGTNLNPEFISVCNNATWAIGEICMQMGAEMQPYVQMVLNNLVEIINRPNTPKTLLENTAITIGRLGYVCPQEVAPMLQQFIRPWCTSLRNIRDNEEKDSAFRGICMMIGVNPGGVVQDFIFFCDAVASWVSPKDDLRDMFYKILHGFKDQVGEDNWQQFSEQFPPLLKERLAAFYGV

SEQ ID NO: 2203 - protein, 316 aa, Homo sapiens
MDWKLEGSTQKVESPVLQGQEGILEETGEDGLPEGFQLLQIDAEGECQEGEILATGSTAWCSKNVQRKQRHWEKIVAAKKSKRKQEKERRKANRAENPGICPQHSKRFLRALTKDKLLEAKHSGPRLCIDLSMTHYMSKKELSRLAGQIRRLYGSNKKADRPFWICLTGFTTDSPLYEECVRMNDGFSSYLLDITEEDCFSLFPLETLVYLTPDSEHALEDVDLNKVYILGGLVDESIQKKVTFQKAREYSVKTARLPIQEYMVRNQNGKNYHSEILAINQVFDILSTYLETHNWPEALKKGVSSGKGYILRNSVE

SEQ ID NO: 2204 - protein, 221 aa, Homo sapiens
MVLGICPQHSKRFLRALTKDKLLEAKHSGPRLCIDLSMTHYMSKKELSRLAGQIRRLYGSNKKADRPFWICLTGFTTDSPLYEECVRMNDGFSSYLLDITEEDCFSLFPLETLVYLTPDSEHALEDVDLNKVYILGGLVDESIQKKVTFQKAREYSVKTARLPIQEYMVRNQNGKNYHSEILAINQVFDILSTYLETHNWPEALKKGVSSGKGYILRNSVE

SEQ ID NO: 2205 - protein, 256 aa, Homo sapiens
MDWKLEGSTQKVESPVLQGQEGILEETGEDGLPEGFQLLQIDAEGECQEGEILATGSTAWCSKNVQRKQRHWEKIVAAKKSKRKQEKERRKANRAENPGICPQHSKRFLRALTKDKLLEAKHSGPRLCIDLSMTHYMSKKLDITEEDCFSLFPLETLVYLTPDSEHALEDVDLNKVYILGGLVDESIQKKVTFQKAREYSVKTARLPIQEYMVRNQNGKNYHSEILAINQETHNWPEALKKGVSSGKGYILRNSVE

SEQ ID NO: 2206 - protein, 174 aa, Homo sapiens
MDWKLEGSTQKVESPVLQGQEGILEETGEDGLPEGFQLLQIDAEGECQEGEILATGSTAWCSKNVQRKQRHWEKIVAAKKSKRKQEKERRKANRAENPGICPQHSKRFLRALTKDKLLEAKHSGPRLCIDLSMTHYMSKKVEHPLSLEFLLAMREAQKGTAFRRIWSTPASGIP

SEQ ID NO: 2207 - protein, 229 aa, Homo sapiens
MDWKLEGSTQKVESPVLQGQEGILEETGEDGLPEGFQLLQIDAEGECQEGEILATGSTAWCSELSRLAGQIRRLYGSNKKADRPFWICLTGFTTDSPLYEECVRMNDGFSSYLLDITEEDCFSLFPLETLVYLTPDSEHALEDVDLNKVYILGGLVDESIQKKVTFQKAREYSVKTARLPIQEYMVRNQNGKNYHSEILAINQETHNWPEALKKGVSSGKGYILRNSVE

SEQ ID NO: 2208 - protein, 475 aa, Homo sapiens
MACSLKDELLCSICLSIYQDPVSLGCEHYFCRRCITEHWVRQEAQGARDCPECRRTFAEPALAPSLKLANIVERYSSFPLDAILNARRAARPCQAHDKVKLFCLTDRALLCFFCDEPALHEQHQVTGIDDAFDELQRELKDQLQALQDSEREHTEALQLLKRQLAETKSSTKSLRTTIGEAFERLHRLLRERQKAMLEELEADTARTLTDIEQKVQRYSQQLRKVQEGAQILQERLAETDRHTFLAGVASLSERLKGKIHETNLTYEDFPTSKYTGPLQYTIWKSLFQDIHPVPAALTLDPGTAHQRLILSDDCTIVAYGNLHPQPLQDSPKRFDVEVSVLGSEAFSSGVHYWEVVVAEKTQWVIGLAHEAASRKGSIQIQPSRGFYCIVMHDGNQYSACTEPWTRLNVRDKLDKVGVFLDYDQGLLIFYNADDMSWLYTFREKFPGKLCSYFSPGQSHANGKNVQPLRINTVRI

SEQ ID NO: 2209 - protein, 354 aa, Homo sapiens
MPEKTAVDQPWTQALRELKDQLQALQDSEREHTEALQLLKRQLAETKSSTKSLRTTIGEAFERLHRLLRERQKAMLEELEADTARTLTDIEQKVQRYSQQLRKVQEGAQILQERLAETDRHTFLAGVASLSERLKGKIHETNLTYEDFPTSKYTGPLQYTIWKSLFQDIHPVPAALTLDPGTAHQRLILSDDCTIVAYGNLHPQPLQDSPKRFDVEVSVLGSEAFSSGVHYWEVVVAEKTQWVIGLAHEAASRKGSIQIQPSRGFYCIVMHDGNQYSACTEPWTRLNVRDKLDKVGVFLDYDQGLLIFYNADDMSWLYTFREKFPGKLCSYFSPGQSHANGKNVQPLRINTVRI

SEQ ID NO: 2210 - protein, 449 aa, Homo sapiens
MDSDDLQVFQNELICCICVNYFIDPVTIDCGHSFCRPCLCLCSEEGRAPMRCPSCRKTSEKPNFNTNLVLKKLSSLARQTRPQNINSSDNICVLHEETKELFCEADKRLLCGPCSESPEHMAHSHSPIGWAAEECREKLIKEMDYLWEINQETRNNLNQETSTFHSLKDYVSVRKRIITIQYQKMPIFLDEEEQRHLQALEREAEELFQQLQDSQVRMTQHLERMKDMYRELWETCHMPDVVLLQDVRNVSARTDLAQMQKPQPVNPELTSWCITGVLDMLNNFRVDSALSTEMIPCYISLSEDVRYVIFGDDHLSAPTDPQGVDSFAVWGAQAFTSGKHYWEVDVTLSSNWILGVCRDSRTADANFVIDSDERFFLISSKRSNHYSLSTNSPPLIQYVQRPLGRVGVFLDYDNGSVSFFDVSKGSLIYGFPPSSFSSPLRPFFCFGCT

SEQ ID NO: 2211 - protein, 452 aa, Homo sapiens
MNSGILQVFQGELICPLCMNYFIDPVTIDCGHSFCRPCFYLNWQDIPFLVQCSECTKSTEQINLKTNIHLKKMASLARKVSLWLFLSSEEQMCGTHRETKKIFCEVDRSLLCLLCSSSQEHRYHRHRPIEWAAEEHREKLLQKMQSLWEKACENHRNLNVETTRTRCWKDYVNLRLEAIRAEYQKMPAFHHEEEKHNLEMLKKKGKEIFHRLHLSKAKMAHRMEILRGMYEELNEMCHKPDVELLQAFGDILHRSESVLLHMPQPLNPELSAGPITGLRDRLNQFRVHITLHHEEANSDIFLYEILRSMCIGCDHQDVPYFTATPRSFLAWGVQTFTSGKYYWEVHVGDSWNWAFGVCNMYRKEKNQNEKIDGKEGLFLLGCIKNDIQCSLFTTSPLMLQYIPKPTSRVGLFLDCEAKTVSFVDVNQSSLIYTIPNCSFSPPLRPIFCCIHF

SEQ ID NO: 2212 - protein, 606 aa, Homo sapiens
MTVVGNPRSWSCQWLPILILLLGTGHGPGVEGVTHYKAGDPVILYVNKVGPYHNPQETYHYYQLPVCCPEKIRHKSLSLGEVLDGDRMAESLYEIRFRENVEKRILCHMQLSSAQVEQLRQAIEELYYFEFVVDDLPIRGFVGYMEESGFLPHSHKIGLWTHLDFHLEFHGDRIIFANVSVRDVKPHSLDGLRPDEFLGLTHTYSVRWSETSVERRSDRRRGDDGGFFPRTLEIHWLSIINSMVLVFLLVGFVAVILMRVLRNDLARYNLDEETTSAGSGDDFDQGDNGWKIIHTDVFRFPPYRGLLCAVLGVGAQFLALGTGIIVMALLGMFNVHRHGAINSAAILLYALTCCISGYVSSHFYRQIGGERWVWNIILTTSLFSVPFFLTWSVVNSVHWANGSTQALPATTILLLLTVWLLVGFPLTVIGGIFGKNNASPFDAPCRTKNIAREIPPQPWYKSTVIHMTVGGFLPFSAISVELYYIFATVWGREQYTLYGILFFVFAILLSVGACISIALTYFQLSGEDYRWWWRSVLSVGSTGLFIFLYSVFYYARRSNMSGAVQTVEFFGYSLLTGYVFFLMLGTISFFSSLKFIRYIYVNLKMD

SEQ ID NO: 2213 - protein, 489 aa, Homo sapiens
MTVVGNPRSWSCQWLPILILLLGTGHGPGVEGVTHYKAGDPVILYVNKVGPYHNPQETYHYYQLPVCCPEKIRHKSLSLGEVLDGDRMAESLYEIRFRENVEKRILCHMQLSSAQVEQLRQAIEELYYFEFVVDDLPIRGFVGYMEESGFLPHSHKIGLWTHLDFHLEFHGDRIIFANVSVRDVKPHSLDGLRPDEFLGLTHTYSVRWSETSVERRSDRRRGDDGGFFPRTLEIHWLSIINSMVLVFLLVGFVAVILMRVLRNDLARYNLDEETTSAGSGDDFDQGDNGWKIIHTDVFRFPPYRGLLCAVLGVGAQFLALGTGIIVMALLGMFNVHRHGAINSAAILLYALTCCISGYVSSHFYRQIGGERWVWNIILTTSLFSVPFFLTWSVVNSVHWANGSTQALPATTILLLLTVWLLVGFPLTVIGGIFGKNNASPFDAPCRTKNIAREIPPQPWYKSTVIHMTVGGFLPFRYPPFIPWLLLSGS

SEQ ID NO: 2214 - protein, 280 aa, Homo sapiens
MAPSGSLAVPLAVLVLLLWGAPWTHGRRSNVRVITDENWRELLEGDWMIEFYAPWCPACQNLQPEWESFAEWGEDLEVNIAKVDVTEQPGLSGRFIITALPTIYHCKDGEFRRYQGPRTKKDFINFISDKEWKSIEPVSSWFGPGSVLMSSMSALFQLSMWIRTCHNYFIEDLGLPVWGSYTVFALATLFSGLLLGLCMIFVADCLCPSKRRRPQPYPYPSKKLLSESAQPLKKVEEEQEADEEDVSEEEAESKEGTNKDFPQNAIRQRSLGPSLATDKS

SEQ ID NO: 2215 - protein, 154 aa, Homo sapiens
MALLLSVLRVLLGGFFALVGLAKLSEEISAPVSERMNALFVQFAEVFPLKVFGYQPDPLNYQIAVGFLELLAGLLLVMGPPMLQEISNLFLILLMMGAIFTLAALKESLSTCIPAIVCLGFLLLLNVGQLLAQTKKVVRPTRKKTLSTFKESWK

SEQ ID NO: 2216 - protein, 397 aa, Homo sapiens
MLRGPWRQLWLFFLLLLPGAPEPRGASRPWEGTDEPGSAWAWPGFQRLQEQLRAAGALSKRYWTLFSCQVWPDDCDEDEEAATGPLGWRLPLLGQRYLDLLTTWYCSFKDCCPRGDCRISNNFTGLEWDLNVRLHGQHLVQQLVLRTVRGYLETPQPEKALALSFHGWSGTGKNFVARMLVENLYRDGLMSDCVRMFIATFHFPHPKYVDLYKEQLMSQIRETQQLCHQTLFIFDEAEKLHPGLLEVLGPHLERRAPEGHRAESPWTIFLFLSNLRGDIINEVVLKLLKAGWSREEITMEHLEPHLQAEIVETIDNGFGHSRLVKENLIDYFIPFLPLEYRHVRLCARDAFLSQELLYKEETLDEIAQMMVYVPKEEQLFSSQGCKSISQRINYFLS

SEQ ID NO: 2217 - protein, 336 aa, Homo sapiens
MLRGPWRQLWLFFLLLLPGAPEPRGASRPWEGTDEPGSAWAWPGFQRLQEQLRAAGALSKRYWTLFSCQVWPDDCDEDEEAATGPLGWRLPLLGQRYLDLLTTWYCSFKDCCPRGDCRISNNFTGLEWDLNVRLHGQHLVQQLVLRTVRGYLETPQPEKALALSFHGWSGTGKNFVARMLVENLYRDGLMSDCVRMFIATFHFPHPKYVDLYKEQLMSQIRETQQLCHQTLFIFDEAEKLHPGLLEVLGPHLERRAPEGHRAESPWTIFLFLSNLRGDIINEVVLKLLKAGWSREEITMEHLEPHLQAEIVETIGFSFLTTRWPHLDLPTSSVAPT

SEQ ID NO: 2218 - protein, 181 aa, Homo sapiens
MSQIRETQQLCHQTLFIFDEAEKLHPGLLEVLGPHLERRAPEGHRAESPWTIFLFLSNLRGDIINEVVLKLLKAGWSREEITMEHLEPHLQAEIVETIDNGFGHSRLVKENLIDYFIPFLPLEYRHVRLCARDAFLSQELLYKEETLDEIAQMMVYVPKEEQLFSSQGCKSISQRINYFLS

SEQ ID NO: 2219 - protein, 264 aa, Homo sapiens
MRPLLGLLLVFAGCTFALYLLSTRLPRGRRLGSTEEAGGRSLWFPSDLAELRELSEVLREYRKEHQAYVFLLFCGAYLYKQGFAIPGSSFLNVLAGALFGPWLGLLLCCVLTSVGATCCYLLSSIFGKQLVVSYFPDKVALLQRKVEENRNSLFFFLLFLRLFPMTPNWFLNLSAPILNIPIVQFFFSVLIGLIPYNFICVQTGSILSTLTSLDALFSWDTVFKLLAIAMVALIPGTLIKKFSQKHLQLNETSTANHIHSRKDT

SEQ ID NO: 2220 - protein, 247 aa, Homo sapiens
MAGGVLPLRGLRALCRVLLFLSQFCILSGGEQSQALAQSIKDPGPTRTFTVVPRAAESTEIPPYVMKCPSNGLCSRLPADCIDCTTNFSCTYGKPVTFDCAVKPSVTCVDQDFKSQKNFIINMTCRFCWQLPETDYECTNSTSCMTVSCPRQRYPANCTVRDHVHCLGNRTFPKMLYCNWTGGYKWSTALALSITLGGFGADRFYLGQWREGLGKLFSFGGLGIWTLIDVLLIGVGYVGPADGSLYI

SEQ ID NO: 2221 - protein, 221 aa, Homo sapiens
MAGGVLPLRGLRALCRVLLFLSQFCILSGGESTEIPPYVMKCPSNGLCSRLPADCIDCTTNFSCTYGKPVTFDCAVKPSVTCVDQDFKSQKNFIINMTCRFCWQLPETDYECTNSTSCMTVSCPRQRYPANCTVRDHVHCLGNRTFPKMLYCNWTGGYKWSTALALSITLGGFGADRFYLGQWREGLGKLFSFGGLGIWTLIDVLLIGVGYVGPADGSLYI

SEQ ID NO: 2222 - protein, 677 aa, Homo sapiens
MKVLGRSFFWVLFPVLPWAVQAVEHEEVAQRVIKLHRGRGVAAMQSRQWVRDSCRKLSGLLRQKNAVLNKLKTAIGAVEKDVGLSDEEKLFQVHTFEIFQKELNESENSVFQAVYGLQRALQGDYKDVVNMKESSRQRLEALREAAIKEETEYMELLAAEKHQVEALKNMQHQNQSLSMLDEILEDVRKAADRLEEEIEEHAFDDNKSVKGVNFEAVLRVEEEEANSKQNITKREVEDDLGLSMLIDSQNNQYILTKPRDSTIPRADHHFIKDIVTIGMLSLPCGWLCTAIGLPTMFGYIICGVLLGPSGLNSIKSIVQVETLGEFGVFFTLFLVGLEFSPEKLRKVWKISLQGPCYMTLLMIAFGLLWGHLLRIKPTQSVFISTCLSLSSTPLVSRFLMGSARGDKEGDIDYSTVLLGMLVTQDVQLGLFMAVMPTLIQAGASASSSIVVEVLRILVLIGQILFSLAAVFLLCLVIKKYLIGPYYRKLHMESKGNKEILILGISAFIFLMLTVTELLDVSMELGCFLAGALVSSQGPVVTEEIATSIEPIRDFLAIVFFASIGLHVFPTFVAYELTVLVFLTLSVVVMKFLLAALVLSLILPRSSQYIKWIVSAGLAQVSEFSFVLGSRARRAGVISREVYLLILSVTTLSLLLAPVLWRAAITRCVPRPERRSSL

SEQ ID NO: 2223 - protein, 524 aa, Homo sapiens
MKVLGRSFFWVLFPVLPWAVQAVEHEEVAQRVIKLHRGRGVAAMQSRQWVRDSCRKLSGLLRQKNAVLNKLKTAIGAVEKDVGLSDEEKLFQVHTFEIFQKELNESENSVFQAVYGLQRALQGDYKDVVNMKESSRQRLEALREAAIKEETEYMELLAAEKHQVEALKNMQHQNQSLSMLDEILEDVRKAADRLEEEIEEHAFDDNKSVKGVNFEAVLRVEEEEANSKQNITKREVEDDLGLSMLIDSQNNQYILTKPRDSTIPRADHHFIKDIVTIGMLSLPCGWLCTAIGLPTMFGYIICGVLLGPSGLNSIKSIVQVETLGEFGVFFTLFLVGLEFSPEKLRKVWKISLQGPCYMTLLMIAFGLLWGHLLRIKPTQSVFISTCLSLSSTPLVSRFLMGSARGDKEGDIDYSTVLLGMLVTQDVQLGLFMAVMPTLIQAGASASSSIVVEVLRILVLIGQILFSLAAVFLLCLVIKKYLIGPYYRKLHMESKGNKEILILGISAFIFLMLTVILKLCVIYVI

SEQ ID NO: 2224 - protein, 414 aa, Homo sapiens
MKVLGRSFFWVLFPVLPWAVQAVEHEEVAQRVIKLHRGRGVAAMQSRQWVRDSCRKLSGLLRQKNAVLNKLKTAIGAVEKDVGLSDEEKLFQVHTFEIFQKELNESENSVFQAVYGLQRALQGDYKDVVNMKESSRQRLEALREAAIKEETEYMELLAAEKHQVEALKNMQHQNQSLSMLDEILEDVRKAADRLEEEIEEHAFDDNKSVKGVNFEAVLRVEEEEANSKQNITKREVEDDLGLSMLIDSQNNQYILTKPRDSTIPRADHHFIKDIVTIGMLSLPCGWLCTAIGLPTMFGYIICGVLLGPSGLNSIKSIVQVETLGEFGVFFTLFLVGLEFSPEKLRKVWKISLQGPCYMTLLMIAFGLLWGHLLRIKPTQSVFISTCLSLSSTPLVSRFLMGSARGDKEGNRTAL

SEQ ID NO: 2225 - protein, 159 aa, Homo sapiens
MAERPGPPGGAVSATAYPDTPAEFPPHLQAGAMRRRFWGVFNCLCAGAFGALAAASAKLAFGSEVSMGLCVLGIIVMASTNSLMWTFFSRGLSFSMSSAIASVTVTFSNILSSAFLGYVLYGECQEVLWWGGVFLILCGLTLIHRKLPPTWKPLPHKQQ

SEQ ID NO: 2226 - protein, 224 aa, Homo sapiens
MPGSPRPAPSWVLLLRLLALLRPPGLGEACSCAPAHPQQHICHSALVIRAKISSEKVVPASADPADTEKMLRYEIKQIKMFKGFEKVKDVQYIYTPFDSSLCGVKLEANSQKQYLLTGQVLSDGKVFIHLCNYIEPWEDLSLVQRESLNHHYHLNCGCQITTCYTVPCTISAPNECLWTDWLLERKLYGYQAQHYVCMKHVDGTCSWYRGHLPLRKEFVDIVQP

SEQ ID NO: 2227 - protein, 217 aa, Homo sapiens
MDLAQPSQPVDELELSVLERQPEENTPLNGADKVFPSLDEEVPPAEANKESPWSSCNKNVVGRCKLWMIITSIFLGVITVIIIGLCLAAVTYVDEDENEILELSSNKTFFIMLKIPEECVAEEELPHLLTERLTDVYSTSPSLGRYFTSVEIVDFSGENATVTYDLQFGVPSDDENFMKYMMSEELVLGILLQDFRDQNIPGCESLGLDPTSLLLYE

SEQ ID NO: 2228 - protein, 147 aa, Homo sapiens
MDLAQPSQPVDELELSVLERQPEENTPLNGADKVFPSLDEEVPPAEANKESPWSSCNKNVVGRCKLWMIITSIFLGVITVIIIGLCLAAVTYVDEDENEILELSSNKTFFIMLKIPEECVAEEELPHLLTEREVGLKPNPEALVGFE

SEQ ID NO: 2229 - protein, 250 aa, Homo sapiens
MDLAQPSQPVDELELSVLERQPEENTPLNGADKVFPSLDEEVPPAEANKESPWSSCNKNVVGRCKLWMIITSIFLGVITVIIIGLCLAAVTYVDEDENEILELSSNKTFFIMLKIPEECVAEEELPHLLTERNEVMEAGLCLKAVLYQVLEMKGIHSVLQKRFCGLIQKHQQHQRGGDSFLSRFYSLALSPVKQLPSTASAGSSLDKGRKPARVGAIGSAGMSHCWRSLVFCLFLFCFVLFFETGSRSVA

SEQ ID NO: 2230 - protein, 192 aa, Homo sapiens
MAAWGRRRLGPGSSGGSARERVSLSATDCYIVHEIYNGENAQDQFEYELEQALEAQYKYIVIEPTRIGDETARWITVGNCLHKTAVLAGTACLFTPLALPLDYSHYISLPAGVLSLACCTLYGISWQFDPCCKYQVEYDAYKLSRLPLHTLTSSTPVVLVRKDDLHRKRLHNTIALAALVYCVKKIYELYAV

SEQ ID NO: 2231 - protein, 377 aa, Homo sapiens
MYTFVVRDENSSVYAEVSRLLLATGHWKRLRRDNPRFNLMLGERNRLPFGRLGHEPGLVQLVNYYRGADKLCRKASLVKLIKTSPELAESCTWFPESYVIYPTNLKTPVAPAQNGIQPPISNSRTDEREFFLASYNRKKEDGEGNVWIAKSSAGAKGEGILISSEASELLDFIDNQGQVHVIQKYLEHPLLLEPGHRKFDIRSWVLVDHQYNIYLYREGVLRTASEPYHVDNFQDKTCHLTNHCIQKEYSKNYGKYEEGNEMFFKEFNQYLTSALNITLESSILLQIKHIIRNCLLSVEPAISTKHLPYQSFQLFGFDFMVDEELKVWLIEVNGAPACAQKLYAELCQGIVDIAISSVFPPPDVEQPQTQPAAFIKL

SEQ ID NO: 2232 - protein, 283 aa, Homo sapiens
MARRPRAPAASGEEFSFVSPLVKYLLFFFNMLFWVISMVMVAVGVYARLMKHAEAALACLAVDPAILLIVVGVLMFLLTFCGCIGSLRENICLLQTFSLCLTAVFLLQLAAGILGFVFSDKARGKVSEIINNAIVHYRDDLDLQNLIDFGQKKFSCCGGISYKDWSQNMYFNCSEDNPSRERCSVPYSCCLPTPDQAVINTMCGQGMQAFDYLEASKVIYTNGCIDKLVNWIHSNLFLLGGVALGLAIPQLVGILLSQILVNQIKDQIKLQLYNQQHRADPWY

SEQ ID NO: 2233 - protein, 1321 aa, Homo sapiens
MQCLAAALKDETNMSGGGEQADILPANYVVKDRWKVLKKIGGGGFGEIYEAMDLLTRENVALKVESAQQPKQVLKMEVAVLKKLQGKDHVCRFIGCGRNEKFNYVVMQLQGRNLADLRRSQPRGTFTLSTTLRLGKQILESIEAIHSVGFLHRDIKPSNFAMGRLPSTYRKCYMLDFGLARQYTNTTGDVRPPRNVAGFRGTVRYASVNAHKNREMGRHDDLWSLFYMLVEFAVGQLPWRKIKDKEQVGMIKEKYEHRMLLKHMPSEFHLFLDHIASLDYFTKPDYQLIMSVFENSMKERGIAENEAFDWEKAGTDALLSTSTSTPPQQNTRQTAAMFGVVNVTPVPGDLLRENTEDVLQGEHLSDQENAPPILPGRPSEGLGPSPHLVPHPGGPEAEVWEETDVNRNKLRINIGKSPCVEEEQSRGMGVPSSPVRAPPDSPTTPVRSLRYRRVNSPESERLSTADGRVELPERRSRMDLPGSPSRQACSSQPAQMLSVDTGHADRQASGRMDVSASVEQEALSNAFRSVPLAEEEDFDSKEWVIIDKETELKDFPPGAEPSTSGTTDEEPEELRPLPEEGEERRRLGAEPTVRPRGRSMQALAEEDLQHLPPQPLPPQLSQGDGRSETSQPPTPGSPSHSPLHSGPRPRRRESDPTGPQRQVFSVAPPFEVNGLPRAVPLSLPYQDFKRDLSDYRERARLLNRVRRVGFSHMLLTTPQVPLAPVQPQANGKEEEEEEEEDEEEEEEDEEEEEEEEEEEEEEEEEEEEEEEAAAAVALGEVLGPRSGSSSEGSERSTDRSQEGAPSTLLADDQKESRGRASMADGDLEPEEGSKTLVLVSPGDMKKSPVTAELAPDPDLGTLAALTPQHERPQPTGSQLDVSEPGTLSSVLKSEPKPPGPGAGLGAGTVTTGVGGVAVTSSPFTKVERTFVHIAEKTHLNVMSSGGQALRSEEFSAGGELGLELASDGGAVEEGARAPLENGLALSGLNGAEIEGSALSGAPRETPSEMATNSLPNGPALADGPAPVSPLEPSPEKVATISPRRHAMPGSRPRSRIPVLLSEEDTGSEPSGSLSAKERWSKRARPQQDLARLVMEKRQGRLLLRLASGASSSSSEEQRRASETLSGTGSEEDTPASEPAAALPRKSGRAAATRSRIPRPIGLRMPMPVAAQQPASRSHGAAPALDTAITSRLQLQTPPGSATAADLRPKQPPGRGLGPGRAQAGARPPAPRSPRLPASTSAARNASASPRSQSLSRRESPSPSHQARPGVPPPRGVPPARAQPDGTPSPGGSKKGPRGKLQAQRATTKGRAGGAEGRAGAR

SEQ ID NO: 2234 - protein, 621 aa, Homo sapiens
MDLLTRENVALKVESAQQPKQVLKMEVAVLKKLQGKDHVCRFIGCGRNEKFNYVVMQLQGRNLADLRRSQPRGTFTLSTTLRLGKQILESIEAIHSVGFLHRDIKPSNFAMGRLPSTYRKCYMLDFGLARQYTNTTGDVRPPRNVAGFRGTVRYASVNAHKNREMGRHDDLWSLFYMLVEFAVGQLPWRKIKDKEQVGMIKEKYEHRMLLKHMPSEFHLFLDHIASLDYFTKPDYQLIMSVFENSMKERGIAENEAFDWEKAGTDALLSTSTSTPPQQNTRQTAAMFGVVNVTPVPGDLLRENTEDVLQGEHLSDQENAPPILPGRPSEGLGPSPHLVPHPGGPEAEVWEETDVNRNKLRINIGKSPCVEEEQSRGMGVPSSPVRAPPDSPTTPVRSLRYRRVNSPESERLSTADGRVELPERRSRMDLPGSPSRQACSSQPAQMLSVDTGHADRQASGRMDVSASVEQEALSNAFRSVPLAEEEDFDSKEWVIIDKETELKDFPPGAEPSTSGTTDEEPEELRPLPEEGEERRRLGAEPFPLTPALGTPPSTERVGPHRPTETVGGGQTLGALPPAVQPPATTGVLRVLLLHAGDGALPSPRRRRLLGLLRFPHSAQPLG

SEQ ID NO: 2235 - protein, 311 aa, Homo sapiens
MPAPRAPRALAAAAPASGKAKLTHPGKAILAGGLAGGIEICITFPTEYVKTQLQLDERSHPPRYRGIGDCVRQTVRSHGVLGLYRGLSSLLYGSIPKAAVRFGMFEFLSNHMRDAQGRLDSTRGLLCGLGAGVAEAVVVVCPMETIKVKFIHDQTSPNPKYRGFFHGVREIVREQGLKGTYQGLTATVLKQGSNQAIRFFVMTSLRNWYRGDNPNKPMNPLITGVFGAIAGAASVFGNTPLDVIKTRMQGLEAHKYRNTWDCGLQILKKEGLKAFYKGTVPRLGRVCLDVAIVFVIYDEVVKLLNKVWKTD

SEQ ID NO: 2236 - protein, 711 aa, Homo sapiens
MAQVRETSLPSGSGVRWISGGGGGASPEEAVEKAGKMEEAAAGATKASSRREAEEMKLEPLQEREPAPEENLTWSSSGGDEKVLPSIPLRCHSSSSPVCPRRKPRPRPQPRARSRSQPGLSAPPPPPARPPPPPPPPPPPAPRPRAWRGSRRRSRPGSRPQTRRSCSGDLDGSGDPGGLGDWLLEVEFGQGPTGCSHVESFKVGKNWQKNLRLIYQRFVWSGTPETRKRKAKSCICHVCSTHMNRLHSCLSCVFFGCFTEKHIHKHAETKQHHLAVDLYHGVIYCFMCKDYVYDKDIEQIAKETKEKILRLLTSTSTDVSHQQFMTSGFEDKQSTCETKEQEPKLVKPKKKRRKKSVYTVGLRGLINLGNTCFMNCIVQALTHIPLLKDFFLSDKHKCIMTSPSLCLVCEMSSLFHAMYSGSRTPHIPYKLLHLIWIHAEHLAGYRQQDAHEFLIAILDVLHRHSKDDSGGQEANNPNCCNCIIDQIFTGGLQSDVTCQACHSVSTTIDPCWDISLDLPGSCATFDSQNPERADSTVSRDDHIPGIPSLTDCLQWFTRPEHLGSSAKIKCNSCQSYQESTKQLTMKKLPIVACFHLKRFEHVGKQRRKINTFISFPLELDMTPFLASTKESRMKEGQPPTDCVPNENKYSLFAVINHHGTLESGHYTSFIRQQKDQWFSCDDAIITKATIEDLLYSEGYLLFYHKQGLEKD

SEQ ID NO: 2237 - protein, 588 aa, Homo sapiens
MASKKREVQLQTVINNQSLWDEMLQNKGLTVIDVYQAWCGPCRAMQPLFRKLKNELNEDEILHFAVAEADNIVTLQPFRDKCEPVFLFSVNGKIIEKIQGANAPLVNKKVINLIDEERKIAAGEMARPQYPEIPLVDSDSEVSEESPCESVQELYSIAIIKPDAVISKKVLEIKRKITKAGFIIEAEHKTVLTEEQVVNFYSRIADQCDFEEFVSFMTSGLSYILVVSQGSKHNPPSEETEPQTDTEPNERSEDQPEVEAQVTPGMMKNKQDSLQEYLERQHLAQLCDIEEDAANVAKFMDAFFPDFKKMKSMKLEKTLALLRPNLFHERKDDVLRIIKDEDFKILEQRQVVLSEKEAQALCKEYENEDYFNKLIENMTSGPSLALVLLRDNGLQYWKQLLGPRTVEEAIEYFPESLCAQFAMDSLPVNQLYGSDSLETAEREIQHFFPLQSTLGLIKPHATSEQREQILKIVKEAGFDLTQVKKMFLTPEQIEKIYPKVTGKDFYKDLLEMLSVGPSMVMILTKWNAVAEWRRLMGPTDPEEAKLLSPDSIRAQFGISKLKNIVHGASNAYEAKEVVNRLFEDPEEN

SEQ ID NO: 2238 - protein, 530 aa, Homo sapiens
MARAGWTSPVPLCVCLLLTCGFAEAGKLLVVPMDGSHWFTMQSVVEKLILRGHEVVVVMPEVSWQLERSLNCTVKTYSTSYTLEDQNREFMVFAHAQWKAQAQSIFSLLMSSSSGFLDLFFSHCRSLFNDRKLVEYLKESSFDAVFLDPFDTCGLIVAKYFSLPSVVFTRGIFCHHLEEGAQCPAPLSYVPNDLLGFSDAMTFKERVWNHIVHLEDHLFCQYLFRNALEIASEILQTPVTAYDLYSHTSIWLLRTDFVLDYPKPVMPNMIFIGGINCHQGKPLPMEFEAYINASGEHGIVVFSLGSMVSEIPEKKAMAIADALGKIPQTVLWRYTGTRPSNLANNTILVKWLPQNDLLGHPMTRAFITHAGSHGVYESICNGVPMVMMPLFGDQMDNAKRMETKGAGVTLNVLEMTSEDLENALKAVINDKSYKENIMRLSSLHKDRPVEPLDLAVFWVEFVMRHKGAPHLRPAAHDLTWYQYHSLDVIGFLLAVVLTVAFITFKCCAYGYRKCLGKKGRVKKAHKSKTH

SEQ ID NO: 2239 - protein, 441 aa, Homo sapiens
MARAGWTSPVPLCVCLLLTCGFAEAGKLLVVPMDGSHWFTMQSVVEKLILRGHEVVVVMPEVSWQLERSLNCTVKTYSTSYTLEDQNREFMVFAHAQWKAQAQSIFSLLMSSSSGFLDLFFSHCRSLFNDRKLVEYLKESSFDAVFLDPFDTCGLIVAKYFSLPSVVFTRGIFCHHLEEGAQCPAPLSYVPNDLLGFSDAMTFKERVWNHIVHLEDHLFCQYLFRNALEIASEILQTPVTAYDLYSHTSIWLLRTDFVLDYPKPVMPNMIFIGGINCHQGKPLPMEFEAYINASGEHGIVVFSLGSMVSEIPEKKAMAIADALGKIPQTVLWRYTGTRPSNLANNTILVKWLPQNDLLGHPMTRAFITHAGSHGVYESICNGVPMVMMPLFGDQMDNAKRMETKGAGVTLNVLEMTSEDLENALKAVINDKRKKQQSGRQM

SEQ ID NO: 2240 - protein, 2799 aa, Homo sapiens
MTSIHFVVHPLPGTEDQLNDRLREVSEKLNKYNLNSHPPLNVLEQATIKQCVVGPNHAAFLLEDGRVCRIGFSVQPDRLELGKPDNNDGSKLNSNSGAGRTSRPGRTSDSPWFLSGSETLGRLAGNTLGSRWSSGVGGSGGGSSGRSSAGARDSRRQTRVIRTGRDRGSGLLGSQPQPVIPASVIPEELISQAQVVLQGKSRSVIIRELQRTNLDVNLAVNNLLSRDDEDGDDGDDTASESYLPGEDLMSLLDADIHSAHPSVIIDADAMFSEDISYFGYPSFRRSSLSRLGSSRVLLLPLERDSELLRERESVLRLRERRWLDGASFDNERGSTSKEGEPNLDKKNTPVQSPVSLGEDLQWWPDKDGTKFICIGALYSELLAVSSKGELYQWKWSESEPYRNAQNPSLHHPRATFLGLTNEKIVLLSANSIRATVATENNKVATWVDETLSSVASKLEHTAQTYSELQGERIVSLHCCALYTCAQLENSLYWWGVVPFSQRKKMLEKARAKNKKPKSSAGISSMPNITVGTQVCLRNNPLYHAGAVAFSISAGIPKVGVLMESVWNMNDSCRFQLRSPESLKNMEKASKTTEAKPESKQEPVKTEMGPPPSPASTCSDASSIASSASMPYKRRRSTPAPKEEEKVNEEQWSLREVVFVEDVKNVPVGKVLKVDGAYVAVKFPGTSSNTNCQNSSGPDADPSSLLQDCRLLRIDELQVVKTGGTPKVPDCFQRTPKKLCIPEKTEILAVNVDSKGVHAVLKTGNWVRYCIFDLATGKAEQENNFPTSSIAFLGQNERNVAIFTAGQESPIILRDGNGTIYPMAKDCMGGIRDPDWLDLPPISSLGMGVHSLINLPANSTIKKKAAVIIMAVEKQTLMQHILRCDYEACRQYLMNLEQAVVLEQNLQMLQTFISHRCDGNRNILHACVSVCFPTSNKETKEEEEAERSERNTFAERLSAVEAIANAISVVSSNGPGNRAGSSSSRSLRLREMMRRSLRAAGLGRHEAGASSSDHQDPVSPPIAPPSWVPDPPAMDPDGDIDFILAPAVGSLTTAATGTGQGPSTSTIPGPSTEPSVVESKDRKANAHFILKLLCDSVVLQPYLRELLSAKDARGMTPFMSAVSGRAYPAAITILETAQKIAKAEISSSEKEEDVFMGMVCPSGTNPDDSPLYVLCCNDTCSFTWTGAEHINQDIFECRTCGLLESLCCCTECARVCHKGHDCKLKRTSPTAYCDCWEKCKCKTLIAGQKSARLDLLYRLLTATNLVTLPNSRGEHLLLFLVQTVARQTVEHCQYRPPRIREDRNRKTASPEDSDMPDHDLEPPRFAQLALERVLQDWNALKSMIMFGSQENKDPLSASSRIGHLLPEEQVYLNQQSGTIRLDCFTHCLIVKCTADILLLDTLLGTLVKELQNKYTPGRREEAIAVTMRFLRSVARVFVILSVEMASSKKKNNFIPQPIGKCKRVFQALLPYAVEELCNVAESLIVPVRMGIARPTAPFTLASTSIDAMQGSEELFSVEPLPPRPSSDQSSSSSQSQSSYIIRNPQQRRISQSQPVRGRDEEQDDIVSADVEEVEVVEGVAGEEDHHDEQEEHGEENAEAEGQHDEHDEDGSDMELDLLAAAETESDSESNHSNQDNASGRRSVVTAATAGSEAGASSVPAFFSEDDSQSNDSSDSDSSSSQSDDIEQETFMLDEPLERTTNSSHANGAAQAPRSMQWAVRNTQHQRAASTAPSSTSTPAASSAGLIYIDPSNLRRSGTISTSAAAAAAALEASNASSYLTSASSLARAYSIVIRQISDLMGLIPKYNHLVYSQIPAAVKLTYQDAVNLQNYVEEKLIPTWNWMVSIMDSTEAQLRYGSALASAGDPGHPNHPLHASQNSARRERMTAREEASLRTLEGRRRATLLSARQGMMSARGDFLNYALSLMRSHNDEHSDVLPVLDVCSLKHVAYVFQALIYWIKAMNQQTTLDTPQLERKRTRELLELGIDNEDSEHENDDDTNQSATLNDKDDDSLPAETGQNHPFFRRSDSMTFLGCIPPNPFEVPLAEAIPLADQPHLLQPNARKEDLFGRPSQGLYSSSASSGKCLMEVTVDRNCLEVLPTKMSYAANLKNVMNMQNRQKKEGEEQPVLPEETESSKPGPSAHDLAAQLKSSLLAEIGLTESEGPPLTSFRPQCSFMGMVISHDMLLGRWRLSLELFGRVFMEDVGAEPGSILTELGGFEVKESKFRREMEKLRNQQSRDLSLEVDRDRDLLIQQTMRQLNNHFGRRCATTPMAVHRVKVTFKDEPGEGSGVARSFYTAIAQAFLSNEKLPNLECIQNANKGTHTSLMQRLRNRGERDREREREREMRRSSGLRAGSRRDRDRDFRRQLSIDTRPFRPASEGNPSDDPEPLPAHRQALGERLYPRVQAMQPAFASKITGMLLELSPAQLLLLLASEDSLRARVDEAMELIIAHGRENGADSILDLGLVDSSEKVQQENRKRHGSSRSVVDMDLDDTDDGDDNAPLFYQPGKRGFYTPRPGKNTEARLNCFRNIGRILGLCLLQNELCPITLNRHVIKVLLGRKVNWHDFAFFDPVMYESLRQLILASQSSDADAVFSAMDLAFAIDLCKEEGGGQVELIPNGVNIPVTPQNVYEYVRKYAEHRMLVVAEQPLHAMRKGLLDVLPKNSLEDLTAEDFRLLVNGCGEVNVQMLISFTSFNDESGENAEKLLQFKRWFWSIVEKMSMTERQDLVYFWTSSPSLPASEEGFQPMPSITIRPPDDQHLPTANTCISRLYVPLYSSKQILKQKLLLAIKTKNFGFV

SEQ ID NO: 2241 - protein, 2798 aa, Homo sapiens
MTSIHFVVHPLPGTEDQLNDRLREVSEKLNKYNLNSHPPLNVLEQATIKQCVVGPNHAAFLLEDGRVCRIGFSVQPDRLELGKPDNNDGSKLNSNSGAGRTSRPGRTSDSPWFLSGSETLGRLAGNTLGSRWSSGVGGSGGGSSGRSSAGARDSRRQTRVIRTGRDRGSGLLGSQPQPVIPASVIPEELISQAQVVLQGKSRSVIIRELQRTNLDVNLAVNNLLSRDDEDGDDGDDTASESYLPGEDLMSLLDADIHSAHPSVIIDADAMFSEDISYFGYPSFRRSSLSRLGSSRVLLLPLERDSELLRERESVLRLRERRWLDGASFDNERGSTSKEGEPNLDKKNTPVQSPVSLGEDLQWWPDKDGTKFICIGALYSELLAVSSKGELYQWKWSESEPYRNAQNPSLHHPRATFLGLTNEKIVLLSANSIRATVATENNKVATWVDETLSSVASKLEHTAQTYSELQGERIVSLHCCALYTCAQLENSLYWWGVVPFSQRKKMLEKARAKNKKPKSSAGISSMPNITVGTQVCLRNNPLYHAGAVAFSISAGIPKVGVLMESVWNMNDSCRFQLRSPESLKNMEKASKTTEAKPESKQEPVKTEMGPPPSPASTCSDASSIASSASMPYKRRRSTPAPKEEEKVNEEQWSLREVVFVEDVKNVPVGKVLKVDGAYVAVKFPGTSSNTNCQNSSGPDADPSSLLQDCRLLRIDELQVVKTGGTPKVPDCFQRTPKKLCIPEKTEILAVNVDSKGVHAVLKTGNWVRYCIFDLATGKAEQENNFPTSSIAFLGQNERNVAIFTAGQESPIILRDGNGTIYPMAKDCMGGIRDPDWLDLPPISSLGMGVHSLINLPANSTIKKKAAVIIMAVEKQTLMQHILRCDYEACRQYLMNLEQAVVLEQNLQMLQTFISHRCDGNRNILHACVSVCFPTSNKETKEEEEAERSERNTFAERLSAVEAIANAISVVSSNGPGNRAGSSSSRSLRLREMMRRSLRAAGLGRHEAGASSSDHQDPVSPPIAPPSWVPDPPAMDPDGDIDFILAPAVGSLTTAATGTGQGPSTSTIPGPSTEPSVVESKDRKANAHFILKLLCDSVVLQPYLRELLSAKDARGMTPFMSAVSGRAYPAAITILETAQKIAKAEISSSEKEEDVFMGMVCPSGTNPDDSPLYVLCCNDTCSFTWTGAEHINQDIFECRTCGLLESLCCCTECARVCHKGHDCKLKRTSPTAYCDCWEKCKCKTLIAGQKSARLDLLYRLLTATNLVTLPNSRGEHLLLFLVQTVARQTVEHCQYRPPRIREDRNRKTASPEDSDMPDHDLEPPRFAQLALERVLQDWNALKSMIMFGSQENKDPLSASSRIGHLLPEEQVYLNQQSGTIRLDCFTHCLIVKCTADILLLDTLLGTLVKELQNKYTPGRREEAIAVTMRFLRSVARVFVILSVEMASSKKKNNFIPQPIGKCKRVFQALLPYAVEELCNVAESLIVPVRMGIARPTAPFTLASTSIDAMQGSEELFSVEPLPPRPSSDQSSSSSQSQSSYIIRNPQQRRISQSQPVRGRDEEQDDIVSADVEEVEVVEGVAGEEDHHDEQEEHGEENAEAEGQHDEHDEDGSDMELDLLAAAETESDSESNHSNQDNASGRRSVVTAATAGSEAGASSVPAFFSEDDSQSNDSSDSDSSSSQSDDIEQETFMLDEPLERTTNSSHANGAAQAPRSMQWAVRNTQHQRAASTAPSSTSTPAASSAGLIYIDPSNLRRSGTISTSAAAAAAALEASNASSYLTSASSLARAYSIVIRQISDLMGLIPKYNHLVYSQIPAAVKLTYQDAVNLQNYVEEKLIPTWNWMVSIMDSTEAQLRYGSALASAGDPGHPNHPLHASQNSARRERMTAREEASLRTLEGRRRATLLSARQGMMSARGDFLNYALSLMRSHNDEHSDVLPVLDVCSLKHVAYVFQALIYWIKAMNQQTTLDTPQLERKRTRELLELGIDNEDSEHENDDDTNQSATLNDKDDDSLPAETGQNHPFFRRSDSMTFLGCIPPNPFEVPLAEAIPLADQPHLLQPNARKEDLFGRPSQGLYSSSASSGKCLMEVTVDRNCLEVLPTKMSYAANLKNVMNMQNRQKKEGEEQPVLPEETESSKPGPSAHDLAAQLKSSLLAEIGLTESEGPPLTSFRPQCSFMGMVISHDMLLGRWRLSLELFGRVFMEDVGAEPGSILTELGGFEVKESKFRREMEKLRNQQSRDLSLEVDRDRDLLIQQTMRQLNNHFGRRCATTPMAVHRVKVTFKDEPGEGSGVARSFYTAIAQAFLSNEKLPNLECIQNANKGTHTSLMQRLRNRGERDREREREREMRRSSGLRAGSRRDRDRDFRRQLSIDTRPFRPASEGNPSDDPEPLPAHRQALGERLYPRVQAMQPAFASKITGMLLELSPAQLLLLLASEDSLRARVDEAMELIIAHGRENGADSILDLGLVDSSEKVQENRKRHGSSRSVVDMDLDDTDDGDDNAPLFYQPGKRGFYTPRPGKNTEARLNCFRNIGRILGLCLLQNELCPITLNRHVIKVLLGRKVNWHDFAFFDPVMYESLRQLILASQSSDADAVFSAMDLAFAIDLCKEEGGGQVELIPNGVNIPVTPQNVYEYVRKYAEHRMLVVAEQPLHAMRKGLLDVLPKNSLEDLTAEDFRLLVNGCGEVNVQMLISFTSFNDESGENAEKLLQFKRWFWSIVEKMSMTERQDLVYFWTSSPSLPASEEGFQPMPSITIRPPDDQHLPTANTCISRLYVPLYSSKQILKQKLLLAIKTKNFGFV

SEQ ID NO: 2242 - protein, 640 aa, Homo sapiens
MGQPSLTWMLMVVVASWFITTAATDTSEARWCSECHSNATCTEDEAVTTCTCQEGFTGDGLTCVDLDECAIPGAHNCSANSSCVNTPGSFSCVCPEGFRLSPGLGCTDVDECAEPGLSHCHALATCVNVVGSYLCVCPAGYRGDGWHCECSPGSCGPGLDCVPEGDALVCADPCQAHRTLDEYWRSTEYGEGYACDTDLRGWYRFVGQGGARMAETCVPVLRCNTAAPMWLNGTHPSSDEGIVSRKACAHWSGHCCLWDASVQVKACAGGYYVYNLTAPPECHLAYCTDPSSVEGTCEECSIDEDCKSNNGRWHCQCKQDFNITDISLLEHRLECGANDMKVSLGKCQLKSLGFDKVFMYLSDSRCSGFNDRDNRDWVSVVTPARDGPCGTVLTRNETHATYSNTLYLADEIIIRDLNIKINFACSYPLDMKVSLKTALQPMVSALNIRVGGTGMFTVRMALFQTPSYTQPYQGSSVTLSTEAFLYVGTMLDGGDLSRFALLMTNCYATPSSNATDPLKYFIIQDRCPHTRDSTIQVVENGESSQGRFSVQMFRFAGNYDLVYLHCEVYLCDTMNEKCKPTCSGTRFRSGSVIDQSRVLNLGPITRKGVQATVSRAFSSLGLLKVWLPLLLSATLTLTFQ

SEQ ID NO: 2243 - protein, 507 aa, Homo sapiens
MGQPSLTWMLMVVVASWFITTAATDTSEARWCSECHSNATCTEDEAVTTCTCQEGFTGDGLTCVDLRGWYRFVGQGGARMAETCVPVLRCNTAAPMWLNGTHPSSDEGIVSRKACAHWSGHCCLWDASVQVKACAGGYYVYNLTAPPECHLAYCTDPSSVEGTCEECSIDEDCKSNNGRWHCQCKQDFNITDISLLEHRLECGANDMKVSLGKCQLKSLGFDKVFMYLSDSRCSGFNDRDNRDWVSVVTPARDGPCGTVLTRNETHATYSNTLYLADEIIIRDLNIKINFACSYPLDMKVSLKTALQPMVSALNIRVGGTGMFTVRMALFQTPSYTQPYQGSSVTLSTEAFLYVGTMLDGGDLSRFALLMTNCYATPSSNATDPLKYFIIQDRCPHTRDSTIQVVENGESSQGRFSVQMFRFAGNYDLVYLHCEVYLCDTMNEKCKPTCSGTRFRSGSVIDQSRVLNLGPITRKGVQATVSRAFSSLGLLKVWLPLLLSATLTLTFQ

SEQ ID NO: 2244 - protein, 611 aa, Homo sapiens
MGQPSLTWMLMVVVASWFITTAATDTSEARWCSECHSNATCTEDEAVTTCTCQEGFTGDGLTCVDLDECAIPGAHNCSANSSCVNTPGSFSCVCPEGFRLSPGLGCTDVDECAEPGLSHCHALATCVNVVGSYLCVCPAGYRGDGWHCECSPGSCGPGLDCVPEGDALVCADPCQAHRTLDEYWRSTEYGEGYACDTDLRGWYRPHPSSDEGIVSRKACAHWSGHCCLWDASVQVKACAGGYYVYNLTAPPECHLAYCTDPSSVEGTCEECSIDEDCKSNNGRWHCQCKQDFNITDISLLEHRLECGANDMKVSLGKCQLKSLGFDKVFMYLSDSRCSGFNDRDNRDWVSVVTPARDGPCGTVLTRNETHATYSNTLYLADEIIIRDLNIKINFACSYPLDMKVSLKTALQPMVSALNIRVGGTGMFTVRMALFQTPSYTQPYQGSSVTLSTEAFLYVGTMLDGGDLSRFALLMTNCYATPSSNATDPLKYFIIQDRCPHTRDSTIQVVENGESSQGRFSVQMFRFAGNYDLVYLHCEVYLCDTMNEKCKPTCSGTRFRSGSVIDQSRVLNLGPITRKGVQATVSRAFSSLGLLKVWLPLLLSATLTLTFQ

SEQ ID NO: 2245 - protein, 618 aa, Homo sapiens
MGQPSLTWMLMVVVASWFITTAATDTSEARWCSECHSNATCTEDEAVTTCTCQEGFTGDGLTCVDLDECAIPGAHNCSANSSCVNTPGSFSCVCPEGFRLSPGLGCTDVDECAEPGLSHCHALATCVNVVGSCGPGLDCVPEGDALVCADPCQAHRTLDEYWRSTEYGEGYACDTDLRGWYRFVGQGGARMAETCVPVLRCNTAAPMWLNGTHPSSDEGIVSRKACAHWSGHCCLWDASVQVKACAGGYYVYNLTAPPECHLAYCTDPSSVEGTCEECSIDEDCKSNNGRWHCQCKQDFNITDISLLEHRLECGANDMKVSLGKCQLKSLGFDKVFMYLSDSRCSGFNDRDNRDWVSVVTPARDGPCGTVLTRNETHATYSNTLYLADEIIIRDLNIKINFACSYPLDMKVSLKTALQPMVSALNIRVGGTGMFTVRMALFQTPSYTQPYQGSSVTLSTEAFLYVGTMLDGGDLSRFALLMTNCYATPSSNATDPLKYFIIQDRCPHTRDSTIQVVENGESSQGRFSVQMFRFAGNYDLVYLHCEVYLCDTMNEKCKPTCSGTRFRSGSVIDQSRVLNLGPITRKGVQATVSRAFSSLGLLKVWLPLLLSATLTLTFQ

SEQ ID NO: 2246 - protein, 673 aa, Homo sapiens
MGQPSLTWMLMVVVASWFITTAATDTSEARTKYNCPARWSWRTPQRGGDTEQGPDEDFTSQGRWCSECHSNATCTEDEAVTTCTCQEGFTGDGLTCVDLDECAIPGAHNCSANSSCVNTPGSFSCVCPEGFRLSPGLGCTDVDECAEPGLSHCHALATCVNVVGSYLCVCPAGYRGDGWHCECSPGSCGPGLDCVPEGDALVCADPCQAHRTLDEYWRSTEYGEGYACDTDLRGWYRFVGQGGARMAETCVPVLRCNTAAPMWLNGTHPSSDEGIVSRKACAHWSGHCCLWDASVQVKACAGGYYVYNLTAPPECHLAYCTDPSSVEGTCEECSIDEDCKSNNGRWHCQCKQDFNITDISLLEHRLECGANDMKVSLGKCQLKSLGFDKVFMYLSDSRCSGFNDRDNRDWVSVVTPARDGPCGTVLTRNETHATYSNTLYLADEIIIRDLNIKINFACSYPLDMKVSLKTALQPMVSALNIRVGGTGMFTVRMALFQTPSYTQPYQGSSVTLSTEAFLYVGTMLDGGDLSRFALLMTNCYATPSSNATDPLKYFIIQDRCPHTRDSTIQVVENGESSQGRFSVQMFRFAGNYDLVYLHCEVYLCDTMNEKCKPTCSGTRFRSGSVIDQSRVLNLGPITRKGVQATVSRAFSSLGLLKVWLPLLLSATLTLTFQ

SEQ ID NO: 2247 - protein, 964 aa, Homo sapiens
MQKIKSLMTRQGLKSPQESLSDLGAIESLRVPGKEEFRELREQPSDPQAEQELINSIEQVYFSVDSFDIVKYELEKLPPVLNLQELEAYRDKLKQQQAAVSKKVADLILEKQPAYVKELERVTSLQTGLQLAAVICTNGRRHLNIAKEGFTQASLGLLANQRKRQLLIGLLKSLRTIKTLQRTDVRLSEMLEEEDYPGAIQLCLECQKAASTFKHYSCISELNSKLQDTLEQIEEQLDVALSKICKNFDINHYTKVQQAYRLLGKTQTAMDQLHMHFTQAIHNTVFQVVLGYVELCAGNTDTKFQKLQYKDLCTHVTPDSYIPCLADLCKALWEVMLSYYRTMEWHEKHDNEDTASASEGSNMIGTEETNFDRGYIKKKLEHGLTRIWQDVQLKVKTYLLGTDLSIFKYDDFIFVLDIISRLMQVGEEFCGSKSEVLQESIRKQSVNYFKNYHRTRLDELRMFLENETWELCPVKSNFSILQLHEFKFMEQSRSPSVSPSKQPVSTSSKTVTLFEQYCSGGNPFEIQANHKDEETEDVLASNGYESDEQEKSAYQEYDSDSDVPEELKRDYVDEQTGDGPVKSVSRETLKSRKKSDYSLNKVNAPILTNTTLNVIRLVGKYMQMMNILKPIAFDVIHFMSQLFDYYLYAIYTFFGRNDSLESTGLGLSSSRLRTTLNRIQESLIDLEVSADPTATLTAAEERKEKVPSPHLSHLVVLTSGDTLYGLAERVVATESLVFLAEQFEFLQPHLDAVMPAVKKPFLQQFYSQTVSTASELRKPIYWIVAGKALDYEQMLLLMANVKWDVKEIMSQHNIYVDALLKEFEQFNRRLNEVSKRVRIPLPVSNILWEHCIRLANRTIVEGYANVKKCSNEGRALMQLDFQQFLMKLEKLTDIRPIPDKEFVETYIKAYYLTENDMERWIKEHREYSTKQLTNLVNVCLGSHINKKARQKLLAAIDDIDRPKR

SEQ ID NO: 2248 - protein, 327 aa, Homo sapiens
MQKIKSLMTRQGLKSPQESLSDLGAIESLRVPGKEEFRELREQPSDPQAEQELINSIEQVYFSVDSFDIVKYELEKLPPVLNLQELEAYRDKLKQQQAAVSKKVADLILEKQPAYVKELERVTSLQTGLQLAAVICTNGRRHLNIAKEGFTQASLGLLANQRKRQLLIGLLKSLRTIKTLQRTDVRLSEMLEEEDYPGAIQLCLECQKAASTFKHYSCISELNSKLQDTLEQIEEQLDVALSKICKNFDINHYTKVQQAYRLLGKTQTAMDQLHMHFTQAIHNTVFQVVLGYVELCAGNTDTKFQKLQYKDLCTVCSDLITIHISLL

SEQ ID NO: 2249 - protein, 934 aa, Homo sapiens
MLTLEEFRELREQPSDPQAEQELINSIEQVYFSVDSFDIVKYELEKLPPVLNLQELEAYRDKLKQQQAAVSKKVADLILEKQPAYVKELERVTSLQTGLQLAAVICTNGRRHLNIAKEGFTQASLGLLANQRKRQLLIGLLKSLRTIKTLQRTDVRLSEMLEEEDYPGAIQLCLECQKAASTFKHYSCISELNSKLQDTLEQIEEQLDVALSKICKNFDINHYTKVQQAYRLLGKTQTAMDQLHMHFTQAIHNTVFQVVLGYVELCAGNTDTKFQKLQYKDLCTHVTPDSYIPCLADLCKALWEVMLSYYRTMEWHEKHDNEDTASASEGSNMIGTEETNFDRGYIKKKLEHGLTRIWQDVQLKVKTYLLGTDLSIFKYDDFIFVLDIISRLMQVGEEFCGSKSEVLQESIRKQSVNYFKNYHRTRLDELRMFLENETWELCPVKSNFSILQLHEFKFMEQSRSPSVSPSKQPVSTSSKTVTLFEQYCSGGNPFEIQANHKDEETEDVLASNGYESDEQEKSAYQEYDSDSDVPEELKRDYVDEQTGDGPVKSVSRETLKSRKKSDYSLNKVNAPILTNTTLNVIRLVGKYMQMMNILKPIAFDVIHFMSQLFDYYLYAIYTFFGRNDSLESTGLGLSSSRLRTTLNRIQESLIDLEVSADPTATLTAAEERKEKVPSPHLSHLVVLTSGDTLYGLAERVVATESLVFLAEQFEFLQPHLDAVMPAVKKPFLQQFYSQTVSTASELRKPIYWIVAGKALDYEQMLLLMANVKWDVKEIMSQHNIYVDALLKEFEQFNRRLNEVSKRVRIPLPVSNILWEHCIRLANRTIVEGYANVKKCSNEGRALMQLDFQQFLMKLEKLTDIRPIPDKEFVETYIKAYYLTENDMERWIKEHREYSTKQLTNLVNVCLGSHINKKARQKLLAAIDDIDRPKR

SEQ ID NO: 2250 - protein, 169 aa, Homo sapiens
MSAPPALQIREANAHLAAVHRRAAELEARLDAAERTVHAQAERLALHDQQLRAALDELGRAKDREIATLQEQLMTSEATVHSLQATVHQRDELIRQLQPRAELLQDICRRRPPLAGLLDALAEAERLGPLPASDPGHPPPGGPGPPLDNSTGEEADRDHLQPAVFGTTV

SEQ ID NO: 2251 - protein, 355 aa, Homo sapiens
METLKDKTLQELEELQNDSEAIDQLALESPEVQDLQLEREMALATNRSLAERNLEFQGPLEISRSNLSDRYQELRKLVERCQEQKAKLEKFSSALQPGTLLDLLQVEGMKIEEESEAMAEKFLEGEVPLETFLENFSSMRMLSHLRRVRVEKLQEVVRKPRASQELAGDAPPPRPPPPVRPVPQGTPPVVEEQPQPPLAMPPYPLPYSPSPSLPVGPTAHGALPPAPFPVVSQPSFYSGPLGPTYPAAQLGPRGAAGYSWSPQRSMPPRPGYPGTPMGASGPGYPLRGGRAPSPGYPQQSPYPATGGKPPYPIQPQLPSFPGQPQPSVPLQPPYPPGPAPPYGFPPPPGPAWPGY

SEQ ID NO: 2252 - protein, 428 aa, Homo sapiens
MGPLSAPPCTQRITWKGLLLTALLLNFWNLPTTAQVTIEAEPTKVSKGKDVLLLVHNLPQNLAGYIWYKGQMKDLYHYITSYVVDGQIIIYGPAYSGRETVYSNASLLIQNVTREDAGSYTLHIVKRGDGTRGETGHFTFTLYLETPKPSISSSNLYPREDMEAVSLTCDPETPDASYLWWMNGQSLPMTHSLQLSKNKRTLFLFGVTKYTAGPYECEIRNPVSASRSDPVTLNLLPKLPKPYITINNLNPRENKDVLAFTCEPKSENYTYIWWLNGQSLPVSPRVKRPIENRILILPSVTRNETGPYQCEIQDRYGGIRSYPVTLNVLYGPDLPRIYPSFTYYHSGENLYLSCFADSNPPAEYSWTINGKFQLSGQKLFIPQITTKHSGLYACSVRNSATGMESSKSMTVKVSAPSGTGHLPGLNPL

SEQ ID NO: 2253 - protein, 422 aa, Homo sapiens
MAAAAVVEFQRAQSLLSTDREASIDILHSIVKRDIQENDEEAVQVKEQSILELGSLLAKTGQAAELGGLLKYVRPFLNSISKAKAARLVRSLLDLFLDMEAATGQEVELCLECIEWAKSEKRTFLRQALEARLVSLYFDTKRYQEALHLGSQLLRELKKMDDKALLVEVQLLESKTYHALSNLPKARAALTSARTTANAIYCPPKLQATLDMQSGIIHAAEEKDWKTAYSYFYEAFEGYDSIDSPKAITSLKYMLLCKIMLNTPEDVQALVSGKLALRYAGRQTEALKCVAQASKNRSLADFEKALTDYRAELRDDPIISTHLAKLYDNLLEQNLIRVIEPFSRVQIEHISSLIKLSKADVERKLSQMILDKKFHGILDQGEGVLIIFDEPPVDKTYEAALETIQNMSKVVDSLYNKAKKLT

SEQ ID NO: 2254 - protein, 423 aa, Homo sapiens
MAAAAVVEFQRAQSLLSTDREASIDILHSIVKRDIQENDEEAVQVKEQSILELGSLLAKTGQAAELGGLLKYVRPFLNSISKAKAARLVRSLLDLFLDMEAATGQEVELCLECIEWAKSEKRTFLRQALEARLVSLYFDTKRYQEALHLGSQLLRELKKMDDKALLVEVQLLESKTYHALSNLPKARAALTSARTTANAIYCPPKLQATLDMQSGIIHAAEEKDWKTAYSYFYEAFEGYDSIDSPKAITSLKYMLLCKIMLNTPEDVQALVSGKLALRYAGRQTEALKCVAQASKNRSLADFEKALTDYRAELRDDPIISTHLAKLYDNLLEQNLIRVIEPFSRVQIEHISSLIKLSKADVERKLSQMILDKKFHAGILDQGEGVLIIFDEPPVDKTYEAALETIQNMSKVVDSLYNKAKKLT

SEQ ID NO: 2255 - protein, 473 aa, Homo sapiens
MASCVGSRTLSKDDVNYKMHFRMINEQQVEDITIDFFYRPHTITLLSFTIVSLMYFAFTRDDSVPEDNIWRGILSVIFFFLIISVLAFPNGPFTRPHPALWRMVFGLSVLYFLFLVFLLFLNFEQVKSLMYWLDPNLRYATREADVMEYAVNCHVITWERIISHFDIFAFGHFWGWAMKALLIRSYGLCWTISITWELTELFFMHLLPNFAECWWDQVILDILLCNGGGIWLGMVVCRFLEMRTYHWASFKDIHTTTGKIKRAVLQFTPASWTYVRWFDPKSSFQRVAGVYLFMIIWQLTELNTFFLKHIFVFQASHPLSWGRILFIGGITAPTVRQYYAYLTDTQCKRVGTQCWVFGVIGFLEAIVCIKFGQDLFSKTQILYVVLWLLCVAFTTFLCLYGMIWYAEHYGHREKTYSECEDGTYSPEISWHHRKGTKGSEDSPPKHAGNNESHSSRRRNRHSKSKVTNGVGKK

SEQ ID NO: 2256 - protein, 327 aa, Homo sapiens
MEYAVNCHVITWERIISHFDIFAFGHFWGWAMKALLIRSYGLCWTISITWELTELFFMHLLPNFAECWWDQVILDILLCNGGGIWLGMVVCRFLEMRTYHWASFKDIHTTTGKIKRAVLQFTPASWTYVRWFDPKSSFQRVAGVYLFMIIWQLTELNTFFLKHIFVFQASHPLSWGRILFIGGITAPTVRQYYAYLTDTQCKRVGTQCWVFGVIGFLEAIVCIKFGQDLFSKTQILYVVLWLLCVAFTTFLCLYGMIWYAEHYGHREKTYSECEDGTYSPEISWHHRKGTKGSEDSPPKHAGNNESHSSRRRNRHSKSKVTNGVGKK

SEQ ID NO: 2257 - protein, 301 aa, Homo sapiens
MHLLPNFAECWWDQVILDILLCNGGGIWLGMVVCRFLEMRTYHWASFKDIHTTTGKIKRAVLQFTPASWTYVRWFDPKSSFQRVAGVYLFMIIWQLTELNTFFLKHIFVFQASHPLSWGRILFIGGITAPTVRQYYAYLTDTQCKRVGTQCWVFGVIGFLEAIVCIKFGQDLFSKTQILYVVLWLLCVAFTTFLCLYGMIWYAEHYGHREKTYSECEDGTYSPEISWHHRKGTKGSEDSPPKHAGEGTWGSLFEIVSLVSHRPGRVRQIIAWGAFANVGSLLTSALDMRSPVAARCVEGKR

SEQ ID NO: 2258 - protein, 908 aa, Homo sapiens
MEEGGRDKAPVQPQQSPAAAPGGTDEKPSGKERRDAGDKDKEQELSEEDKQLQDELEMLVERLGEKDTSLYRPALEELRRQIRSSTTSMTSVPKPLKFLRPHYGKLKEIYENMAPGENKRFAADIISVLAMTMSGERECLKYRLVGSQEELASWGHEYVRHLAGEVAKEWQELDDAEKVQREPLLTLVKEIVPYNMAHNAEHEACDLLMEIEQVDMLEKDIDENAYAKVCLYLTSCVNYVPEPENSALLRCALGVFRKFSRFPEALRLALMLNDMELVEDIFTSCKDVVVQKQMAFMLGRHGVFLELSEDVEEYEDLTEIMSNVQLNSNFLALARELDIMEPKVPDDIYKTHLENNRFGGSGSQVDSARMNLASSFVNGFVNAAFGQDKLLTDDGNKWLYKNKDHGMLSAAASLGMILLWDVDGGLTQIDKYLYSSEDYIKSGALLACGIVNSGVRNECDPALALLSDYVLHNSNTMRLGSIFGLGLAYAGSNREDVLTLLLPVMGDSKSSMEVAGVTALACGMIAVGSCNGDVTSTILQTIMEKSETELKDTYARWLPLGLGLNHLGKGEAIEAILAALEVVSEPFRSFANTLVDVCAYAGSGNVLKVQQLLHICSEHFDSKEKEEDKDKKEKKDKDKKEAPADMGAHQGVAVLGIALIAMGEEIGAEMALRTFGHLLRYGEPTLRRAVPLALALISVSNPRLNILDTLSKFSHDADPEVSYNSIFAMGMVGSGTNNARLAAMLRQLAQYHAKDPNNLFMVRLAQGLTHLGKGTLTLCPYHSDRQLMSQVAVAGLLTVLVSFLDVRNIILGKSHYVLYGLVAAMQPRMLVTFDEELRPLPVSVRVGQAVDVVGQAGKPKTITGFQTHTTPVLLAHGERAELATEEFLPVTPILEGFVILRKNPNYDL

SEQ ID NO: 2259 - protein, 749 aa, Homo sapiens
MSMSGEVAKEWQELDDAEKVQREPLLTLVKEIVPYNMAHNAEHEACDLLMEIEQVDMLEKDIDENAYAKVCLYLTSCVNYVPEPENSALLRCALGVFRKFSRFPEALRLALMLNDMELVEDIFTSCKDVVVQKQMAFMLGRHGVFLELSEDVEEYEDLTEIMSNVQLNSNFLALARELDIMEPKVPDDIYKTHLENNRFGGSGSQVDSARMNLASSFVNGFVNAAFGQDKLLTDDGNKWLYKNKDHGMLSAAASLGMILLWDVDGGLTQIDKYLYSSEDYIKSGALLACGIVNSGVRNECDPALALLSDYVLHNSNTMRLGSIFGLGLAYAGSNREDVLTLLLPVMGDSKSSMEVAGVTALACGMIAVGSCNGDVTSTILQTIMEKSETELKDTYARWLPLGLGLNHLGKGEAIEAILAALEVVSEPFRSFANTLVDVCAYAGSGNVLKVQQLLHICSEHFDSKEKEEDKDKKEKKDKDKKEAPADMGAHQGVAVLGIALIAMGEEIGAEMALRTFGHLLRYGEPTLRRAVPLALALISVSNPRLNILDTLSKFSHDADPEVSYNSIFAMGMVGSGTNNARLAAMLRQLAQYHAKDPNNLFMVRLAQGLTHLGKGTLTLCPYHSDRQLMSQVAVAGLLTVLVSFLDVRNIILGKSHYVLYGLVAAMQPRMLVTFDEELRPLPVSVRVGQAVDVVGQAGKPKTITGFQTHTTPVLLAHGERAELATEEFLPVTPILEGFVILRKNPNYDL

SEQ ID NO: 2260 - protein, 778 aa, Homo sapiens
MTMSGERECLKYRLVGSQEELASWGHEYVRHLAGEVAKEWQELDDAEKVQREPLLTLVKEIVPYNMAHNAEHEACDLLMEIEQVDMLEKDIDENAYAKVCLYLTSCVNYVPEPENSALLRCALGVFRKFSRFPEALRLALMLNDMELVEDIFTSCKDVVVQKQMAFMLGRHGVFLELSEDVEEYEDLTEIMSNVQLNSNFLALARELDIMEPKVPDDIYKTHLENNRFGGSGSQVDSARMNLASSFVNGFVNAAFGQDKLLTDDGNKWLYKNKDHGMLSAAASLGMILLWDVDGGLTQIDKYLYSSEDYIKSGALLACGIVNSGVRNECDPALALLSDYVLHNSNTMRLGSIFGLGLAYAGSNREDVLTLLLPVMGDSKSSMEVAGVTALACGMIAVGSCNGDVTSTILQTIMEKSETELKDTYARWLPLGLGLNHLGKGEAIEAILAALEVVSEPFRSFANTLVDVCAYAGSGNVLKVQQLLHICSEHFDSKEKEEDKDKKEKKDKDKKEAPADMGAHQGVAVLGIALIAMGEEIGAEMALRTFGHLLRYGEPTLRRAVPLALALISVSNPRLNILDTLSKFSHDADPEVSYNSIFAMGMVGSGTNNARLAAMLRQLAQYHAKDPNNLFMVRLAQGLTHLGKGTLTLCPYHSDRQLMSQVAVAGLLTVLVSFLDVRNIILGKSHYVLYGLVAAMQPRMLVTFDEELRPLPVSVRVGQAVDVVGQAGKPKTITGFQTHTTPVLLAHGERAELATEEFLPVTPILEGFVILRKNPNYDL

SEQ ID NO: 2261 - protein, 747 aa, Homo sapiens
MRRCNSGSGPPPSLLLLLLWLLAVPGANAAPRSALYSPSDPLTLLQADTVRGAVLGSRSAWAVEFFASWCGHCIAFAPTWKALAEDVKAWRPALYLAALDCAEETNSAVCRDFNIPGFPTVRFFKAFTKNGSGAVFPVAGADVQTLRERLIDALESHHDTWPPACPPLEPAKLEEIDGFFARNNEEYLALIFEKGGSYLGREVALDLSQHKGVAVRRVLNTEANVVRKFGVTDFPSCYLLFRNGSVSRVPVLMESRSFYTAYLQRLSGLTREAAQTTVAPTTANKIAPTVWKLADRSKIYMADLESALHYILRIEVGRFPVLEGQRLVALKKFVAVLAKYFPGRPLVQNFLHSVNEWLKRQKRNKIPYSFFKTALDDRKEGAVLAKKVNWIGCQGSEPHFRGFPCSLWVLFHFLTVQAARQNVDHSQEAAKAKEVLPAIRGYVHYFFGCRDCASHFEQMAAASMHRVGSPNAAVLWLWSSHNRVNARLAGAPSEDPQFPKVQWPPRELCSACHNERLDVPVWDVEATLNFLKAHFSPSNIILDFPAAGSAARRDVQNVAAAPELAMGALELESRNSTLDPGKPEMMKSPTNTTPHVPAEGPEASRPPKLHPGLRAAPGQEPPEHMAELQRNEQEQPLGQWHLSKRDTGAALLAESRAEKNRLWGPLEVRRVGRSSKQLVDIPEGQLEARAGRGRGQWLQVLGGGFSYLDISLCVGLYSLSFMGLLAMYTYFQAKIRALKGHAGHPAA

SEQ ID NO: 2262 - protein, 604 aa, Homo sapiens
MRRCNSGSGPPPSLLLLLLWLLAVPGANAAPRSALYSPSDPLTLLQADTVRGAVLGSRSAWAVEFFASWCGHCIAFAPTWKALAEDVKAWRPALYLAALDCAEETNSAVCRDFNIPGFPTVRFFKAFTKNGSGAVFPVAGADVQTLRERLIDALESHHDTWPPACPPLEPAKLEEIDGFFARNNEEYLALIFEKGGSYLGREVALDLSQHKGVAVRRVLNTEANVVRKFGVTDFPSCYLLFRNGSVSRVPVLMESRSFYTAYLQRLSGLTREAAQTTVAPTTANKIAPTVWKLADRSKIYMADLESALHYILRIEVGRFPVLEGQRLVALKKFVAVLAKYFPGRPLVQNFLHSVNEWLKRQKRNKIPYSFFKTALDDRKEGAVLAKKVNWIGCQGSEPHFRGFPCSLWVLFHFLTVQAARQNVDHSQEAAKAKEVLPAIRGYVHYFFGCRDCASHFEQMAAASMHRVGSPNAAVLWLWSSHNRVNARLAGAPSEDPQFPKVQWPPRELCSACHNERLDVPVWDVEATLNFLKAHFSPSNIILDFPAAGSAARRDVQNVAAAPELAMGALELESRNSTLDPGKPEMMKSPTNTTPHVPAEGPELI

SEQ ID NO: 2263 - protein, 701 aa, Homo sapiens
MEEDTDYRIRFSSLCFFNDHVGFHGTIKSSPSDFIVIEIDEQGQLVNKTIDEPIFKISEIQLEPNNFPKKPKLDLQNLSLEDGRNQEVHTLIKYTDGDQNHQSGSEKEDTIVDGTSKCEEKADVLSSFLDEKTHELLNNFACDVREKWLSKTELIGLPPEFSIGRILDKNQRASLHSAIRQKFPFLVTVGKNSEIVVKPNLEYKELCHLVSEEEAFDFFKYLDAKKENSKFTFKPDTNKDHRKAVHHFVNKKFGNLVETKSFSKMNCSAGNPNVVVTVRFREKAHKRGKRPLSECQEGKVIYTAFTLRKENLEMFEAIGFLAIKLGVIPSDFSYAGLKDKKAITYQAMVVRKVTPERLKNIEKEIEKKRMNVFNIRSVDDSLRLGQLKGNHFDIVIRNLKKQINDSANLRERIMEAIENVKKKGFVNYYGPQRFGKGRKVHTDQIGLALLKNEMMKAIKLFLTPEDLDDPVNRAKKYFLQTEDAKGTLSLMPEFKVRERALLEALHRFGMTEEGCIQAWFSLPHSMRIFYVHAYTSKIWNEAVSYRLETYGARVVQGDLVCLDEDIDDENFPNSKIHLVTEEEGSANMYAIHQVVLPVLGYNIQYPKNKVGQWYHDILSRDGLQTCRFKVPTLKLNIPGCYRQILKHPCNLSYQLMEDHDIDVKTKGSHIDETALSLLISFDLDASCYATVCLKEIMKHDV

SEQ ID NO: 2264 - protein, 388 aa, Homo sapiens
MFEAIGFLAIKLGVIPSDFSYAGLKDKKAITYQAMVVRKVTPERLKNIEKEIEKKRMNVFNIRSVDDSLRLGQLKGNHFDIVIRNLKKQINDSANLRERIMEAIENVKKKGFVNYYGPQRFGKGRKVHTDQIGLALLKNEMMKAIKLFLTPEDLDDPVNRAKKYFLQTEDAKGTLSLMPEFKVRERALLEALHRFGMTEEGCIQAWFSLPHSMRIFYVHAYTSKIWNEAVSYRLETYGARVVQGDLVCLDEDIDDENFPNSKIHLVTEEEGSANMYAIHQVVLPVLGYNIQYPKNKVGQWYHDILSRDGLQTCRFKVPTLKLNIPGCYRQILKHPCNLSYQLMEDHDIDVKTKGSHIDETALSLLISFDLDASCYATVCLKEIMKHDV

SEQ ID NO: 2265 - protein, 303 aa, Homo sapiens
MSSAPASGSVRARYLVYFQYVGTDFNGVAAVRGTQRAVGVQNYLEEAAERLNSVEPVRFTISSRTDAGVHALSNAAHLDVQRRSGRPPFPPEVLAEALNTHLRHPAIRVLRAFRVPSDFHARHAATSRTYLYRLATGCHRRDELPVFERNLCWTLPADCLDMVAMQEAAQHLLGTHDFSAFQSAGSPVPSPVRTLRRVSVSPGQASPLVTPEESRKLRFWNLEFESQSFLYRQVRRMTAVLVAVGLGALAPAQVKTILESQDPLGKHQTRVAPAHGLFLKSVLYGNLGAASCTLQGPQFGSHG

SEQ ID NO: 2266 - protein, 142 aa, Homo sapiens
MVAMQEAAQHLLGTHDFSAFQSAGSPVPSPVRTLRRVSVSPGQASPLVTPEESRKLRFWNLEFESQSFLYRQVRRMTAVLVAVGLGALAPAQVKTILESQDPLGKHQTRVAPAHGLFLKSVLYGNLGAASCTLQGPQFGSHG

SEQ ID NO: 2267 - protein, 104 aa, Homo sapiens
MHPSEMQRKAPPRRRRHRNRAPLTHKMNKMVTSEQMKLPSTKKAEPPTWAQLKKLTQLATKYLENTKVTQTPESMLLAALMIVSMVSAGVPNSSEETATIENGP

SEQ ID NO: 2268 - protein, 184 aa, Homo sapiens
MFLSPGEGPATEGGGLGPGEEAPKKKHRRNRTTFTTYQLHQLERAFEASHYPDVYSREELAAKVHLPEVRVQVWFQNRRAKWRRQERLESGSGAVAAPRLPEAPALPFARPPAMSLPLEPWLGPGPPAVPGLPRLLGPGPGLQASFGPHAFAPTFADGFALEEASLRLLAKEHAQALDRAWPPA

SEQ ID NO: 2269 - protein, 317 aa, Homo sapiens
MKRLSLVTTNRLSPHGNFLPLCTFPLAVDMAALFQEASSCPVCSDYLEKPMSLECGCAVCFKCINSLQKEPHGEDLLCCCCSMVSQKNKIRPSWQLERLASHIKELEPKLKKILQMNPRMRKFQVDMTLDADTANNFLLISDDLRSVRSGCITQNRQDLAERFDVSICILGSPRFTCGRHYWEVDVGTSTEWDLGVCRESVHRKGRIHLTTERGFWTVSLRDGSRLSASTVPLTFLFVDRKLQRVGIFLDMGMQNVSFFDAEGGSHVYTFRSVSAEEPLHLFFAPPSPPNGDKSVLSICPVINPGTTDAPVHPGEAK

SEQ ID NO: 2270 - protein, 165 aa, Homo sapiens [sequence omitted]

SEQ ID NO: 2271 - protein, 132 aa, Homo sapiens
MPPKFDPNEIKVVYLRCTGGEVGATSALAPKIGPLGLIEVVPSASALIIKALKEPPRDRKKQKNIKHSGNITFDEIVNIARQMRHRSLARELSGTIKEILGTAQSVGCNVDGRHPHDIIDDINSGAVECPAS

SEQ ID NO: 2272 - protein, 1068 aa, Homo sapiens
MLVGSQSFSPGGPNGIIRSQSFAGFSGLQERRSRCNSFIENSSALKKPQAKLKKMHNLGHKNNNPPKEPQPKRVEEVYRALKNGLDEYLEVHQTELDKLTAQLKDMKRNSRLGVLYDLDKQIKTIERYMRRLEFHISKVDELYEAYCIQRRLQDGASKMKQAFATSPASKAARESLTEINRSFKEYTENMCTIEVELENLLGEFSIKMKGLAGFARLCPGDQYEIFMKYGRQRWKLKGKIEVNGKQSWDGEETVFLPLIVGFISIKVTELKGLATHILVGSVTCETKELFAARPQVVAVDINDLGTIKLNLEITWYPFDVEDMTASSGAGNKAAALQRRMSMYSQGTPETPTFKDHSFFRWLHPSPDKPRRLSVLSALQDTFFAKLHRSRSFSDLPSLRPSPKAVLELYSNLPDDIFENGKAAEEKMPLSLSFSDLPNGDCALTSHSTGSPSNSTNPEITITPAEFNLSSLASQNEGMDDTSSASSRNSLGEGQEPKSHLKEEDPEEPRKPASAPSEACRRQSSGAGAEHLFLENDVAEALLQESEEASELKPVELDTSEGNITKQLVKRLTSAEVPMATDRLLSEGSVGGESEGCRSFLDGSLEDAFNGLLLALEPHKEQYKEFQDLNQEVMNLDDILKCKPAVSRSRSSSLSLTVESALESFDFLNTSDFDEEEDGDEVCNVGGGADSVFSDTETEKHSYRSVHPEARGHLSEALTEDTGVGTSVAGSPLPLTTGNESLDITIVRHLQYCTQLVQQIVFSSKTPFVARSLLEKLSRQIQVMEKLAAVSDENIGNISSVVEAIPEFHKKLSLLSFWTKCCSPVGVYHSPADRVMKQLEASFARTVNKEYPGLADPVFRTLVSQILDRAEPLLSSSLSSEVVTVFQYYSYFTSHGVSDLESYLSQLARQVSMVQTLQSLRDEKLLQTMSDLAPSNLLAQQEVLRTLALLLTREDNEVSEAVTLYLAAASKNQHFREKALLYYCEALTKTNLQLQKAACLALKILEATESIKMLVTLCQSDTEEIRNVASETLLSLGEDGRLAYEQLDKFPRDCVKVGGRHGTEVATAF

SEQ ID NO: 2273 - protein, 591 aa, Homo sapiens
MLVGSQSFSPGGPNGIIRSQSFAGFSGLQERRSRCNSFIENSSALKKPQAKLKKMHNLGHKNNNPPKEPQPKRVEEVYRALKNGLDEYLEVHQTELDKLTAQLKDMKRNSRLGVLYDLDKQIKTIERYMRRLEFHISKVDELYEAYCIQRRLQDGASKMKQAFATSPASKAARESLTEINRSFKEYTENMCTIEVELENLLGEFSIKMKGLAGFARLCPGDQYEIFMKYGRQRWKLKGKIEVNGKQSWDGEETVFLPLIVGFISIKVTELKGLATHILVGSVTCETKELFAARPQVVAVDINDLGTIKLNLEITWYPFDVEDMTASSGAGNKAAALQRRMSMYSQGTPETPTFKDHSFFSNLPDDIFENGKAAEEKMPLSLSFSDLPNGDCALTSHSTGSPSNSTNPEITITPAEFNLSSLASQNEGMDDTSSASSRNSLGEGQEPKSHLKEEDPEEPRKPASAPSEACRRQSSGAGAEHLFLENDVAEALLQESEEASELKPVELDTSEGNITKQLVKRLTSAEVPMATDRLLSEGSVGGESEGCRSFLDGSLEDAFNGLLLALEPHKEQYKEFQDLNQEVMNLDDILKK

SEQ ID NO: 2274 - protein, 541 aa, Homo sapiens
MGSQEVLGHAARLASSGLLLQVLFRLITFVLNAFILRFLSKEIVGVVNVRLTLLYSTTLFLAREAFRRACLSGGTQRDWSQTLNLLWLTVPLGVFWSLFLGWIWLQLLEVPDPNVVPHYATGVVLFGLSAVVELLGEPFWVLAQAHMFVKLKVIAESLSVILKSVLTAFLVLWLPHWGLYIFSLAQLFYTTVLVLCYVIYFTKLLGSPESTKLQTLPVSRITDLLPNITRNGAFINWKEAKLTWSFFKQSFLKQILTEGERYVMTFLNVLNFGDQGVYDIVNNLGSLVARLIFQPIEESFYIFFAKVLERGKDATLQKQEDVAVAAAVLESLLKLALLAGLTITVFGFAYSQLALDIYGGTMLSSGSGPVLLRSYCLYVLLLAINGVTECFTFAAMSKEEVDRYNFVMLALSSSFLVLSYLLTRWCGSVGFILANCFNMGIRITQSLCFIHRYYRRSPHRPLAGLHLSPVLLGTFALSGGVTAVSEVFLCCEQGWPARLAHIAVGAFCLGATLGTAFLTETKLIHFLRTQLGVPRRTDKMT

SEQ ID NO: 2275 - protein, 217 aa, Homo sapiens
MSSKVSRDTLYEAVREVLHGNQRKRRKFLETVELQISLKNYDPQKDKRFSGTVRLKSTPRPKFSVCVLGDQQHCDEAKAVDIPHMDIEALKKLNKNKKLVKKLAKKYDAFLASESLIKQIPRILGPGLNKAGKFPSLLTHNENMVAKVDEVKSTIKFQMKKVLCLAVAVGHVKMTDDELVYNIHLAVNFLVSLLKKNWQNVRALYIKSTMGKPQRLY

SEQ ID NO: 2276 - protein, 389 aa, Homo sapiens
MLSLRVPLAPITDPQQLQLSPLKGLSLVDKENTPPALSGTRVLASKTARRIFQEPTEPKTKAAAPGVEDEPLLRENPRRFVIFPIEYHDIWQMYKKAEASFWTAEEVDLSKDIQHWESLKPEERYFISHVLAFFAASDGIVNENLVERFSQEVQITEARCFYGFQIAMENIHSEMYSLLIDTYIKDPKEREFLFNAIETMPCVKKKADWALRWIGDKEATYGERVVAFAAVEGIFFSGSFASIFWLKKRGLMPGLTFSNELISRDEGLHCDFACLMFKHLVHKPSEERVREIIINAVRIEQEFLTEALPVKLIGMNCTLMKQYIEFVADRLMLELGFSKVFRVENPFDFMENISLEGKTNFFEKRVGEYQRMGVMSSPTENSFTLDADF

SEQ ID NO: 2277 - protein, 449 aa, Homo sapiens
MGRVGGMAQPMGRAGAPKPMGRAGSARRGRFKGCWSEGSPVHPVPAVLSWLLALLRCASTMLSLRVPLAPITDPQQLQLSPLKGLSLVDKENTPPALSGTRVLASKTARRIFQEPTEPKTKAAAPGVEDEPLLRENPRRFVIFPIEYHDIWQMYKKAEASFWTAEEVDLSKDIQHWESLKPEERYFISHVLAFFAASDGIVNENLVERFSQEVQITEARCFYGFQIAMENIHSEMYSLLIDTYIKDPKEREFLFNAIETMPCVKKKADWALRWIGDKEATYGERVVAFAAVEGIFFSGSFASIFWLKKRGLMPGLTFSNELISRDEGLHCDFACLMFKHLVHKPSEERVREIIINAVRIEQEFLTEALPVKLIGMNCTLMKQYIEFVADRLMLELGFSKVFRVENPFDFMENISLEGKTNFFEKRVGEYQRMGVMSSPTENSFTLDADF

SEQ ID NO: 2278 - protein, 214 aa, Homo sapiens
MGRRPARCYRYCKNKPYPKSRFCRGVPDAKIRIFDLGRKKAKVDEFPLCGHMVSDEYEQLSSEALEAARICANKYMVKSCGKDGFHIRVRLHPFHVIRINKMLSCAGADRLQTGMRGAFGKPQGTVARVHIGQVIMSIRTKLQNKEHVIEALRRAKFKFPGRQKIHISKKWGFTKFNADEFEDMVAEKRLIPDGCGVKYIPNRGPLDKWRALHS

SEQ ID NO: 2279 - protein, 1589 aa, Homo sapiens
MAKQLNLPENTDDWTKEDVNQWLESHKIDQKHREILTEQDVNGAVLKWLKKEHLVDMGITHGPAIQIEELFKELRKTAIEDSIQTSKMGKPSKNAPKDQTVSQKERRETSKQKQKGKENPDMANPSAMSTTAKGSKSLKVELIEDKIDYTKERQPSIDLTCVSYPFDEFSNPYRYKLDFSLQPETGPGNLIDPIHEFKAFTNTATATEEDVKMKFSNEVFRFASACMNSRTNGTIHFGVKDKPHGKIVGIKVTNDTKEALINHFNLMINKYFEDHQVQQAKKCIREPRFVEVLLPNSTLSDRFVIEVDIIPQFSECQYDYFQIKMQNYNNKIWEQSKKFSLFVRDGTSSKDITKNKVDFRAFKADFKTLAESRKAAEEKFRAKTNKKEREGPKLVKLLTGNQDLLDNSYYEQYILVTNKCHPDQTKHLDFLKEIKWFAVLEFDPESNINGVVKAYKESRVANLHFPSVYVEQKTTPNETISTLNLYHQPSWIFCNGRLDLDSEKYKPFDPSSWQRERASDVRKLISFLTHEDIMPRGKFLVVFLLLSSVDDPRDPLIETFCAFYQDLKGMENILCICVHPHIFQGWKDLLEARLIKHQDEISSQCISALSLEEINGTILKLKSVTQSSKRLLPSIGLSTVLLKKEEDIMTALEIICENECEGTLLEKDKNKFLEFKASKEEDFYRGGKVSWWNFYFSSESYSSPFVKRDKYERLEAMIQNCADSSKPTSTKIIHLYHHPGCGGTTLAMHILWELRKKFRCAVLKNKTVDFSEIGEQVTSLITYGAMNRQEYVPVLLLVDDFEEQDNVYLLQYSIQTAIAKKYIRYEKPLVIILNCMRSQNPEKSARIPDSIAVIQQLSPKEQRAFELKLKEIKEQHKNFEDFYSFMIMKTNFNKEYIENVVRNILKGQNIFTKEAKLFSFLALLNSYVPDTTISLSQCEKFLGIGNKKAFWGTEKFEDKMGTYSTILIKTEVIECGNYCGVRIIHSLIAEFSLEELKKSYHLNKSQIMLDMLTENLFFDTGMGKSKFLQDMHTLLLTRHRDEHEGETGNWFSPFIEALHKDEGNEAVEAVLLESIHRFNPNAFICQALARHFYIKKKDFGNALNWAKQAKIIEPDNSYISDTLGQVYKSKIRWWIEENGGNGNISVDDLIALLDLAEHASSAFKESQQQSEDREYEVKERLYPKSKRRYDTYNIAGYQGEIEVGLYTIQILQLIPFFDNKNELSKRYMVNFVSGSSDIPGDPNNEYKLALKNYIPYLTKLKFSLKKSFDFFDEYFVLLKPRNNIKQNEEAKTRRKVAGYFKKYVDIFCLLEESQNNTGLGSKFSEPLQVERCRRNLVALKADKFSGLLEYLIKSQEDAISTMKCIVNEYTFLLEQCTVKIQSKEKLNFILANIILSCIQPTSRLVKPVEKLKDQLREVLQPIGLTYQFSEPYFLASLLFWPENQQLDQHSEQMKEYAQALKNSFKGQYKHMHRTKQPIAYFFLGKGKRLERLVHKGKIDQCFKKTPDINSLWQSGDVWKEEKVQELLLRLQGRAENNCLYIEYGINEKITIPITPAFLGQLRSGRSIEKVSFYLGFSIGGPLAYDIEIV

SEQ ID NO: 2280 - protein, 416 aa, Homo sapiens
MRQLCRGRVLGISVAIAHGVFSGSLNILLKFLISRYQFSFLTLVQCLTSSTAALSLELLRRLGLIAVPPFGLSLARSFAGVAVLSTLQSSLTLWSLRGLSLPMYVVFKRCLPLVTMLIGVLVLKNGAPSPGVLAAVLITTCGAALAGAGDLTGDPIGYVTGVLAVLVHAAYLVLIQKASADTEHGPLTAQYVIAVSATPLLVICSFASTDSIHAWTFPGWKDPAMVCIFVACILIGCAMNFTTLHCTYINSAVTTSFVGVVKSIATITVGMVAFSDVEPTSLFIAGVVVNTLGSIIYCVAKFMETRKQSNYEDLEAQPRGEEAQLSGDQLPFVMEELPGEGGNGRSEGGEAAGGPAQESRQEVRGSPRGVPLVAGSSEEGSRRSLKDAYLEVWRLVRGTRYMKKDYLIENEELPSP

SEQ ID NO: 2281 - protein, 190 aa, Homo sapiens
MPSPVDASSADGGSGLGSHRRKRTTFSKGQLLELERAFAAWPYPNISTHEHLAWVTCLPEAKVQVWFQKRWAKIIKNRKSGILSPGSECPQSSCSLPDTLQQPWDPQMPGQPPPSSGTPQRTSVCRHSSCPAPGLSPRQGWEGAKAVAPWGSAGASEVHPSLERATPQTSLGSLSDLIYALAIVVNVDHS

SEQ ID NO: 2282 - protein, 266 aa, Homo sapiens
MSSSVKTPALEELVPGSEEKPKGRSPLSWGSLFGHRSEKIVFAKSDGGTDENVLTVTITETTVIESDLGVWSSRALLYLTLWFFFSFCTLFLNKYILSLLGGEPSMLGAVQMLSTTVIGCVKTLVPCCLYQHKARLSYPPNFLMTMLFVGLMRFATVVLGLVSLKNVAVSFAETVKSSAPIFTVIMSRMILGEYTGRPSDREEREELQLQPGRGAAASDRRSPVPPSERHGVRPHGENLPGDFQVPQALHRVALSMALPCPMLPAS

SEQ ID NO: 2283 - protein, 246 aa, Homo sapiens
MSSSVKTPALEELVPGSEEKPKGRSPLSWGSLFGHRSEKIVFAKSDGGTDENVLTVTITETTVIESDLGVWSSRALLYLTLWFFFSFCTLFLNKYILSLLGGEPSMLGAVQMLSTTVIGCVKTLVPCCLYQHKARLSYPPNFLMTMLFVGLMRFATVVLGLVSLKNVAVSFAETVKSSAPIFTVIMSRMILGEYTGRPSDREEREELQLQPGRGAAASDRRSPVPPSERHGVRPHGENLPGDFQAQ

SEQ ID NO: 2284 - protein, 424 aa, Homo sapiens
MEPFSCDTFVALPPATVDNRIIFGKNSDRLYDEVQEVVYFPAVVHDNLGERLKCTYIEIDQVPETYAVVLSRPAWLWGAEMGANEHGVCIGNEAVWGREEVCDEEALLGMDLVRLGLERADTAEKALNVIVDLLEKYGQGGNCTEGRMVFSYHNSFLIADRNEAWILETAGKYWAAEKVQEGVRNISNQLSITTKIAREHPDMRNYAKRKGWWDGKKEFDFAAAYSYLDTAKMMTSSGRYCEGYKLLNKHKGNITFETMMEILRDKPSGINMEGEFLTTASMVSILPQDSSLPCIHFFTGTPDPERSVFKPFIFVPHISQLLDTSSPTFELEDLVKKKSHFKPDRRHPLYQKHQQALEVVNNNEEKAKIMLDNMRKLEKELFREMESILQNKHLDVEKIVNLFPQCTKDEIQIYQSNLSVKVSS

SEQ ID NO: 2285 - protein, 417 aa, Homo sapiens
MPPLATPPSVHLSLRVAGRPDRLYDEVQEVVYFPAVVHDNLGERLKCTYIEIDQVPETYAVVLSRPAWLWGAEMGANEHGVCIGNEAVWGREEVCDEEALLGMDLVRLGLERADTAEKALNVIVDLLEKYGQGGNCTEGRMVFSYHNSFLIADRNEAWILETAGKYWAAEKVQEGVRNISNQLSITTKIAREHPDMRNYAKRKGWWDGKKEFDFAAAYSYLDTAKMMTSSGRYCEGYKLLNKHKGNITFETMMEILRDKPSGINMEGEFLTTASMVSILPQDSSLPCIHFFTGTPDPERSVFKPFIFVPHISQLLDTSSPTFELEDLVKKKSHFKPDRRHPLYQKHQQALEVVNNNEEKAKIMLDNMRKLEKELFREMESILQNKHLDVEKIVNLFPQCTKDEIQIYQSNLSVKVSS

SEQ ID NO: 2286 - protein, 478 aa, Homo sapiens
MGRCCFYTAGTLSLLLLVTSVTLLVARVFQKAVDQSIEKKIVLRNGTEAFDSWEKPPLPVYTQFYFFNVTNPEEILRGETPRVEEVGPYTYRELRNKANIQFGDNGTTISAVSNKAYVFERDQSVGDPKIDLIRTLNIPVLTVIEWSQVHFLREIIEAMLKAYQQKLFVTHTVDELLWGYKDEILSLIHVFRPDISPYFGLFYEKNGTNDGDYVFLTGEDSYLNFTKIVEWNGKTSLDWWITDKCNMINGTDGDSFHPLITKDEVLYVFPSDFCRSVYITFSDYESVQGLPAFRYKVPAEILANTSDNAGFCIPEGNCLGSGVLNVSICKNGAPIIMSFPHFYQADERFVSAIEGMHPNQEDHETFVDINPLTGIILKAAKRFQINIYVKKLDDFVETGDIRTMVFPVMYLNESVHIDKETASRLKSMINTTLIITNIPYIIMALGVFFGLVFTWLACKGQGSMDEGTADERAPLIRT

SEQ ID NO: 2287 - protein, 335 aa, Homo sapiens
MGRCCFYTAGTLSLLLLVTSVTLLVARVFQKAVDQSIEKKIVLRNGTEAFDSWEKPPLPVYTQFYFFNVTNPEEILRGETPRVEEVGPYTYRSLDWWITDKCNMINGTDGDSFHPLITKDEVLYVFPSDFCRSVYITFSDYESVQGLPAFRYKVPAEILANTSDNAGFCIPEGNCLGSGVLNVSICKNGAPIIMSFPHFYQADERFVSAIEGMHPNQEDHETFVDINPLTGIILKAAKRFQINIYVKKLDDFVETGDIRTMVFPVMYLNESVHIDKETASRLKSMINTTLIITNIPYIIMALGVFFGLVFTWLACKGQGSMDEGTADERAPLIRT

SEQ ID NO: 2288 - protein, 425 aa, Homo sapiens
MASSSPDSPCSCDCFVSVPPASAIPAVIFAKNSDRPRDEVQEVVFVPAGTHTPGSRLQCTYIEVEQVSKTHAVILSRPSWLWGAEMGANEHGVCIGNEAVWTKEPVGEGEALLGMDLLRLALERSSSAQEALHVITGLLEHYGQGGNCLEDAAPFSYHSTFLLADRTEAWVLETAGRLWAAQRIQEGARNISNQLSIGTDISAQHPELRTHAQAKGWWDGQGAFDFAQIFSLTQQPVRMEAAKARFQAGRELLRQRQGGITAEVMMGILRDKESGICMDSGGFRTTASMVSVLPQDPTQPCVHFLTATPDPSRSVFKPFIFGMGVAQAPQVLSPTFGAQDPVRTLPRFQTQVDRRHTLYRGHQAALGLMERDQDRGQQLQQKQQDLEQEGLEATQGLLAGEWAPPLWELGSLFQAFVKRESQAYA

SEQ ID NO: 2289 - protein, 378 aa, Homo sapiens
MASSSPDSPCSCDCFVSVPPASAIPAVIFAKNSDRPRDEVQEVVFVPAGTHTPGSRLQCTYIEVEQVSKTHAVILSRPSWLWGAEMGANEHGVCIGNEAVWTKEPVGEGEALLGMDLLRLALERSSSAQEALHVITGLLEHYGQGGNCLEDAAPFSYHSTFLLADRTEAWVLETAGRLWAAQRIQEGARNISNQLSIGTDISAQHPELRTHAQAKGWWDGQGAFDFAQIFSLTQQPVRMEAAKARFQAGRELLRQRQGGITAEVMMGILRDKESGICMDSGGFRTTASMVSVLPQDPTQPCVHFLTATPDPSRSVFKPFIFGMGVAQAPQVLSPTFGAQDPVRTLPRFQTQVDRRHTLYRGHQAALGLMERDQVSPRE

SEQ ID NO: 2290 - protein, 338 aa, Homo sapiens
MAGSHPYFNLPDSTHPSPPSAPPSLRWHQRCQPSGATNGLLVALLGGGLPAGFVGPLSRMAYQGSNLPSLELLICRCLFHLPIALLLKLRGDPLLGPPDIRGWACFCALLNVLSIGCAYSAVQVVPAGNAATVRKGSSTVCSAVLTLCLESQGLGGYEWCGLLGSILGLIIILGPGLWTLQEGTTGVYTTLGYVQAFLGGLALSLGLLVYRSLHFPSCLPTVAFLSGLVGLLGCVPGLFVLQTPVLPSDLLSWSCVGAEGILALVSFTCVGYAVTKAHPALVCAVLHSEVVVALILQYYMLHETVALSDIMGAGVVLGSIAIITARNLSCERTGKVEE

SEQ ID NO: 2291 - protein, 462 aa, Homo sapiens
MAQVSINNDYSEWDLSTDAGERARLLQSPCVDTAPKSEWEASPGGLDRGTTSTLGAIFIVVNACLGAGLLNFPAAFSTAGGVAAGIALQMGMLVFIISGLVILAYCSQASNERTYQEVVWAVCGKLTGVLCEVAIAVYTFGTCIAFLIIIGDQQDKIIAVMAKEPEGASGPWYTDRKFTISLTAFLFILPLSIPREIGFQKYASFLSVVGTWYVTAIVIIKYIWPDKEMTPGNILTRPASWMAVFNAMPTICFGFQCHVSSVPVFNSMQQPEVKTWGGVVTAAMVIALAVYMGTGICGFLTFGAAVDPDVLLSYPSEDMAVAVARAFIILSVLTSYPILHFCGRAVVEGLWLRYQGVPVEEDVGRERRRRVLQTLVWFLLTLLLALFIPDIGKVISVIGGLAACFIFVFPGLCLIQAKLSEMEEVKPASWWVLVSYGVLLVTLGAFIFGQTTANAIFVDLLA

SEQ ID NO: 2292 - protein, 344 aa, Homo sapiens
MAQVSINNDYSEWDLSTDAGERARLLQSPCVDTAPKSEWEASPGGLDRGTTSTLGAIFIVVNACLGAGLLNFPAAFSTAGGVAAGIALQMGMLVFIISGLVILAYCSQASNERTYQEVVWAVCGKLTGVLCEVAIAVYTFGTCIAFLIIIGDQQDKIIAVMAKEPEGASGPWYTDRKFTISLTAFLFILPLSIPREIGFQKYASFLSVVGTWYVTAIVIIKYIWPDKEMTPGNILTRPASWMAVFNAMPTICFGFQCHVSSVPVFNSMQQPEVKTWGGVVTAAMVIALAVYMGTGICGFLTFGAAVDPDVLLSYPSEDMAVAVARAFIILSVLTSYPILHFCGR

SEQ ID NO: 2293 - protein, 314 aa, Homo sapiens
MVKLLVAKILCMVGVFFFMLLGSLLPVKIIETDFEKAHRSKKILSLCNTFGGGVFLATCFNALLPAVREKLQKVLSLGHISTDYPLAETILLLGFFMTVFLEQLILTFRKEKPSFIDLETFNAGSDVGSDSEYESPFMGGARGHALYVEPHGHGPSLSVQGLSRASPVRLLSLAFALSAHSVFEGLALGLQEEGEKVVSLFVGVAVHETLVAVALGISMARSAMPLRDAAKLAVTVSAMIPLGIGLGLGIESAQGVPGSVASVLLQGLAGGTFLFITFLEILAKELEEKSDRLLKVLFLVLGYTVLAGMVFLKW

SEQ ID NO: 2294 - protein, 105 aa, Homo sapiens
MVKLLVAKILCMVGVFFFMLLGSLLPVKIIETDFEKAHRSKKILSLCNTFGGGVFLATCFNALLPAVREKVRAPWALAAALGTLWPRDSDAFSTLMPSSVKALML

SEQ ID NO: 2295 - protein, 647 aa, Homo sapiens
MASLVSLELGLLLAVLVVTATASPPAGLLSLLTSGQGALDQEALGGLLNTLADRVHCANGPCGKCLSVEDALGLGEPEGSGLPPGPVLEARYVARLSAAAVLYLSNPEGTCEDARAGLWASHADHLLALLESPKALTPGLSWLLQRMQARAAGQTPKMACVDIPQLLEEAVGAGAPGSAGGVLAALLDHVRSGSCFHALPSPQYFVDFVFQQHSSEVPMTLAELSALMQRLGVGREAHSDHSHRHRGASSRDPVPLISSSNSSSVWDTVCLSARDVMAAYGLSEQAGVTPEAWAQLSPALLQQQLSGACTSQSRPPVQDQLSQSERYLYGSLATLLICLCAVFGLLLLTCTGCRGVTHYILQTFLSLAVGAVTGDAVLHLTPKVLGLHTHSEEGLSPQPTWRLLAMLAGLYAFFLFENLFNLLLPRDPEDLEDGPCGHSSHSHGGHSHGVSLQLAPSELRQPKPPHEGSRADLVAEESPELLNPEPRRLSPELRLLPYMITLGDAVHNFADGLAVGAAFASSWKTGLATSLAVFCHELPHELGDFAALLHAGLSVRQALLLNLASALTAFAGLYVALAVGVSEESEAWILAVATGLFLYVALCDMLPAMLKVRDPRPWLLFLLHNVGLLGGWTVLLLLSLYEDDITF

SEQ ID NO: 2296 - protein, 622 aa, Homo sapiens
MVDVVGLERETGPRGSPWPGLPLPSLVGPAPLLTCLCPQCLSVEDALGLGEPEGSGLPPGPVLEARYVARLSAAAVLYLSNPEGTCEDARAGLWASHADHLLALLESPKALTPGLSWLLQRMQARAAGQTPKMACVDIPQLLEEAVGAGAPGSAGGVLAALLDHVRSGSCFHALPSPQYFVDFVFQQHSSEVPMTLAELSALMQRLGVGREAHSDHSHRHRGASSRDPVPLISSSNSSSVWDTVCLSARDVMAAYGLSEQAGVTPEAWAQLSPALLQQQLSGACTSQSRPPVQDQLSQSERYLYGSLATLLICLCAVFGLLLLTCTGCRGVTHYILQTFLSLAVGAVTGDAVLHLTPKVLGLHTHSEEGLSPQPTWRLLAMLAGLYAFFLFENLFNLLLPRDPEDLEDGPCGHSSHSHGGHSHGVSLQLAPSELRQPKPPHEGSRADLVAEESPELLNPEPRRLSPELRLLPYMITLGDAVHNFADGLAVGAAFASSWKTGLATSLAVFCHELPHELGDFAALLHAGLSVRQALLLNLASALTAFAGLYVALAVGVSEESEAWILAVATGLFLYVALCDMLPAMLKVRDPRPWLLFLLHNVGLLGGWTVLLLLSLYEDDITF

SEQ ID NO: 2297 - protein, 656 aa, Homo sapiens
MTGAKRKKKSMLWSKMHTPQCEDIIQWCRRRLPILDWAPHYNLKENLLPDTVSGIMLAVQQVTQGLAFAVLSSVHPVFGLYGSLFPAIIYAIFGMGHHVATGTFALTSLISANAVERIVPQNMQNLTTQSNTSVLGLSDFEMQRIHVAAAVSFLGGVIQVAMFVLQLGSATFVVTEPVISAMTTGAATHVVTSQVKYLLGMKMPYISGPLGFFYIYAYVFENIKSVRLEALLLSLLSIVVLVLVKELNEQFKRKIKVVLPVDLVLIIAASFACYCTNMENTYGLEVVGHIPQGIPSPRAPPMNILSAVITEAFGVALVGYVASLALAQGSAKKFKYSIDDNQEFLAHGLSNIVSSFFFCIPSAAAMGRTAGLYSTGAKTQVACLISCIFVLIVIYAIGPLLYWLPMCVLASIIVVGLKGMLIQFRDLKKYWNVDKIDWGIWVSTYVFTICFAANVGLLFGVVCTIAIVIGRFPRAMTVSIKNMKEMEFKVKTEMDSETLQQVKIISINNPLVFLNAKKFYTDLMNMIQKENACNQPLDDISKCEQNTLLNSLSNGNCNEEASQSCPNEKCYLILDCSGFTFFDYSGVSMLVEVYMDCKGRSVDVLLAHCTASLIKAMTYYGNLDSEKPIFFESVSAAISHIHSNKNLSKLSDHSEV

SEQ ID NO: 2298 - protein, 663 aa, Homo sapiens
MTGAKRKKKSMLWSKMHTPQCEDIIQWCRRRLPILDWAPHYNLKENLLPDTVSGIMLAVQQVTQGLAFAVLSSVHPVFGLYGSLFPAIIYAIFGMGHHVATGTFALTSLISANAVERIVPQNMQNLTTQSNTSVLGLSDFEMQRIHVAAAVSFLGGVIQVAMFVLQLGSATFVVTEPVISAMTTGAATHVVTSQVKYLLGMKMPYISGPLGFFYIYAYVFENIKSVRLEALLLSLLSIVVLVLVKELNEQFKRKIKVVLPVDLVLIIAASFACYCTNMENTYGLEVVGHIPQGIPSPRAPPMNILSAVITEAFGVALVGYVASLALAQGSAKKFKYSIDDNQEFLAHGLSNIVSSFFFCIPSAAAMGRTAGLYSTGAKTQVACLISCIFVLIVIYAIGPLLYWLPMCVLASIIVVGLKGMLIQFRDLKKYWNVDKIDWGIWVSTYVFTICFAANVGLLFGVVCTIAIVIGRFPRAMTVSIKNMKEMEFKVKTEMDSETLQQVKIISINNPLVFLNAKKFYTDLMNMIQKENACNQPLDDISKCEQNTLLNSLSNGNCNEEASQSCPNEKCYLILDCSGFTFFDYSGVSMLVEVYMDCKGRSVDVLLAHCTASLIKAMTYYGNLDSEKPIFFESVSAAISHIHSNKASYKLLFDNLDLPTMPPL

SEQ ID NO: 2299 - protein, 991 aa, Homo sapiens
MAGPVSLRDLLMGASAWMGSESPGGSPTEGGGSAAGGPEPPWREDEICVVGIFGKTALRLNSEKFSLVNTVCDRQVFPLFRHQDPGDPGPGIRTEAGAVGEAGGAEDPGAAAGGSVRGSGAVAEGNRTEAGSQDYSLLQAYYSQESKVLYLLLTSICDNSQLLRACRALQSGEAGGGLSLPHAEAHEFWKHQEKLQCLSLLYLFSVCHILLLVHPTCSFDITYDRVFRALDGLRQKVLPLLKTAIKDCPVGKDWKLNCRPCPPRLLFLFQLNGALKVEPPRNQDPAHPDKPKKHSPKRRLQHALEDQIYRIFRKSRVLTNQSINCLFTVPANQAFVYIVPGSQEEDPVGMLLDQLRSHCTVKDPESLLVPAPLSGPRRYQVMRQHSRQQLSFHIDSSSSSSSGQLVDFTLREFLWQHVELVLSKKGFDDSVGRNPQPSHFELPTYQKWISAASKLYEVAIDGKEEDLGSPTGELTSKILSSIKVLEGFLDIDTKFSENRCQKALPMAHSAYQSNLPHNYTMTVHKNQLAQALRVYSQHARGPAFHKYAMQLHEDCYKFWSNGHQLCEERSLTDQHCVHKFHSLPKSGEKPEADRNPPVLYHNSRARSTGACNCGRKQAPRDDPFDIKAANYDFYQLLEEKCCGKLDHINFPVFEPSTPDPAPAKNESSPAPPDSDADKLKEKEPQTQGESTSLSLALSLGQSTDSLGTYPADPQAGGDNPEVHGQVEVKTEKRPNFVDRQASTVEYLPGMLHSNCPKGLLPKFSSWSLVKLGPAKSYNFHTGLDQQGFIPGTNYLMPWDIVIRTRAEDEGDLDTNSWPAPNKAIPGKRSAVVMGRGRRRDDIARAFVGFEYEDSRGRRFMCSGPDKVMKVMGSGPKESALKALNSDMPLYILSSSQGRGLKPHYAQLMRLFVVVPDAPLQIILMPQVQPGPPPCPVFYPEKQEITLPPDGLWVLRFPYAYVTERGPCFPPKENVQLMSYKVLRGVLKAVTQ

SEQ ID NO: 2300 - protein, 1023 aa, Homo sapiens
  MOD_RES (970)..(970): Any amino acid
MAGPVSLRDLLMGASAWMGSESPGGSPTEGGGSAAGGPEPPWREDEICVVGIFGKTALRLNSEKFSLVNTVCDRQVFPLFRHQDPGDPGPGIRTEAGAVGEAGGAEDPGAAAGGSVRGSGAVAEGNRTEAGSQDYSLLQAYYSQESKVLYLLLTSICDNSQLLRACRALQSGEAGGGLSLPHAEAHEFWKHQEKLQCLSLLYLFSVCHILLLVHPTCSFDITYDRVFRALDGLRQKVLPLLKTAIKDCPVGKDWKLNCRPCPPRLLFLFQLNGALKVEPPRNQDPAHPDKPKKHSPKRRLQHALEDQIYRIFRKSRVLTNQSINCLFTVPANQAFVYIVPGSQEEDPVGMLLDQLRSHCTVKDPESLLVPAPLSGPRRYQVMRQHSRQQLSFHIDSSSSSSSGQLVDFTLREFLWQHVELVLSKKGFDDSVGRNPQPSHFELPTYQKWISAASKLYEVAIDGKEEDLGSPTGELTSKILSSIKVLEGFLDIDTKFSENRCQKALPMAHSAYQSNLPHNYTMTVHKNQLAQALRVYSQHARGPAFHKYAMQLHEDCYKFWSNGHQLCEERSLTDQHCVHKFHSLPKSGEKPEADRNPPVLYHNSRARSTGACNCGRKQAPRDDPFDIKAANYDFYQLLEEKCCGKLDHINFPVFEPSTPDPAPAKNESSPAPPDSDADKLKEKEPQTQGESTSLSLALSLGQSTDSLGTYPADPQAGGDNPEVHGQVEVKTEKRPNFVDRQASTVEYLPGMLHSNCPKGLLPKFSSWSLVKLGPAKSYNFHTGLDQQGFIPGTNYLMPWDIVIRTRAEDEGDLDTNSWPAPNKAIPGKRSAVVMGRGRRRDDIARAFVGFEYEDSRGRRFMCSGPDKVMKVMGSGPKESALKALNSDMPLYILSSSQGRGLKPHYAQLMRLFVVVPDAPLQIILMPQVQPGPPPCPVFYPEKQEITLPPDGLWVLRFPYAYGLREDLVSPXGKKQEIPLPPDGLWVLRFPYAYVTERGPCFPPKENVQLMSYKVLRGVLKAVTQ

SEQ ID NO: 2301 - protein, 588 aa, Homo sapiens
MAGPVSLRDLLMGASAWMGSESPGGSPTEGGGSAAGGPEPPWREDEICVVGIFGKTALRLNSEKFSLVNTVCDRQVFPLFRHQDPGDPGPGIRTEAGAVGEAGGAEDPGAAAGGSVRGSGAVAEGNRTEAGSQDYSLLQAYYSQESKVLYLLLTSICDNSQLLRACRALQSGEAGGGLSLPHAEAHEFWKHQEKLQCLSLLYLFSVCHILLLVHPTCSFDITYDRVFRALDGLRQKVLPLLKTAIKDCPVGKDWKLNCRPCPPRLLFLFQLNGALKVEPPRNQDPAHPDKPKKHSPKRRLQHALEDQIYRIFRKSRVLTNQSINCLFTVPANQAFVYIVPGSQEEDPVGMLLDQLRSHCTVKDPESLLVPAPLSGPRRYQVMRQHSRQQLSFHIDSSSSSSSGQLVDFTLREFLWQHVELVLSKKGFDDSVGRNPQPSHFELPTYQKWISAASKLYEVAIDGKEEDLGSPTGELTSKILSSIKVLEGFLDIDTKFSENRCQKALPMAHSAYQSNLPHNYTMTVHKNQLAQALRVYSQHARGPAFHKYAMQLHEDCYKFWSNGHQLCEERSLTDQHCVHKFHSLPKSGS

SEQ ID NO: 2302 - protein, 391 aa, Homo sapiens
MDSLGAVSTRLGFDLFKELKKTNDGNIFFSPVGILTAIGMVLLGTRGATASQLEEVFHSEKETKSSRIKAEEKEVIENTEAVHQQFQKFLTEISKLTNDYELNITNRLFGEKTYLFLQKYLDYVEKYYHASLEPVDFVNAADESRKKINSWVESKTNEKIKDLFPDGSISSSTKLVLVNMVYFKGQWDREFKKENTKEEKFWMNKSTSKSVQMMTQSHSFSFTFLEDLQAKILGIPYKNNDLSMFVLLPNDIDGLEKIIDKISPEKLVEWTSPGHMEERKVNLHLPRFEVEDGYDLEAVLAAMGMGDAFSEHKADYSGMSSGSGLYAQKFLHSSFVAVTEEGTEAAAATGIGFTVTSAPGHENVHCNHPFLFFIRHNESNSILFFGRFSSP

SEQ ID NO: 2303 - protein, 339 aa, Homo sapiens
MDSLGAVSTRLGFDLFKELKKTNDGNIFFSPVGILTAIGMVLLGTRGATASQLEEVFHSEKETKSSRIKAEEKEVIENTEAVHQQFQKFLTEISKLTNDYELNITNRLFGEKTYLFLQKYLDYVEKYYHASLEPVDFVNAADESRKKINSWVESKTNEKIKDLFPDGSISSSTKLVLVNMVYFKGQWDREFKKENTKEEKFWMNKIIDKISPEKLVEWTSPGHMEERKVNLHLPRFEVEDGYDLEAVLAAMGMGDAFSEHKADYSGMSSGSGLYAQKFLHSSFVAVTEEGTEAAAATGIGFTVTSAPGHENVHCNHPFLFFIRHNESNSILFFGRFSSP

SEQ ID NO: 2304 - protein, 211 aa, Homo sapiens
MDNLSSEEIQQRAHQITDESLESTRRILGLAIESQDAGIKTITMLDEQKEQLNRIEEGLDQINKDMRETEKTLTELNKCCGLCVCPCNRTKNFESGKAYKTTWGDGGENSPCNVVSKQPGPVTNGQLQQPTTGAASGGYIKRITNDAREDEMEENLTQVGSILGNLKDMALNIGNEIDAQNPQIKRITDKADTNRDRIDIANARAKKLIDS

SEQ ID NO: 2305 - protein, 158 aa, Homo sapiens
MDNLSSEEIQQRAHQITDESLESTRRILGLAIESQDAGIKTITMLDEQKEQLNRIEEGLDQINKDMRETEKTLTELNKCCGLCVCPCNSITNDAREDEMEENLTQVGSILGNLKDMALNIGNEIDAQNPQIKRITDKADTNRDRIDIANARAKKLIDS

SEQ ID NO: 2306 - protein, 1148 aa, Homo sapiens
MASAPAEAETRQRLLRTVKKEVKQIMEEAVTRKFVHEDSSHIISFCAAVEACVLHGLRRRAAGFLRSNKIAALFMKVGKNFPPAEDLSRKVQDLEQLIESARNQIQGLQENVRKLPKLPNLSPLAIKHLWIRTALFEKVLDKIVHYLVENSSKYYEKEALLMDPVDGPILASLLVGPCALEYTKMKTADHFWTDPSADELVQRHRIHSSHVRQDSPTKRPALCIQKRHSSGSMDDRPSLSARDYVESLHQNSRATLLYGKNNVLVQPRDDMEAVPGYLSLHQTADVMTLKWTPNQLMNGSVGDLDYEKSVYWDYAMTIRLEEIVYLHCHQQVDSGGTVVLVSQDGIQRPPFRFPKGGHLLQFLSCLENGLLPHGQLDPPLWSQRGKGKVFPKLRKRSPQGSAESTSSDKDDDEATDYVFRIIYPGMQSEFVAPDFLGSTSSVSVGPAWMMVPAGRSMLVVARGSQWEPARWDTTLPTPSPKEQPPMPQDLMDVSVSNLPSLWQPSPRKSSCSSCSQSGSADGSSTNGCNHERAPLKLLCDNMKYQILSRAFYGWLAYCRHLSTVRTHLSALVNHMIVSPDLPCDAGQGLTARIWEQYLHDSTSYEEQELLRLIYYGGIQPEIRKAVWPFLLGHYQFGMTETERKEVDEQIHACYAQTMAEWLGCEAIVRQRERESHAAALAKCSSGASLDSHLHRMLHRDSTISNESSQSCSSGRQNIRLHSDSSSSTQVFESVDEVEQVEAEGRLEEKQPKIPNGNLVNGTCSPDSGHPSSHNFSSGLSEHSEPSLSTEDSVLDAQRNTPTVLRPRDGSVDDRQSSEATTSQDEAPREELAVQDSLESDLLANESMDEFMSITGSLDMALPEKDDVVMEGWRSSETEKHGQADSEDNLSEEPEMESLFPALASLAVTTSANEVSPVSSSGVTYSPELLDLYTVNLHRIEKDVQRCDRNYWYFTPANLEKLRNIMCSYIWQHIEIGYVQGMCDLLAPLLVILDDEALAFSCFTELMKRMNQNFPHGGAMDTHFANMRSLIQILDSELFELMHQNGDYTHFYFCYRWFLLDFKRELVYDDVFLVWETIWAAKHVSSAHYVLFIALALVEVYRDIILENNMDFTDIIKFFNEMAERHNTKQVLKLARDLVYKVQTLIENK

SEQ ID NO: 2307 - protein, 1165 aa, Homo sapiens
MEEAVTRKFVHEDSSHIISFCAAVEACVLHGLRRRAAGFLRSNKIAALFMKVGKNFPPAEDLSRKVQDLEQLIESARNQIQGLQENVRKLPKLPNLSPLAIKHLWIRTALFEKVLDKIVHYLVENSSKYYEKEALLMDPVDGPILASLLVGPCALEYTKMKTADHFWTDPSADELVQRHRIHSSHVRQDSPTKRPALCIQKRHSSGSMDDRPSLSARDYVESLHQNSRATLLYGKNNVLVQPRDDMEAVPGYLSLHQTADVMTLKSALFEKVLDKIVHYLVENSSKYYEKEALLMDPVDGPILASLLVGPCALEYTKMKTADHFWTDPSADELVQRHRIHSSHVRQDSPTKRPALCIQKRHSSGSMDDRPSLSARDYVESLHQNSRATLLYGKNNVLVQPRDDMEAVPGYLSLHQTADVMTLKWTPNQLMNGSVGDLDYEKSVYWDYAMTIRLEEIVYLHCHQQVDSGGTVVLVSQDGIQRPPFRFPKGGHLLQFLSCLENGLLPHGQLDPPLWSQRGKGKVFPKLRKRSPQGSAESTSSDKDDDEATDYVFRIIYPGMQSEFVPQDLMDVSVSNLPSLWQPSPRKSSCSSCSQSGSADGSSTNGCNHERAPLKLLCDNMKYQILSRAFYGWLAYCRHLSTVRTHLSALVNHMIVSPDLPCDAGQGLTARIWEQYLHDSTSYEEQELLRLIYYGGIQPEIRKAVWPFLLGHYQFGMTETERKESSQSCSSGRQNIRLHSDSSSSTQVFESVDEVEQVEAEGRLEEKQPKIPNGNLVNGTCSPDSGHPSSHNFSSGLSEHSEPSLSTEDSVLDAQRNTPTVLRPRDGSVDDRQSSEATTSQDEAPREELAVQDSLESDLLANESMDEFMSITGSLDMALPEKDDVVMEGWRSSETEKHGQADSEDNLSEEPEMESLFPALASLAVTTSANEVSPVSSSGVTYSPELLDLYTVNLHRIEKDVQRCDRNYWYFTPANLEKLRNIMCSYIWQHIEIGYVQGMCDLLAPLLVILDDEALAFSCFTELMKRMNQNFPHGGAMDTHFANMRSLIQILDSELFELMHQNGDYTHFYFCYRWFLLDFKRELVYDDVFLVWETIWAAKHVSSAHYVLFIALALVEVYRDIILENNMDFTDIIKFFNEMAERHNTKQVLKLARDLVYKVQTLIENK

SEQ ID NO: 2308 - protein, 1093 aa, Homo sapiens
MASAPAEAETRQRLLRTVKKEVKQIMEEAVTRKFVHEDSSHIISFCAAVEACVLHGLRRRAAGFLRSNKIAALFMKVGKNFPPAEDLSRKVQDLEQLIESARNQIQGLQENVRKLPKLPNLSPLAIKHLWIRTALFEKVLDKIVHYLVENSSKYYEKEALLMDPVDGPILASLLVGPCALEYTKMKTADHFWTDPSADELVQRHRIHSSHVRQDSPTKRPALCIQKRHSSGSMDDRPSLSARDYVESLHQNSRATLLYGKNNVLVQPRDDMEAVPGYLSLHQTADVMTLKWTPNQLMNGSVGDLDYEKSVYWDYAMTIRLEEIVYLHCHQQVDSGGTVVLVSQDGIQRPPFRFPKGGHLLQFLSCLENGLLPHGQLDPPLWSQRGKGKVFPKLRKRSPQGSAESTSSDKDDDEATDYVFRIIYPGMQSEFVPQDLMDVSVSNLPSLWQPSPRKSSCSSCSQSGSADGSSTNGCNHERAPLKLLCDNMKYQILSRAFYGWLAYCRHLSTVRTHLSALVNHMIVSPDLPCDAGQGLTARIWEQYLHDSTSYEEQELLRLIYYGGIQPEIRKAVWPFLLGHYQFGMTETERKEVDEQIHACYAQTMAEWLGCEAIVRQRERESHAAALAKCSSGASLDSHLHRMLHRDSTISNESSQSCSSGRQNIRLHSDSSSSTQVFESVDEVEQVEAEGRLEEKQPKIPNGNLVNGTCSPDSGHPSSHNFSSGLSEHSEPSLSTEDSVLDAQRNTPTVLRPRDGSVDDRQSSEATTSQDEAPREELAVQDSLESDLLANESMDEFMSITGSLDMALPEKDDVVMEGWRSSETEKHGQADSEDNLSEEPEMESLFPALASLAVTTSANEVSPVSSSGVTYSPELLDLYTVNLHRIEKDVQRCDRNYWYFTPANLEKLRNIMCSYIWQHIEIGYVQGMCDLLAPLLVILDDEALAFSCFTELMKRMNQNFPHGGAMDTHFANMRSLIQILDSELFELMHQNGDYTHFYFCYRWFLLDFKRELVYDDVFLVWETIWAAKHVSSAHYVLFIALALVEVYRDIILENNMDFTDIIKFFNEMAERHNTKQVLKLARDLVYKVQTLIENK

SEQ ID NO: 2309 - protein, 365 aa, Homo sapiens
MAAAAAGTATSQRFFQSFSDALIDEDPQAALEELTKALEQKPDDAQYYCQRAYCHILLGNYCVAVADAKKSLELNPNNSTAMLRKGICEYHEKNYAAALETFTEGQKLDIETGFHRVGQAGLQLLTSSDPPALDSQSAGITGADANFSVWIKRCQEAQNGSESEVWTHQSKIKYDWYQTESQVVITLMIKNVQKNDVNVEFSEKELSALVKLPSGEDYNLKLELLHPIIPEQSTFKVLSTKIEIKLKKPEAVRWEKLEGQGDVPTPKQFVADVKNLYPSSSPYTRNWDKLVGEIKEEEKNEKLEGDAALNRLFQQIYSDGSDEVKRAMNKSFMESGGTVLSTNWSDVGKRKVEINPPDDMEWKKY

SEQ ID NO: 2310 - protein, 333 aa, Homo sapiens
MAAAAAGTATSQRFFQSFSDALIDEDPQAALEELTKALEQKPDDAQYYCQRAYCHILLGNYCVAVADAKKSLELNPNNSTAMLRKGICEYHEKNYAAALETFTEGQKLDSADANFSVWIKRCQEAQNGSESEVWTHQSKIKYDWYQTESQVVITLMIKNVQKNDVNVEFSEKELSALVKLPSGEDYNLKLELLHPIIPEQSTFKVLSTKIEIKLKKPEAVRWEKLEGQGDVPTPKQFVADVKNLYPSSSPYTRNWDKLVGEIKEEEKNEKLEGDAALNRLFQQIYSDGSDEVKRAMNKSFMESGGTVLSTNWSDVGKRKVEINPPDDMEWKKY

SEQ ID NO: 2311 - protein, 107 aa, Homo sapiens
MAGGYGVMGDDGSIDYTVHEAWNEATNVYLIVILVSFGLFMYAKRNKRRIMRIFSVPPTEETLSEPNFYDTISKIRLRQQLEMYSISRKYDYQQPQNQADSVQLSLE

SEQ ID NO: 2312 - protein, 640 aa, Homo sapiens
MVQSELQLQPRAGGRAEAASWGDRGNDKGGLGNPDMPSVSPGPQRPPKLSSLAYDSPPDYLQTVSHPEVYRVLFDYQPEAPDELALRRGDVVKVLSKTTEDKGWWEGECQGRRGVFPDNFVLPPPPIKKLVPRKVVSRESAPIKEPKKLMPKTSLPTVKKLATATTGPSKAKTSRTPSRDSQKLTSRDSGPNGGFQSGGSYHPGRKRSKTQTPQQRSVSSQEEEHSSPVKAPSVKRTPMPDKTATPERPPAPENAPSSKKIPAPDKVPSPEKTLTLGDKASIPGNSTSGKIPAPDKVPTPEKMVTPEDKASIPENSIIPEETLTVDKPSTPERVFSVEESPALEAPPMDKVPNPKMAPLGDEAPTLEKVLTPELSEEEVSTRDDIQFHHFSSEEALQKVKYFVAKEDPSSQEEAHTPEAPPPQPPSSERCLGEMKCTLVRGDSSPRQAELKSGPASRPALEKPHPHEEATTLPEEAPSNDERTPEEEAPPNEQRPLREEVLPKEGVASKEEVTLKEELPPKEEVAPKEEVPPIERAFAQKTRPIKPPPDSQETLALPSLVPQNYTENKNEGVDVTSLRGEVESLRRALELMEVQLERKLTDIWEELKSEKEQRRRLEVQVMQGTQKSQTPRVIHTQTQTY

SEQ ID NO: 2313 - protein, 645 aa, Homo sapiens
MIKEIEDGWWLGKKNGQLGAFPSNFVELLDSGPPSLGNPDMPSVSPGPQRPPKLSSLAYDSPPDYLQTVSHPEVYRVLFDYQPEAPDELALRRGDVVKVLSKTTEDKGWWEGECQGRRGVFPDNFVLPPPPIKKLVPRKVVSRESAPIKEPKKLMPKTSLPTVKKLATATTGPSKAKTSRTPSRDSQKLTSRDSGPNGGFQSGGSYHPGRKRSKTQTPQQRSVSSQEEEHSSPVKAPSVKRTPMPDKTATPERPPAPENAPSSKKIPAPDKVPSPEKTLTLGDKASIPGNSTSGKIPAPDKVPTPEKMVTPEDKASIPENSIIPEETLTVDKPSTPERVFSVEESPALEAPPMDKVPNPKMAPLGDEAPTLEKVLTPELSEEEVSTRDDIQFHHFSSEEALQKVKYFVAKEDPSSQEEAHTPEAPPPQPPSSERCLGEMKCTLVRGDSSPRQAELKSGPASRPALEKPHPHEEATTLPEEAPSNDERTPEEEAPPNEQRPLREEVLPKEGVASKEEVTLKEELPPKEEVAPKEEVPPIERAFAQKTRPIKPPPDSQETLALPSLVPQNYTENKNEGVDVTSLRGEVESLRRALELMEVQLERKLTDIWEELKSEKEQRRRLEVQVMQGTQKSQTPRVIHTQTQTY

SEQ ID NO: 2314 - protein, 135 aa, Homo sapiens
MIKEIEDGWWLGKRNGQLGAFPSNFVELLDSGPPSLGNPDMPSVSPGPQRPPKTTEDKGWWEGECQGRRGVFPDNFVLPPPPIKKLVPRKVVSRESAPIKEPKKLMPKTSLPTVKKLATATTGPSKAKRKSTAAR

SEQ ID NO: 2315 - protein, 232 aa, Homo sapiens
MVQSELQLQPRAGGRAEAASWGDRGNDKGGLGNPDMPSVSPGPQRPPKLSSLAYDSPPDYLQTVSHPEVYRVLFDYQPEAPDELALRRGDVVKVLSKTTEDKGWWEGECQGRRGVFPDNFVLPPPPIKKLVPRKVVSRESAPIKEPKKLMPKTSLPTVKKLATATTGPSKAKTSRTPSRDSQKLTSRDSGGRAQQPGKGPLCEENPHAGQDCHPREAPSSRERPQLQEDPGS

SEQ ID NO: 2316 - protein, 756 aa, Homo sapiens
MEVLVLAGYRAQKEDELSLAPGDVVRQVRWVPARGWLRGEFGGRYGLFPERLVQEIPETLRGSGEARRPRCARRRGHPAKHPRPQRWCKVNFSYSPEQADELKLQAGEIVEMIKEIEDGWWLGKKNGQLGAFPSNFVELLDSGPPSLGNPDMPSVSPGPQRPPKLSSLAYDSPPDYLQTVSHPEVYRVLFDYQPEAPDELALRRGDVVKVLSKTTEDKGWWEGECQGRRGVFPDNFVLPPPPIKKLVPRKVVSRESAPIKEPKKLMPKTSLPTVKKLATATTGPSKAKTSRTPSRDSQKLTSRDSGPNGGFQSGGSYHPGRKRSKTQTPQQRSVSSQEEEHSSPVKAPSVKRTPMPDKTATPERPPAPENAPSSKKIPAPDKVPSPEKTLTLGDKASIPGNSTSGKIPAPDKVPTPEKMVTPEDKASIPENSIIPEETLTVDKPSTPERVFSVEESPALEAPPMDKVPNPKMAPLGDEAPTLEKVLTPELSEEEVSTRDDIQFHHFSSEEALQKVKYFVAKEDPSSQEEAHTPEAPPPQPPSSERCLGEMKCTLVRGDSSPRQAELKSGPASRPALEKPHPHEEATTLPEEAPSNDERTPEEEAPPNEQRPLREEVLPKEGVASKEEVTLKEELPPKEEVAPKEEVPPIERAFAQKTRPIKPPPDSQETLALPSLVPQNYTENKNEGVDVTSLRGEVESLRRALELMEVQLERKLTDIWEELKSEKEQRRRLEVQVMQGTQKSQTPRVIHTQTQTY

SEQ ID NO: 2317 - protein, 334 aa, Homo sapiens
MKPPPRRRAAPARYLGEVTGPATWSAREKRQLVRLLQARQGQPEPDATELARELRGRSEAEIRVFLQQLKGRVAREAIQKVHPGGLQGPRRREAQPPAPIEVWTDLAEKITGPLEEALAVAFSQVLTIAATEPVTLLHSKPPKPTQARGKPLLLSAPGGQEDPAPEIPSSAPAAPSSAPRTPDPAPEKPSESSAGPSTEEDFAVDFEKIYKYLSSVSRSGRSPELSAAESAVVLDLLMSLPEELPLLPCTALVEHMTETYLRLTAPQPIPAGGSLGPAAEGDGAGSKAPEETPPATEKAEHSELKSPWQAAGICPLNPFLVPLELLGRAATPAR

SEQ ID NO: 2318 - protein, 387 aa, Homo sapiens
MDMNSFSPMMPTSPLSMINQIKFEDEPDLKDLFITVDEPESHVTTIETFITYRIITKTSRGEFDSSEFEVRRRYQDFLWLKGKLEEAHPTLIIPPLPEKFIVKGMVERFNDDFIETRRKALHKFLNRIADHPTLTFNEDFKIFLTAQAWELSSHKKQGPGLLSRMGQTVRAVASSMRGVKNRPEEFMEMNNFIELFSQKINLIDKISQRIYKEEREYFDEMKEYGPIHILWSASEEDLVDTLKDVASCIDRCCKATEKRMSGLSEALLPVVHEYVLYSEMLMGVMKRRDQIQAELDSKVEVLTYKKADTDLLPEEIGKLEDKVECANNALKADWERWKQNMQNDIKLAFTDMAEENIHYYEQCLATWESFLTSQTNLHLEEASEDKP

SEQ ID NO: 2319 - protein, 336 aa, Homo sapiens
MDMNSFSPMMPTSPLSMINQIKFEDEPDLKDLFITVDEPESHVTTIETFITYRIITKTSRGEFDSSEFEVRRRYQDFLWLKGKLEEAHPTLIIPPLPEKFIVKGMVERFNDDFIETRRKALHKFLNRIADHPTLTFNEDFKIFLTAQAWELSSHKKQGPGLLSRMGQTVRAVASSMRGVKNRPEEFMEMNNFIELFSQKINLIDKISQRIYKEEREYFDEMKEYGPIHILWSASEEDLVDTLKDVASCIDRCCKATEKRMSGLSEALLPVVHEYVLYSEMLMGVMKRRDQIQAELDSKVEVLTYKKADTDLCLATWESFLTSQTNLHLEEASEDKP

SEQ ID NO: 2320 - protein, 451 aa, Homo sapiens
MEGERRASQAPSSGLPAGGANGESPGGGAPFPGSSGSSALLQAEVLDLDEDEDDLEVFSKDASLMDMNSFSPMMPTSPLSMINQIKFEDEPDLKDLFITVDEPESHVTTIETFITYRIITKTSRGEFDSSEFEVRRRYQDFLWLKGKLEEAHPTLIIPPLPEKFIVKGMVERFNDDFIETRRKALHKFLNRIADHPTLTFNEDFKIFLTAQAWELSSHKKQGPGLLSRMGQTVRAVASSMRGVKNRPEEFMEMNNFIELFSQKINLIDKISQRIYKEEREYFDEMKEYGPIHILWSASEEDLVDTLKDVASCIDRCCKATEKRMSGLSEALLPVVHEYVLYSEMLMGVMKRRDQIQAELDSKVEVLTYKKADTDLLPEEIGKLEDKVECANNALKADWERWKQNMQNDIKLAFTDMAEENIHYYEQCLATWESFLTSQTNLHLEEASEDKP

SEQ ID NO: 2321 - protein, 719 aa, Homo sapiens
MFVGVARHSGSQDEVSRGVEPLEAARAQPAKDRRAKGTPKSSKPGKKHRYLRLLPEALIRFGGFRKRKKAKSSVSKKPGEVDDSLEQPCGLGCLVSTCCECCNNIRCFMIFYCILLICQGVVFGLIDVSIGDFQKEYQLKTIEKLALEKSYDISSGLVAIFIAFYGDRKKVIWFVASSFLIGLGSLLCAFPSINEENKQSKVGIEDICEEIKVVSGCQSSGISFQSKYLSFFILGQTVQGIAGMPLYILGITFIDENVATHSAGIYLGIAECTSMIGYALGYVLGAPLVKVPENTTSATNTTVNNGSPEWLWTWWINFLFAAVVAWCTLIPLSCFPNNMPGSTRIKARKRKQLHFFDSRLKDLKLGTNIKDLCAALWILMKNPVLICLALSKATEYLVIIGASEFLPIYLENQFILTPTVATTLAGLVLIPGGALGQLLGGVIVSTLEMSCKALMRFIMVTSVISLILLVFIIFVRCNPVQFAGINEDYDGTGKLGNLTAPCNEKCRCSSSIYSSICGRDDIEYFSPCFAGCTYSKAQNQKKMYYNCSCIKEGLITADAEGDFIDARPGKCDAKCYKLPLFIAFIFSTLIFSGFSGVPIVLAMTRVVPDKLRSLALGVSYVILRIFGTIPGPSIFKMSGETSCILRDVNKCGHTGRCWIYNKTKMAFLLVGICFLCKLCTIIFTTIAFFIYKRRLNENTDFPDVTVKNPKVKKKEETDL

SEQ ID NO: 2322 - protein, 657 aa, Homo sapiens
MFVGVARHSGSQDEVSRGVEPLEAARAQPAKDRRAKGTPKSSKPGKKHRYLRLLPEALIRFGGFRKRKKAKSSVSKKPGEVDDSLEQPCGLGCLVSTCCECCNNIRCFMIFYCILLICQGVVFGLIDVSIGDFQKEYQLKTIEKLALEKSYDISSGLVAIFIAFYGDRKKVIWFVASSFLIGLGSLLCAFPSINEENKQSKVGIEGIAECTSMIGYALGYVLGAPLVKVPENTTSATNTTVNNGSPEWLWTWWINFLFAAVVAWCTLIPLSCFPNNMPGSTRIKARKRKQLHFFDSRLKDLKLGTNIKDLCAALWILMKNPVLICLALSKATEYLVIIGASEFLPIYLENQFILTPTVATTLAGLVLIPGGALGQLLGGVIVSTLEMSCKALMRFIMVTSVISLILLVFIIFVRCNPVQFAGINEDYDGTGKLGNLTAPCNEKCRCSSSIYSSICGRDDIEYFSPCFAGCTYSKAQNQKKMYYNCSCIKEGLITADAEGDFIDARPGKCDAKCYKLPLFIAFIFSTLIFSGFSGVPIVLAMTRVVPDKLRSLALGVSYVILRIFGTIPGPSIFKMSGETSCILRDVNKCGHTGRCWIYNKTKMAFLLVGICFLCKLCTIIFTTIAFFIYKRRLNENTDFPDVTVKNPKVKKKEETDL

SEQ ID NO: 2323 - protein, 466 aa, Homo sapiens
MFVGVARHSGSQDEVSRGVEPLEAARAQPAKDRRAKGTPKSSKPGKKHRYLRLLPEALIRFGGFRKRKKAKSSVSKKPGEVDDSLEQPCGLGCLVSTCCECCNNIRCFMIFYCILLICQGVVFGLIDVSIGDFQKEYQLKTIEKLALEKSYDISSGLVAIFIAFYGDRKKVIWFVASSFLIGLGSLLCAFPSINEENKQSKVGIEGIAECTSMIGYALGYVLGAPLVKVPENTTSATNTGKLGNLTAPCNEKCRCSSSIYSSICGRDDIEYFSPCFAGCTYSKAQNQKKMYYNCSCIKEGLITADAEGDFIDARPGKCDAKCYKLPLFIAFIFSTLIFSGFSGVPIVLAMTRVVPDKLRSLALGVSYVILRIFGTIPGPSIFKMSGETSCILRDVNKCGHTGRCWIYNKTKMAFLLVGICFLCKLCTIIFTTIAFFIYKRRLNENTDFPDVTVKNPKVKKKEETDL

SEQ ID NO: 2324 - protein, 78 aa, Homo sapiens
MQPQESHVHYSRWEDGSRDGVSLGAVSSTEEASRCRRISQRLCTGKLGIAMKVLGGVALFWIIFILGYLTGYYVHKCK

SEQ ID NO: 2325 - protein, 128 aa, Homo sapiens
MDAVAVYHGKISRETGEKLLLATGLDGSYLLRDSESVPGVYCLCVLYHGYIYTYRVSQTETGSWSAETAPGVHKRYFRKIKNLISAFQKPDQGIVIPLQYPVEKKSSARSTQGTTGIREDPDVCLKAP

SEQ ID NO: 2326 - protein, 75 aa, Homo sapiens
MDAVAVYHGKISRETGEKLLLATGLDGSYLLRDSESVPGVYCLCVLYHGYIYTYRVSQTETGSWSAEHFRSQIKA

SEQ ID NO: 2327 - protein, 58 aa, Homo sapiens
MDAVAVYHGKISRETGEKLLLATGLDGSYLLRDSESVPGVYCLCVLQHLGYIKDISGK

SEQ ID NO: 2328 - protein, 125 aa, Homo sapiens
MDAVAVYHGKISRETGEKLLLATGLDGSYLLRDSESVPGVYCLCVLYHGYIYTYRVSQTETGSWSAETAPGVHKRYFRKIKNLISAFQKPDQGIVIPLQYPVEKKSSARSTQGIREDPDVCLKAP

SEQ ID NO: 2329 - protein, 76 aa, Homo sapiens
MDAVAVYHGKISRETGEKLLLATGLDGSYLLRDSESVPGITVTFIHTECPRQKQVLGVLSISEARSRHCNTSAVSS

SEQ ID NO: 2330 - protein, 62 aa, Homo sapiens
MDAVAVYHGKISRETGEKLLLATGLDGSYLLRDSESVPGVYCLCVLISEARSRHCNTSAVSS

SEQ ID NO: 2331 - protein, 848 aa, Homo sapiens
MDEGTGLQPGAGEQLEAPATAEAVQERCEPETLRSKSLPVLSSASCRPSLSPTSGDANPAFGCVDSSGHQELKQGPNPLAPSPSAPSTSAGLGDCNHRVDLSKTFSVSSALAMLQERRCLYVVLTDSRCFLVCMCFLTFIQALMVSGYLSSVITTIERRYSLKSSESGLLVSCFDIGNLVVVVFVSYFGGRGRRPLWLAVGGLLIAFGAALFALPHFISPPYQIQELNASAPNDGLCQGGNSTATLEPPACPKDSGGNNHWVYVALFICAQILIGMGSTPIYTLGPTYLDDNVKKENSSLYLAIMYVMGALGPAVGYLLGGLLIGFYVDPRNPVHLDQNDPRFIGNWWSGFLLCAIAMFLVIFPMFTFPKKLPPRHKKKKKKKFSVDAVSDDDVLKEKSNNSEQADKKVSSMGFGKDVRDLPRAAVRILSNMTFLFVSLSYTAESAIVTAFITFIPKFIESQFGIPASNASIYTGVIIVPSAGVGIVLGGYIIKKLKLGARESAKLAMICSGVSLLCFSTLFIVGCESINLGGINIPYTTGPSLTMPHRNLTGSCNVNCGCKIHEYEPVCGSDGITYFNPCLAGCVNSGNLSTGIRNYTECTCVQSRQVITPPTVGQRSQLRVVIVKTYLNENGYAVSGKCKRTCNTLIPFLVFLFIVTFITACAQPSAIIVTLRSVEDEERPFALGMQFVLLRTLAYIPTPIYFGAVIDTTCMLWQQECGVQGSCWEYNVTSFRFVYFGLAAGLKFVGFIFIFLAWYSIKYKEDGLQRRRQREFPLSTVSERVGHPDNARTRSCPAFSTQGEFHEETGLQKGIQCAAQTYPGPFPEAISSSADPGLEESPAALEPPS

SEQ ID NO: 2332 - protein, 793 aa, Homo sapiens
MDEGTGLQPGAGEQLEAPATAEAVQERCEPETLRSKSLPVLSSASCRPSLSPTSGDANPAFGCVDSSGHQELKQGPNPLAPSPSAPSTSAGLGDCNHRVDLSKTFSVSSALAMLQERRCLYVVLTDSRCFLVCMCFLTFIQALMVSGYLSSVITTIERRYSLKSSESGLLVSCFDIGNLVVVVFVSYFGGRGRRPLWLAVGGLLIAFGAALFALPHFISPPYQIQELNASAPNDGLCQGGNSTATLEPPACPKDSGGNNHWVYVALFICAQILIGMGSTPIYTLGPTYLDDNVKKENSSLYLAIMYVMGALGPAVGYLLGGLLIGFYVDPRNPVHLDQNDPRFIGNWWSGFLLCAIAMFLVIFPMFTFPKKLPPRHKKKKKKKFSVDAVSDDDVLKEKSNNSEQADKKVSSMGFGKDVRGVIIVPSAGVGIVLGGYIIKKLKLGARESAKLAMICSGVSLLCFSTLFIVGCESINLGGINIPYTTGPSLTMPHRNLTGSCNVNCGCKIHEYEPVCGSDGITYFNPCLAGCVNSGNLSTGIRNYTECTCVQSRQVITPPTVGQRSQLRVVIVKTYLNENGYAVSGKCKRTCNTLIPFLVFLFIVTFITACAQPSAIIVTLRSVEDEERPFALGMQFVLLRTLAYIPTPIYFGAVIDTTCMLWQQECGVQGSCWEYNVTSFRFVYFGLAAGLKFVGFIFIFLAWYSIKYKEDGLQRRRQREFPLSTVSERVGHPDNARTRSCPAFSTQGEFHEETGLQKGIQCAAQTYPGPFPEAISSSADPGLEESPAALEPPS

SEQ ID NO: 2333 - protein, 687 aa, Homo sapiens
MDEGTGLQPGAGEQLEAPATAEAVQERCEPETLRSKSLPVLSSASCRPSLSPTSGDANPAFGCVDSSGHQELKQGPNPLAPSPSAPSTSAGLGDCNHRVDLSKTFSVSSALAMLQERRCLYVVLTDSRCFLVCMCFLTFIQALMVSGYLSSVITTIERRYSLKSSESGLLVSCFDIGNLVVVVFVSYFGGRGRRPLWLAVGGLLIAFGAALFALPHFISPPYQIQELNASAPNDGLCQGGNSTATLEPPACPKDSGGNNHWVYVALFICAQILIGMGSTPIYTLGPTYLDDNVKKENSSLYLAIMYVMGALGPAVGYLLGGLLIGFYVDPRNPVHLDQNDPRFIGNWWSGFLLCAIAMFLVIFPMFTFPKKLPPRHKKKKKKKFSVDAVSDDDVLKEKSNNSEQADKKVSSMGFGKDVRDLPRAAVRILSNMTFLFVSLSYTAESAIVTAFITFIPKFIESQFGIPASNASIYTGVIIVPSAGVGIVLGGYIIKKLKLGARESAKLAMICSGVSLLCFSTLFIVGCESINLGGINIPYTTGPSLTMPHRNLTGSCNVNCGCKIHEYEPVCGSDGITYFNPCLAGCVNSGNLSTGIRNYTECTCVQSRQVITPPTVGQRSQLRVVIVKTYLNENGYAVSGKCKRTCNTLIPFLVFLFIVTFITACAQPSAIIVTLSIHSYSNLLWSSH

SEQ ID NO: 2334 - protein, 99 aa, Homo sapiens
MEPQKLLIIGFLLCSLTCLLLETVASSPLPLSALGIQEKTGSKPRSGGNHRSWLNNFRDYLWQLIKSALPPAAIVAFLLTSALMGILCCFTILVVDPVH

SEQ ID NO: 2335 - protein, 388 aa, Homo sapiens [sequence omitted]

SEQ ID NO: 2336 - protein, 440 aa, Homo sapiens
MSMLAERRRKQKWAVDPQNTAWSNDDSKFGQRMLEKMGWSKGKGLGAQEQGATDHIKVQVKNNHLGLGATINNEDNWIAHQDDFNQLLAELNTCHGQETTDSSDKKEKKSFSLEEKSKISKNRVHYMKFTKGKSWKALTLSQKRPYVDEAERLRLQHMQDYPNYKYRPRRKKQAKRLCKRVDPGFLLSSLSRDQNALPEKRSGSRGALGEKEDRGEYSPGTALPSLRGCYHEGPAGGGGGGTPSSVDTYPYGLPTPPEMSPLDVLEPEQTFFSSPCQEEHGHPRRIPHLPGHPYSPEYAPSPLHCSHPLGSLALGQSPGVSMMSPVPGCPPSPAYYSPATYHPLHSNLQAHLGQLSPPPEHPGFDALDQLSQVELLGDMDRNEFDQYLNTPGHPDSATGAMALSGHVPVSQVTPTGPTETSLISVLADATATYYNSYSVS

SEQ ID NO: 2337 - protein, 121 aa, Homo sapiens
MEQARDHLHLRWTTEQHMPEVEVQVKYRTAALSNQECQLYLRHSQQQQVLVVDFQAKLRQVFITETPRCGKKPYWNNEEAESKQNPGSIYCLLLLIRGGMSDSLIKREISNFEIVSKNKKN

SEQ ID NO: 2338 - protein, 175 aa, Homo sapiens
MYASSYPPPPQLSPRSHLCPPPPHPTPPQLNNLLLLEGRKSSLPSVAPTGSASAAEDSDLLTQPWYSGNCDRYAVESALLHLQKDGAYTVRPSSGPHGSQPFTLAVLLRGRVFNIPIRRLDGGRHYALGREGRNREELFSSVAAMVQHFMWHPLPLVDRHSGSRELTCLLFPTKP

SEQ ID NO: 2339 - protein, 143 aa, Homo sapiens
MPSGPLPRTSVVPRPTTAPQETRNGTADAASKEGRKSSLPSVAPTGSASAAEDGAYTVRPSSGPHGSQPFTLAVLLRGRVFNIPIRRLDGGRHYALGREGRNREELFSSVAAMVQHFMWHPLPLVDRHSGSRELTCLLFPTKP

SEQ ID NO: 2340 - protein, 270 aa, Homo sapiens
MGFWCRMSENQEQEEVITVRVQDPRVQNEGSWNSYVDYKIFLHTNSKAFTAKTSCVRRRYREFVWLRKQLQRNAGLVPVPELPGKSTFFGTSDEFIEKRRQGLQHFLEKVLQSVVLLSDSQLHLFLQSQLSVPEIEACVQGRSTMTVSDAILRYAMSNCGWAQEERQSSSHLAKGDQPKSCCFLPRSGRRSSPSPPPSEEKDHLEVWAPVVDSEVPSLESPTLPPLSSPLCCDFGRPKEGTSTLQSVRRAVGGDHAVPLDPGQLETVLEK

SEQ ID NO: 2341 - protein, 262 aa, Homo sapiens
MVCREQEVITVRVQDPRVQNEGSWNSYVDYKIFLHTNSKAFTAKTSCVRRRYREFVWLRKQLQRNAGLVPVPELPGKSTFFGTSDEFIEKRRQGLQHFLEKVLQSVVLLSDSQLHLFLQSQLSVPEIEACVQGRSTMTVSDAILRYAMSNCGWAQEERQSSSHLAKGDQPKSCCFLPRSGRRSSPSPPPSEEKDHLEVWAPVVDSEVPSLESPTLPPLSSPLCCDFGRPKEGTSTLQSVRRAVGGDHAVPLDPGQLETVLEK

SEQ ID NO: 2342 - protein, 400 aa, Homo sapiens
MAAGGLSRSERKAAERVRRLREEQQRERLRQVSRILRKAAAERSAEEGRLLAESADLVTELQGRSRRREGLKRRQEEVCDDPEELRGKVRELASAVRNAKYLVVYTGAGISTAASIPDYRGPNGVWTLLQKGRSVSAADLSEAEPTLTHMSITRLHEQKLVQHVVSQNCDGLHLRSGLPRTAISELHGNMYIEVCTSCVPNREYVRVFDVTERTALHRHQTGRTCHKCGTQLRDTIVHFGERGTLGQPLNWEAATEAASRADTILCLGSSLKVLKKYPRLWCMTKPPSRRPKLYIVNLQWTPKDDWAALKLHGKCDDVMRLLMAELGLEIPAYSRWQDPIFSLATPLRAGEEGSHSRKSLCRSREEAPPGDRGAPLSSAPILGGWFGRGCTKRTKRKKVT

SEQ ID NO: 2343 - protein, 183 aa, Homo sapiens
MAAGGLSRSERKAAERVRRLREEQQRERLRQVSRILRKAAAERSAEEGRLLAESADLVTELQGRSRRREGLKRRQEEVCDDPEELRGKVRELASAVRNAKYLVVYTGAGISTAASIPDYRGPNGVWTLLQKGRSVSAADLSEAEPTLTHMSITRLHEQKLVRALGGWYTCQGPGRAPWCPVGN

SEQ ID NO: 2344 - protein, 320 aa, Homo sapiens
MPGPRRRSPSACPQVSRILRKAAAERSAEEGRLLAESADLVTELQGRSRRREGLKRRQEEVCDDPEELRGKVRELASAVRNAKYLVVYTGAGISTAASIPDYRGPNGVWTLLQKGRSVSAADLSEAEPTLTHMSITRLHEQKLVQHVVSQNCDGLHLRSGLPRTAISELHGNMYIEVCTSCVPNREYVRVFDVTERTALHRHQTGRTCHKCGTQLRDTIVHFGERGTLGQPLNWEAATEAASRADTILCLGSSLKVLKKYPRLWCMTKPPSRRPKLYIVNLQWTPKDDWAALKLHGKCDDVMRLLMAELGLEIPAYSRVL

SEQ ID NO: 2345 - protein, 470 aa, Homo sapiens
MHFSIPETESRSGDSGGSAYVAYNIHVNGVLHCRVRYSQLLGLHEQLRKEYGANVLPAFPPKKLFSLTPAEVEQRREQLEKYMQAVRQDPLLGSSETFNSFLRRAQQETQQVPTEEVSLEVLLSNGQKVLVNVLTSDQTEDVLEAVAAKLDLPDDLIGYFSLFLVREKEDGAFSFVRKLQEFELPYVSVTSLRSQEYKIVLRKSYWDSAYDDDVMENRVGLNLLYAQTVSDIERGWILVTKEQHRQLKSLQEKVSKKEFLRLAQTLRHYGYLRFDACVADFPEKDCPVVVSAGNSELSLQLRLPGQQLREGSFRVTRMRCWRVTSSVPLPSGSTSSPGRGRGEVRLELAFEYLMSKDRLQWVTITSPQAIMMSICLQSMVDELMVKKSGGSIRKMLRRRVGGTLRRSDSQQAVKSPPLLESPDATRESMVKLSSKLSAVSLRGIGSPSTDASASDVHGNFAFEGIGDEDL

SEQ ID NO: 2346 - protein, 445 aa, Homo sapiens
MHFSIPETESRSGDSGGSAYVLRKEYGANVLPAFPPKKLFSLTPAEVEQRREQLEKYMQAVRQDPLLGSSETFNSFLRRAQQETQQVPTEEVSLEVLLSNGQKVLVNVLTSDQTEDVLEAVAAKLDLPDDLIGYFSLFLVREKEDGAFSFVRKLQEFELPYVSVTSLRSQEYKIVLRKSYWDSAYDDDVMENRVGLNLLYAQTVSDIERGWILVTKEQHRQLKSLQEKVSKKEFLRLAQTLRHYGYLRFDACVADFPEKDCPVVVSAGNSELSLQLRLPGQQLREGSFRVTRMRCWRVTSSVPLPSGSTSSPGRGRGEVRLELAFEYLMSKDRLQWVTITSPQAIMMSICLQSMVDELMVKKSGGSIRKMLRRRVGGTLRRSDSQQAVKSPPLLESPDATRESMVKLSSKLSAVSLRGIGSPSTDASASDVHGNFAFEGIGDEDL

SEQ ID NO: 2347 - protein, 292 aa, Homo sapiens
MPRSFLVKTHSSHRVPNYRRLETQREINGACSACGGLVVPLLPRDKEAPSVPGDLPQPWDRSSAVACISLPLLPRIEEALGASGLDALEVSEVDPRASRAAIVPLKDSLNHLNLPPLLVLPTRWSPTLGPDRHGAPEKLLGAERMPRAPGGFECFHCHKPYHTLAGLARHRQLHCHLQVGRVFTCKYCDKEYTSLGALKMHIRTHTLPCTCKICGKAFSRPWLLQGHVRTHTGEKPYACSHCSRAFADRSNLRAHLQTHSDAKKYRCRRCTKTFSRMSLLARHEESGCCPGP

SEQ ID NO: 2348 - protein, 93 aa, Homo sapiens
MSGLRVYSTSVTGSREIKSQQSEVTRILDGKRIQYQLVDISQDNALRDEMRALAGNPKATPPQIVNGDQYCGDYELFVEAVEQNTLQEFLKLA

SEQ ID NO: 2349 - protein, 298 aa, Homo sapiens
MDNAGKEREAVQLMAEAEKRVKASHSFLRGLFGGNTRIEEACEMYTRAANMFKMAKNWSAAGNAFCQAAKLHMQLQSKHDSATSFVDAGNAYKKADPQEAINCLNAAIDIYTDMGRFTIAAKHHITIAEIYETELVDIEKAIAHYEQSADYYKGEESNSSANKCLLKVAAYAAQLEQYQKAIEIYEQVGANTMDNPLLKYSAKDYFFKAALCHFIVDELNAKLALEKYEEMFPAFTDSRECKLLKKLLEAHEEQNSEAYTEAVKEFDSISRLDQWLTTMLLRIKKSIQGDGEGDGDLK

SEQ ID NO: 2350 - protein, 259 aa, Homo sapiens
MDNAGKEREAVQLMAEAEKRVKASHSFLRGLFGGNTRIEEACEMYTRAANMFKMAKNWSEAINCLNAAIDIYTDMGRFTIAAKHHITIAEIYETELVDIEKAIAHYEQSADYYKGEESNSSANKCLLKVAAYAAQLEQYQKAIEIYEQVGANTMDNPLLKYSAKDYFFKAALCHFIVDELNAKLALEKYEEMFPAFTDSRECKLLKKLLEAHEEQNSEAYTEAVKEFDSISRLDQWLTTMLLRIKKSIQGDGEGDGDLK

SEQ ID NO: 2351 - protein, 204 aa, Homo sapiens
MTLLPALWMLEMLTKRQIPKGRFTIAAKHHITIAEIYETELVDIEKAIAHYEQSADYYKGEESNSSANKCLLKVAAYAAQLEQYQKAIEIYEQVGANTMDNPLLKYSAKDYFFKAALCHFIVDELNAKLALEKYEEMFPAFTDSRECKLLKKLLEAHEEQNSEAYTEAVKEFDSISRLDQWLTTMLLRIKKSIQGDGEGDGDLK

SEQ ID NO: 2352 - protein, 352 aa, Homo sapiens
MLRLLASGCARGPGPGVGARPAAGLFHPGRRQSRQASDAPRNQPPSPEFVARPVGVCSMMRLPVQTSPEGLDAAFIGVPLDTGTSNRPGARFGPRRIREESVMLGTVNPSTGALPFQSLMVADLGDVNVNLYNLQDSCRRIQEAYEKIVAAGCIPLTLGGDHTITYPILQAMAKKHGPVGLLHVDAHTDTTDKALGEKLYHGAPFRRCVDEGLLDCKRVVQIGIRGSSTTLDPYRYNRSQGFRVVLAEDCWMKSLVPLMGEVRQQMGGKPIYISFDIDALDPAYAPGTGTPEIAGLTPSQALEIIRGCQGLNVMGCDLVEVSPPYDLSGNTALLAANLLFEMLCALPKVTTV

SEQ ID NO: 2353 - protein, 412 aa, Homo sapiens
MDPIRSFCGKLRSLASTLDCETARLQRALDGEESDFEDYPMRILYDLHSEVQTLKDDVNILLDKARLENQEGIDFIKATKVLMEKNSMDIMKIREYFQKYGYSPRVKKNSVHEQEAINSDPELSNCENFQKTDVKDDLSDPPVASSCISEKSPRSPQLSDFGLERYIVSQVLPNPPQAVNNYKEEPVIVTPPTKQSLVKVLKTPKCALKMDDFECVTPKLEHFGISEYTMCLNEDYTMGLKNARNNKSEEAIDTESRLNDNVFATPSPIIQQLEKSDAEYTNSPLVPTFCTPGLKIPSTKNSIALVSTNYPLSKTNSSSNDLEVEDRTSLVLNSDTCFENLTDPSSPTISSYENLLRTPTPPEVTKIPEDILQLLSKYNSNLATPIAIKAVPPSKRFLKHGQNIRDVSNKEN

SEQ ID NO: 2354 - protein, 35 aa, Homo sapiens
MDPIRSFCGKLRSLASTLDCETARLQRALDGEESG

SEQ ID NO: 2355 - protein, 388 aa, Homo sapiens
MDPIRSFCGKLRSLASTLDCETARLQRALDGEESDFEDYPMRILYDLHSEVQTLKDDVNILLDKARLENQEGIDFIKATKVLMEKNSMDIMKIREYFQKYGYSPRVKKNSVHEQEAINSDPELSNCENFQKTDVKDDLSDPPVASSCISEKSPRSPQLSDFGLERYIVSQVLPNPPQAVNNYKEEPVIVTPPTKQSLVKVLKTPKCALKMDDFECVTPKLEHFGISEYTMCLNEDYTMGLKNARNNKSEEAIDTESRLNDNVFATPSPIIQQLEKSDAEYTNSPLVPTFCTPGLKIPSTKNSIALVSTNYPLSKTNSSSNDLEVEDRTSLVLNSDTCFENLTDPSSPTISSYENLLRTPTPPEVTKIPEDILQKFQWIYPTQKLNKMR

SEQ ID NO: 2356 - protein, 234 aa, Homo sapiens
MHIPKSLQELANSEAVQFLRRPKTITRVFEGVFSLIVFSSLLTDGYQNKMESPQLHCILNSNSVACSFAVGAGFLAFLSCLAFLVLDTQETRIAGTRFKTAFQLLDFILAVLWAVVWFMGFCFLANQWQHSPPKEFLLGSSSAQAAIAFTFFSILVWIFQAYLAFQDLRNDAPVPYKRFLDEGGMVLTTLPLPSANSPVNMPTTGPNSLSYASSALSPCLTAPKSPRLAMMPDN

SEQ ID NO: 2357 - protein, 319 aa, Homo sapiens
MDPQNQHGSGSSLVVIQQPSLDSRQRLDYEREIQPTAILSLDQIKAIRGSNEYTEGPSVVKRPAPRTAPRQEKHERTHEIIPINVNNNYEHRHTSHLGHAVLPSNARGPILSRSTSTGSAASSGSNSSASSEQGLLGRSPPTRPVPGHRSERAIRTQPKQLIVDDLKGSLKEDLTQHKFICEQCGKCKCGECTAPRTLPSCLACNRQCLCSAESMVEYGTCMCLVKGIFYHCSNDDEGDSYSDNPCSCSQSHCCSRYLCMGAMSLFLPCLLCYPPAKGCLKLCRRCYDWIHRPGCRCKNSNTVYCKLESCPSRGQGKPS

SEQ ID NO: 2358 - protein, 248 aa, Homo sapiens
MTCVEQDKLGQAFEDAFEVLRQHSTGDLQYSPDYRNYLALINHRPHVKGNSSCYGVLPTEEPVYNWRTVINSAADFYFEGNIHQSLQNITENQLVQPTLLQQKGGKGRKKLRLFEYLHESLYNPEMASCIQWVDKTKGIFQFVSKNKEKLAELWGKRKGNRKTMTYQKMARALRNYGRSGEITKIRRKLTYQFSEAILQRLSPSYFLGKEIFYSQCVQPDQEYLSLNNWNANYNYTYANYHELNHHDC

SEQ ID NO: 2359 - protein, 448 aa, Homo sapiens
  MOD_RES (60)..(60): Selenocysteine
MAEASATGACGEAMAAAEGSSGPAGLTLGRSFSNYRPFEPQALGLSPSWRLTGFSGMKGXGCKVPQEALLKLLAGLTRPDVRPPLGRGLVGGQEEASQEAGLPAGAGPSPTFPALGIGMDSCVIPLRHGGLSLVQTTDFFYPLVEDPYMMGRIACANVLSDLYAMGITECDNMLMLLSVSQSMSEEEREKVTPLMVKGFRDAAEEGGTAVTGGQTVVNPWIIIGGVATVVCQPNEFIMPDSAVVGDVLVLTKPLGTQVAVNAHQWLDNPERWNKVKMVVSREEVELAYQEAMFNMATLNRTAAGLMHTFNAHAATDITGFGILGHSQNLAKQQRNEVSFVIHNLPIIAKMAAVSKASGRFGLLQGTSAETSGGLLICLPREQAARFCSEIKSSKYGEGHQAWIVGIVEKGNRTARIIDKPRVIEVLPRGATAAVLAPDSSNASSEPSS

SEQ ID NO: 2360 - protein, 72 aa, Homo sapiens
MSYQQQQCKQPCQPPPVCPAPKCPEPCPPPKCPEPCPPSKCPQSCPPQQCQQKCPPVTPSPPCQPKCPPKSK

SEQ ID NO: 2361 - protein, 1100 aa, Homo sapiens
MSYYQRPFSPSAYSLPASLNSSIVMQHGTSLDSTDTYPQHAQSLDGTTSSSIPLYRSSEEEKRVTVIKAPHYPGIGPVDESGIPTAIRTTVDRPKDWYKTMFKQIHMVHKPDDDTDMYNTPYTYNAGLYNPPYSAQSHPAAKTQTYRPLSKSHSDNSPNAFKDASSPVPPPHVPPPVPPLRPRDRSSTEKHDWDPPDRKVDTRKFRSEPRSIFEYEPGKSSILQHERPASLYQSSIDRSLERPMSSASMASDFRKRRKSEPAVGPPRGLGDQSASRTSPGRVDLPGSSTTLTKSFTSSSPSSPSRAKGGDDSKICPSLCSYSGLNGNPSSELDYCSTYRQHLDVPRDSPRAISFKNGWQMARQNAEIWSSTEETVSPKIKSRSCDDLLNDDCDSFPDPKVKSESMGSLLCEEDSKESCPMAWGSPYVPEVRSNGRSRIRHRSARNAPGFLKMYKKMHRINRKDLMNSEVICSVKSRILQYESEQQHKDLLRAWSQCSTEEVPRDMVPTRISEFEKLIQKSKSMPNLGDDMLSPVTLEPPQNGLCPKRRFSIEYLLEEENQSGPPARGRRGCQSNALVPIHIEVTSDEQPRAHVEFSDSDQDGVVSDHSDYIHLEGSSFCSESDFDHFSFTSSESFYGSSHHHHHHHHHHHRHLISSCKGRCPASYTRFTTMLKHERARHENTEEPRRQEMDPGLSKLAFLVSPVPFRRKKNSAPKKQTEKAKCKASVFEALDSALKDICDQIKAEKKRGSLPDNSILHRLISELLPDVPERNSSLRALRRSPLHQPLHPLPPDGAIHCPPYQNDCGRMPRSASFQDVDTANSSCHHQDRGGALQDRESPRSYSSTLTDMGRSAPRERRGTPEKEKLPAKAVYDFKAQTSKELSFKKGDTVYILRKIDQNWYEGEHHGRVGIFPISYVEKLTPPEKAQPARPPPPAQPGEIGEAIAKYNFNADTNVELSLRKGDRVILLKRVDQNWYEGKIPGTNRQGIFPVSYVEVVKKNTKGAEDYPDPPIPHSYSSDRIHSLSSNKPQRPVFTHENIQGGGEPFQALYNYTPRNEDELELRESDVIDVMEKCDDGWFVGTSRRTKFFGTFPGNYVKRL

SEQ ID NO: 2362 - protein, 666 aa, Homo sapiens
MNTGRDSQSPDSAKGFRSVRPNLQDKRSPTQSQITVNGNSGGAVSPMSYYQRPFSPSAYSLPASLNSSIVMQHGTSLDSTDTYPQHAQSLDGTTSSSIPLYRSSEEEKRVTVIKAPHYPGIGPVDESGIPTAIRTTVDRPKDWYKTMFKQIHMVHKPDDDTDMYNTPYTYNAGLYNPPYSAQSHPAAKTQTYRPLSKSHSDNSPNAFKDASSPVPPPHVPPPVPPLRPRDRSSTEKHDWDPPDRKVDTRKFRSEPRSIFEYEPGKSSILQHERPTDRINPDDIDLENEPWYKFFSELEFGRPPPKKPLDYVQDHSSGVFNEASLYQSSIDRSLERPMSSASMASDFRKRRKSEPAVGPPRGLGDQSASRTSPGRVDLPGSSTTLTKSFTSSSPSSPSRAKDRESPRSYSSTLTDMGRSAPRERRGTPEKEKLPAKAVYDFKAQTSKELSFKKGDTVYILRKIDQNWYEGEHHGRVGIFPISYVEKLTPPEKAQPARPPPPAQPGEIGEAIAKYNFNADTNVELSLRKGDRVILLKRVDQNWYEGKIPGTNRQGIFPVSYVEVVKKNTKGAEDYPDPPIPHSYSSDRIHSLSSNKPQRPVFTHENIQGGGEPFQALYNYTPRNEDELELRESDVIDVMEKCDDGWFVGTSRRTKFFGTFPGNYVKRL

SEQ ID NO: 2363 - protein, 645 aa, Homo sapiens
MSYYQRPFSPSAYSLPASLNSSIVMQHGTSLDSTDTYPQHAQSLDGTTSSSIPLYRSSEEEKRVTVIKAPHYPGIGPVDESGIPTAIRTTVDRPKDWYKTMFKQIHMVHKPDDDTDMYNTPYTYNAGLYNPPYSAQSHPAAKTQTYRPLSKSHSDNSPNAFKDASSPVPPPHVPPPVPPLRPRDRSSTEKHDWDPPDRKVDTRKFRSEPRSIFEYEPGKSSILQHERPPPLPTTPTPVPREPGRKPLSSSRLGEVTGSPSPPPRSGAPTPSSRAPALSPTRPPKKPLDYVQDHSSGVFNEASLYQSSIDRSLERPMSSASMASDFRKRRKSEPAVGPPRGLGDQSASRTSPGRVDLPGSSTTLTKSFTSSSPSSPSRAKDRESPRSYSSTLTDMGRSAPRERRGTPEKEKLPAKAVYDFKAQTSKELSFKKGDTVYILRKIDQNWYEGEHHGRVGIFPISYVEKLTPPEKAQPARPPPPAQPGEIGEAIAKYNFNADTNVELSLRKGDRVILLKRVDQNWYEGKIPGTNRQGIFPVSYVEVVKKNTKGAEDYPDPPIPHSYSSDRIHSLSSNKPQRPVFTHENIQGGGEPFQALYNYTPRNEDELELRESDVIDVMEKCDDGWFVGTSRRTKFFGTFPGNYVKRL

SEQ ID NO: 2364 - protein, 691 aa, Homo sapiens
MNTGRDSQSPDSAKGFRSVRPNLQDKRSPTQSQITVNGNSGGAVSPMSYYQRPFSPSAYSLPASLNSSIVMQHGTSLDSTDTYPQHAQSLDGTTSSSIPLYRSSEEEKRVTVIKAPHYPGIGPVDESGIPTAIRTTVDRPKDWYKTMFKQIHMVHKPDDDTDMYNTPYTYNAGLYNPPYSAQSHPAAKTQTYRPLSKSHSDNSPNAFKDASSPVPPPHVPPPVPPLRPRDRSSTEKHDWDPPDRKVDTRKFRSEPRSIFEYEPGKSSILQHERPPPLPTTPTPVPREPGRKPLSSSRLGEVTGSPSPPPRSGAPTPSSRAPALSPTRPPKKPLDYVQDHSSGVFNEASLYQSSIDRSLERPMSSASMASDFRKRRKSEPAVGPPRGLGDQSASRTSPGRVDLPGSSTTLTKSFTSSSPSSPSRAKDRESPRSYSSTLTDMGRSAPRERRGTPEKEKLPAKAVYDFKAQTSKELSFKKGDTVYILRKIDQNWYEGEHHGRVGIFPISYVEKLTPPEKAQPARPPPPAQPGEIGEAIAKYNFNADTNVELSLRKGDRVILLKRVDQNWYEGKIPGTNRQGIFPVSYVEVVKKNTKGAEDYPDPPIPHSYSSDRIHSLSSNKPQRPVFTHENIQGGGEPFQALYNYTPRNEDELELRESDVIDVMEKCDDGWFVGTSRRTKFFGTFPGNYVKRL

SEQ ID NO: 2365 - protein, 645 aa, Homo sapiens
MNTGRDSQSPDSAKGFRSVRPNLQDKRSPTQSQITVNGNSGGAVSPMSYYQRPFSPSAYSLPASLNSSIVMQHGTSLDSTDTYPQHAQSLDGTTSSSIPLYRSSEEEKRVTVIKAPHYPGIGPVDESGIPTAIRTTVDRPKDWYKTMFKQIHMVHKPDDDTDMYNTPYTYNAGLYNPPYSAQSHPAAKTQTYRPLSKSHSDNSPNAFKDASSPVPPPHVPPPVPPLRPRDRSSTEKHDWDPPDRKVDTRKFRSEPRSIFEYEPGKSSILQHERPPPLPTTPTPVPREPGRKPLSSSRLGEVTGSPSPPPRSGAPTPSSRAPALSPTRPPKKPLDYVQDHSSGVFNEASLYQSSIDRSLERPMSSASMASDFRKRRKSEPAVGPPRGLGDQSASRTSPGRVDLPGSSTTLTKSFTSSSPSSPSRAKDRESPRSYSSTLTDMGRSAPRERRGTPEKEKLPAKAVYDFKAQTSKELSFKKGDTVYILRKIDQNWYEGEHHGRVGIFPISYVEKLTPPEKAQPARPPPPAQPGEIGEAIAKYNFNADTNVELSLRKGDRVILLKRVDQNWYEGKIPGTNRQGIFPVSYVEVVKKNTKGAEDYPDPPIPHSYSSDRIHSLSSNKPQRPVFTHENIQGGGEPFQALGYTLT

SEQ ID NO: 2366 - protein, 156 aa, Homo sapiens
MKATTPLQTVDRPKDWYKTMFKQIHMVHKPDDDTDMYNTPYTYNAGLYNPPYSAQSHPAAKTQTYRPLSKSHSDNSPNAFKDASSPVPPPHVPPPVPPLRPRDRSSTEKHDWDPPDRKVDTRKFRSEPRSIFEYEPGKSSILQHERPVSKPQAGRR

SEQ ID NO: 2367 - protein, 1004 aa, Homo sapiens
MKATTPLQTVDRPKDWYKTMFKQIHMVHKPGLYNPPYSAQSHPAAKTQTYRPLSKSHSDNSPNAFKDASSPVPPPHVPPPVPPLRPRDRSSTEKHDWDPPDRKVDTRKFRSEPRSIFEYEPGKSSILQHERPASLYQSSIDRSLERPMSSASMASDFRKRRKSEPAVGPPRGLGDQSASRTSPGRVDLPGSSTTLTKSFTSSSPSSPSRAKGGDDSKICPSLCSYSGLNGNPSSELDYCSTYRQHLDVPRDSPRAISFKNGWQMARQNAEIWSSTEETVSPKIKSRSCDDLLNDDCDSFPDPKVKSESMGSLLCEEDSKESCPMAWGSPYVPEVRSNGRSRIRHRSARNAPGFLKMYKKMHRINRKDLMNSEVICSVKSRILQYESEQQHKDLLRAWSQCSTEEVPRDMVPTRISEFEKLIQKSKSMPNLGDDMLSPVTLEPPQNGLCPKRRFSIEYLLEEENQSGPPARGRRGCQSNALVPIHIEVTSDEQPRAHVEFSDSDQDGVVSDHSDYIHLEGSSFCSESDFDHFSFTSSESFYGSSHHHHHHHHHHHRHLISSCKGRCPASYTRFTTMLKHERARHENTEEPRRQEMDPGLSKLAFLVSPVPFRRKKNSAPKKQTEKAKCKASVFEALDSALKDICDQIKAEKKRGSLPDNSILHRLISELLPDVPERNSSLRALRRSPLHQPLHPLPPDGAIHCPPYQNDCGRMPRSASFQDVDTANSSCHHQDRGGALQDRESPRSYSSTLTDMGRSAPRERRGTPEKEKLPAKAVYDFKAQTSKELSFKKGDTVYILRKIDQNWYEGEHHGRVGIFPISYVEKLTPPEKAQPARPPPPAQPGEIGEAIAKYNFNADTNVELSLRKGDRVILLKRVDQNWYEGKIPGTNRQGIFPVSYVEVVKKNTKGAEDYPDPPIPHSYSSDRIHSLSSNKPQRPVFTHENIQGGGEPFQALYNYTPRNEDELELRESDVIDVMEKCDDGWFVGTSRRTKFFGTFPGNYVKRL

SEQ ID NO: 2368 - protein, 661 aa, Homo sapiens
MNTGRDSQSPDSAWRSYNDGNQETLNGDATYSSLAAKGFRSVRPNLQDKRSPTQSQITVNGNSGGAVSPMSYYQRPFSPSAYSLPASLNSSIVMQHGTSLDSTDTYPQHAQSLDGTTSSSIPLYRSSEEEKRVTVIKAPHYPGIGPVDESGIPTAIRTTVDRPKDWYKTMFKQIHMVHKPDDDTDMYNTPYTYNAGLYNPPYSAQSHPAAKTQTYRPLSKSHSDNSPNAFKDASSPVPPPHVPPPVPPLRPRDRSSTEKHDWDPPDRKVDTRKFRSEPRSIFEYEPGKSSILQHERPPPKKPLDYVQDHSSGVFNEASLYQSSIDRSLERPMSSASMASDFRKRRKSEPAVGPPRGLGDQSASRTSPGRVDLPGSSTTLTKSFTSSSPSSPSRAKDRESPRSYSSTLTDMGRSAPRERRGTPEKEKLPAKAVYDFKAQTSKELSFKKGDTVYILRKIDQNWYEGEHHGRVGIFPISYVEKLTPPEKAQPARPPPPAQPGEIGEAIAKYNFNADTNVELSLRKGDRVILLKRVDQNWYEGKIPGTNRQGIFPVSYVEVVKKNTKGAEDYPDPPIPHSYSSDRIHSLSSNKPQRPVFTHENIQGGGEPFQALYNYTPRNEDELELRESDVIDVMEKCDDGWFVGTSRRTKFFGTFPGNYVKRL

SEQ ID NO: 2369 - protein, 644 aa, Homo sapiens
MSVTLTSVKRVQSSPNLLAAGRDSQSPDSAWRSYNDGNQETLNGDATYSSLAAKGFRSVRPNLQDKRSPTQSQITVNGNSGGAVSPMSYYQRPFSPSAYSLPASLNSSIVMQHGTSLDSTDTYPQHAQSLDGTTSSSIPLYRSSEEEKRVTVIKAPHYPGIGPVDESGIPTAIRTTVDRPKDWYKTMFKQIHMVHKPGLYNPPYSAQSHPAAKTQTYRPLSKSHSDNSPNAFKDASSPVPPPHVPPPVPPLRPRDRSSTEKHDWDPPDRKVDTRKFRSEPRSIFEYEPGKSSILQHERPASLYQSSIDRSLERPMSSASMASDFRKRRKSEPAVGPPRGLGDQSASRTSPGRVDLPGSSTTLTKSFTSSSPSSPSRAKDRESPRSYSSTLTDMGRSAPRERRGTPEKEKLPAKAVYDFKAQTSKELSFKKGDTVYILRKIDQNWYEGEHHGRVGIFPISYVEKLTPPEKAQPARPPPPAQPGEIGEAIAKYNFNADTNVELSLRKGDRVILLKRVDQNWYEGKIPGTNRQGIFPVSYVEVVKKNTKGAEDYPDPPIPHSYSSDRIHSLSSNKPQRPVFTHENIQGGGEPFQALYNYTPRNEDELELRESDVIDVMEKCDDGWFVGTSRRTKFFGTFPGNYVKRL

SEQ ID NO: 2370 - protein, 824 aa, Homo sapiens
MYSNEDSRQTIVYSEESNTTMSYTQKITNPLPAASSTDPAPFANINTPVLQEDYRQDSQTRRISTLKLTHNQDLGSSSPISTPQFSKSVEVPSFLKRPRSLTPNPVPETHTASLSIQIAPLSGQDLESHKQLPELSPETAKIPLQQERQKSAVAAASQSSDCRVSQITVNGNSGGAVSPMSYYQRPFSPSAYSLPASLNSSIVMQHGTSLDSTDTYPQHAQSLDGTTSSSIPLYRSSEEEKRVTVIKAPHYPGIGPVDESGIPTAIRTTVDRPKDWYKTMFKQIHMVHKPDDDTDMYNTPYTYNAGLYNPPYSAQSHPAAKTQTYRPLSKSHSDNSPNAFKDASSPVPPPHVPPPVPPLRPRDRSSTEKHDWDPPDRKVDTRKFRSEPRSIFEYEPGKSSILQHERPPPLPTTPTPVPREPGRKPLSSSRLGEVTGSPSPPPRSGAPTPSSRAPALSPTRPPKKPLDYVQDHSSGVFNEASLYQSSIDRSLERPMSSASMASDFRKRRKSEPAVGPPRGLGDQSASRTSPGRVDLPGSSTTLTKSFTSSSPSSPSRAKDRESPRSYSSTLTDMGRSAPRERRGTPEKEKLPAKAVYDFKAQTSKELSFKKGDTVYILRKIDQNWYEGEHHGRVGIFPISYVEKLTPPEKAQPARPPPPAQPGEIGEAIAKYNFNADTNVELSLRKGDRVILLKRVDQNWYEGKIPGTNRQGIFPVSYVEVVKKNTKGAEDYPDPPIPHSYSSDRIHSLSSNKPQRPVFTHENIQGGGEPFQALYNYTPRNEDELELRESDVIDVMEKCDDGWFVGTSRRTKFFGTFPGNYVKRL

SEQ ID NO: 2371 - protein, 1200 aa, Homo sapiens
MNTDSGGCARKRAAMSVTLTSVKRVQSSPNLLAAGRDSQSPDSAWRSYNDGNQETLNGDATYSSLAAKGFRSVRPNLQDKRSPTQSQITVNGNSGGAVSPMSYYQRPFSPSAYSLPASLNSSIVMQHGTSLDSTDTYPQHAQSLDGTTSSSIPLYRSSEEEKRVTVIKAPHYPGIGPVDESGIPTAIRTTVDRPKDWYKTMFKQIHMVHKPDDDTDMYNTPYTYNAGLYNPPYSAQSHPAAKTQTYRPLSKSHSDNSPNAFKDASSPVPPPHVPPPVPPLRPRDRSSTEKHDWDPPDRKVDTRKFRSEPRSIFEYEPGKSSILQHERPASLYQSSIDRSLERPMSSASMASDFRKRRKSEPAVGPPRGLGDQSASRTSPGRVDLPGSSTTLTKSFTSSSPSSPSRAKGGDDSKICPSLCSYSGLNGNPSSELDYCSTYRQHLDVPRDSPRAISFKNGWQMARQNAEIWSSTEETVSPKIKSRSCDDLLNDDCDSFPDPKVKSESMGSLLCEEDSKESCPMAWGSPYVPEVRSNGRSRIRHRSARNAPGFLKMYKKMHRINRKDLMNSEVICSVKSRILQYESEQQHKDLLRAWSQCSTEEVPRDMVPTRISEFEKLIQKSKSMPNLGDDMLSPVTLEPPQNGLCPKRRFSIEYLLEEENQSGPPARGRRGCQSNALVPIHIEVTSDEQPRAHVEFSDSDQDGVVSDHSDYIHLEGSSFCSESDFDHFSFTSSESFYGSSHHHHHHHHHHHRHLISSCKGRCPASYTRFTTMLKHERARHENTEEPRRQEMDPGLSKLAFLVSPVPFRRKKNSAPKKQTEKAKCKASVFEALDSALKDICDQIKAEKKRGSLPDNSILHRLISELLPDVPERNSSLRALRRSPLHQPLHPLPPDGAIHCPPYQNDCGRMPRSASFQDVDTANSSCHHQDRGGALQDRESPRSYSSTLTDMGRSAPRERRGTPEKEKLPAKAVYDFKAQTSKELSFKKGDTVYILRKIDQNWYEGEHHGRVGIFPISYVEKLTPPEKAQPARPPPPAQPGEIGEAIAKYNFNADTNVELSLRKGDRVILLKRVDQNWYEGKIPGTNRQGIFPVSYVEVVKKNTKGAEDYPDPPIPHSYSSDRIHSLSSNKPQRPVFTHENIQGGGEPFQALYNYTPRNEDELELRESDVIDVMEKCDDGWFVGTSRRTKFFGTFPGNYVKRL

SEQ ID NO: 2372 - protein, 731 aa, Homo sapiens
MSVTLTSVKRVQSSPNLLAAGRDSQSPDSAWRSYNDGNQETLNGDATYSSLAAKGFRSVRPNLQDKRSPTQSQITVNGNSGGAVSPMSYYQRPFSPSAYSLPASLNSSIVMQHGTSLDSTDTYPQHAQSLDGTTSSSIPLYRSSEEEKRVTVIKAPHYPGIGPVDESGIPTAIRTTVDRPKDWYKTMFKQIHMVHKPDDDTDMYNTPYTYNAGLYNPPYSAQSHPAAKTQTYRPLSKSHSDNSPNAFKDASSPVPPPHVPPPVPPLRPRDRSSTEKHDWDPPDRKVDTRKFRSEPRSIFEYEPGKSSILQHERPPPLPTTPTPVPREPGRKPLSSSRLGEVTGSPSPPPRSGAPTPSSRAPALSPTRPPKKPLDYVQDHSSGVFNEASLYQSSIDRSLERPMSSASMASDFRKRRKSEPAVGPPRGLGDQSASRTSPGRVDLPGSSTTLTKSFTSSSPSSPSRAKDRESPRSYSSTLTDMGRSAPRERRGTPEKEKLPAKAVYDFKAQTSKELSFKKGDTVYILRKIDQNWYEGEHHGRVGIFPISYVEKLTPPEKAQPARPPPPAQPGEIGEAIAKYNFNADTNVELSLRKGDRVILLKRVDQNWYEGKIPGTNRQGIFPVSYVEVVKKNTKGAEDYPDPPIPHSYSSDRIHSLSSNKPQRPVFTHENIQGGGEPFQALYNYTPRNEDELELRESDVIDVMEKCDDGWFVGTSRRTKFFGTFPGNYVKRL

SEQ ID NO: 2373 - protein, 1183 aa, Homo sapiens
MGNAPSQDPERSSPPMLSADDAEYPREYRTLGGGGGGGSGGRRFSNVGLVHTSERRHTVIAAQSLEALSGLQKADADRKRDAFMDHLKSKYPQHALALRGQQDRMREQPNYWSFKTRSSRHTQGAQPGLADQAAKLSYASAESLETMSEAELPLGFSRMNRFRQSLPLSRSASQTKLRSPGVLFLQFGEETRRVHITHEVSSLDTLHALIAHMFPQKLTMGMLKSPNTAILIKDEARNVFYELEDVRDIQDRSIIKIYRKEPLYAAFPGSHLTNGDLRREMVYASRESSPTRRLNNLSPAPHLASGSPPPGLPSGLPSGLQSGSPSRSRLSYAGGRPPSYAGSPVHHAAERLGGAPAAQGVSPSPSAILERRDVKPDEDLASKAGGMVLVKGEGLYADPYGLLHEGRLSLAAAAGDPFAYPGAGGLYKRGSVRSLSTYSAAALQSDLEDSLYKAAGGGGPLYGDGYGFRLPPSSPQKLADVAAPPGGPPPPHSPYSGPPSRGSPVRQSFRKDSGSSSVFAESPGGKTRSAGSASTAGAPPSELFPGPGERSLVGFGPPVPAKDTETRERMEAMEKQIASLTGLVQSALLRGSEPETPSEKIEGSNGAATPSAPCGSGGRSSGATPVSGPPPPSASSTPAGQPTAVSRLQMQLHLRGLQNSASDLRGQLQQLRKLQLQNQESVRALLKRTEAELSMRVSEAARRQEDPLQRQRTLVEEERLRYLNDEELITQQLNDLEKSVEKIQRDVSHNHRLVPGPELEEKALVLKQLGETLTELKAHFPGLQSKMRVVLRVEVEAVKFLKEEPQRLDGLLKRCRGVTDTLAQIRRQVDEGVWPPPNNLLSQSPKKVTAETDFNKSVDFEMPPPSPPLNLHELSGPAEGASLTPKGGNPTKGLDTPGKRSVDKAVSVEAAERDWEEKRAALTQYSAKDINRLLEETQAELLKAIPDLDCASKAHPGPAPTPDHKPPKAPHGQKAAPRTEPSGRRGSDELTVPRYRTEKPSKSPPPPPPRRSFPSSHGLTTTRTGEVVVTSKKDSAFIKKAESEELEVQKPQVKLRRAVSEVARPASTPPIMASAIKDEDDEDRIIAELESGGGSVPPMKVVTPGASRLKAAQGQAGSPDKSKHGKQRAEYMRIQAQQQATKPSKEMSGSNETSSPVSEKPSASRTSIPVLTSFGARNSSISF

SEQ ID NO: 2374 - protein, 1012 aa, Homo sapiens
MRGAWVHLHSGAASSLRPCRCGAGAAPKSSPRSPGGRRGDGSSDSEGGVSFAGVLFLQFGEETRRVHITHEVSSLDTLHALIAHMFPQKLTMGMLKSPNTAILIKDEARNVFYELEDVRDIQDRSIIKIYRKEPLYAAFPGSHLTNGDLRREMVYASRESSPTRRLNNLSPAPHLASGSPPPGLPSGLPSGLQSGSPSRSRLSYAGGRPPSYAGSPVHHAAERLGGAPAAQGVSPSPSAILERRDVKPDEDLASKAGGMVLVKGEGLYADPYGLLHEGRLSLAAAAGDPFAYPGAGGLYKRGSVRSLSTYSAAALQSDLEDSLYKAAGGGGPLYGDGYGFRLPPSSPQKLADVAAPPGGPPPPHSPYSGPPSRGSPVRQSFRKDSGSSSVFAESPGGKTRSAGSASTAGAPPSELFPGPGERSLVGFGPPVPAKDTETRERMEAMEKQIASLTGLVQSALLRGSEPETPSEKIEGSNGAATPSAPCGSGGRSSGATPVSGPPPPSASSTPAGQPTAVSRLQMQLHLRGLQNSASDLRGQLQQLRKLQLQNQESVRALLKRTEAELSMRVSEAARRQEDPLQRQRTLVEEERLRYLNDEELITQQLNDLEKSVEKIQRDVSHNHRLVPGPELEEKALVLKQLGETLTELKAHFPGLQSKMRVVLRVEVEAVKFLKEEPQRLDGLLKRCRGVTDTLAQIRRQVDEGVWPPPNNLLSQSPKKVTAETDFNKSVDFEMPPPSPPLNLHELSGPAEGASLTPKGGNPTKGLDTPGKRSVDKAVSVEAAERDWEEKRAALTQYSAKDINRLLEETQAELLKAIPDLDCASKAHPGPAPTPDHKPPKAPHGQKAAPRTEPSGRRGSDELTVPRYRTEKPSKSPPPPPPRRSFPSSHGLTTTRTGEVVVTSKKDSAFIKKAESEELEVQKPQVKLRRAVSEVARPASTPPIMASAIKDEDDEDRIIAELESGGGSVPPMKVVTPGASRLKAAQGQAGSPDKSKHGKQRAEYMRIQAQQQA

SEQ ID NO: 2375 - protein, 257 aa, Homo sapiens
MRVSEAARRQEDPLQRQRTLVEEERLRYLNDEELITQQLNDLEKSVEKIQRDVSHNHRLVPGPELEEKALVLKQLGETLTELKAHFPGLQSKMRVVLRVEVEAVKFLKEEPQRLDGLLKRCRGVTDTLAQIRRQVDEGVWPPPNNLLSQSPKKVTAETDFNKSVDFEMPPPSPPLNLHELSGPAEGASLTPKGGNPTKGLDTPGKRSVDKAVSVEVLGPGIVGGAMSQVHTFLRPSFLEWGVPILWVFFLGGGGPVP

SEQ ID NO: 2376 - protein, 1049 aa, Homo sapiens
MALVTLQRSPTPSAASSSASNSELEAGSEEDRKLNLSLSESFFMVKGAALFLQQGSSPQGQRSLQHPHKHAGDLPQHLQVMINLLRCEDRIKLAVRLESAWADRVRYMVVVYSSGRQDTEENILLGVDFSSKESKSCTIGMVLRLWSDTKIHLDGDGGFSVSTAGRMHIFKPVSVQAMWSALQVLHKACEVARRHNYFPGGVALIWATYYESCISSEQSCINEWNAMQDLESTRPDSPALFVDKPTEGERTERLIKAKLRSIMMSQDLENVTSKEIRNELEKQMNCNLKELKEFIDNEMLLILGQMDKPSLIFDHLYLGSEWNASNLEELQGSGVDYILNVTREIDNFFPGLFAYHNIRVYDEETTDLLAHWNEAYHFINKAKRNHSKCLVHCKMGVSRSASTVIAYAMKEFGWPLEKAYNYVKQKRSITRPNAGFMRQLSEYEGILDASKQRHNKLWRQQTDSSLQQPVDDPAGPGDFLPETPDGTPESQLPFLDDAAQPGLGPPLPCCFRRLSDPLLPSPEDETGSLVHLEDPEREALLEEAAPPAEVHRPARQPQQGSGLCEKDVKKKLEFGSPKGRSGSLLQVEETEREEGLGAGRWGQLPTQLDQNLLNSENLNNNSKRSCPNGMEDDAIFGILNKVKPSYKSCADCMYPTASGAPEASRERCEDPNAPAICTQPAFLPHITSSPVAHLASRSRVPEKPASGPTEPPPFLPPAGSRRADTSGPGAGAALEPPASLLEPSRETPKVLPKSLLLKNSHCDKNPPSTEVVIKEESSPKKDMKPAKDLRLLFSNESEKPTTNSYLMQHQESIIQLQKAGLVRKHTKELERLKSVPADPAPPSRDGPASRLEASIPEESQDPAALHELGPLVMPSQAGSDEKSEAAPASLEGGSLKSPPPFFYRLDHTSSFSKDFLKTICYTPTSSSMSSNLTRSSSSDSIHSVRGKPGLVKQRTQEIETRLRLAGLTVSSPLKRSHSLAKLGSLTFSTEDLSSEADPSTVADSQDTTLSESSFLHEPQGTPRDPAATSKPSGKPAPENLKSPSWMSKS

SEQ ID NO: 2377 - protein, 692 aa, Homo sapiens
MALVTLQRSPTPSAASSSASNSELEAGSEEDRKLNLSLSESFFMVKGAALFLQQGSSPQGQRSLQHPHKHAGDLPQHLQVMINLLRCEDRIKLAVRLESAWADRVRYMVVVYSSGRQDTEENILLGVDFSSKESKSCTIGMVLRLWSDTKIHLDGDGGFSVSTAGRMHIFKPVSVQAMWSALQVLHKACEVARRHNYFPGGVALIWATYYESCISSEQSCINEWNAMQDLESTRPDSPALFVDKPTEGERTERLIKAKLRSIMMSQDLENVTSKEIRNELEKQMNCNLKELKEFIDNEMLLILGQMDKPSLIFDHLYLGSEWNASNLEELQGSGVDYILNVTREIDNFFPGLFAYHNIRVYDEETTDLLAHWNEAYHFINKAKRNHSKCLVHCKMGVSRSASTVIAYAMKEFGWPLEKAYNYVKQKRSITRPNAGFMRQLSEYEGILDASKQRHNKLWRQQTDSSLQQPVDDPAGPGDFLPETPDGTPESQLPFLDDAAQPGLGPPLPCCFRRLSDPLLPSPEDETGSLVHLEDPEREALLEEAAPPAEVHRPARQPQQGSGLCEKDVKKKLEFGSPKGRSGSLLQVEETEREEGLGAGRWGQLPTQLDQNLLNSENLNNNSKRSCPNGMEVGRARPAGWHTPSLPSHSNWPTSASVVGTTGTRHHTQLIFFYCLLWAPSSHLQGPEGSFTG

SEQ ID NO: 2378 - protein, 148 aa, Homo sapiens
MGGRHHLQRQVSESMSALFQAVRLESAWADRVRYMVVVYSSGRQDTEENILLGVDFSSKESGFSVSTAGRMHIFKPVSVQAMWSALQVLHKACEVARRHNYFPGGVALIWATYYESCISSEQSCINEWNAMQDLESTRPDSPALFVDK

SEQ ID NO: 2379 - protein, 737 aa, Homo sapiens
MRCYLSWDRWTSPPLSSIIFISVDYILNVTREIDNFFPGLFAYHNIRVYDEETTDLLAHWNEAYHFINKAKRNHSKCLVHCKMGVSRSASTVIAYAMKEFGWPLEKAYNYVKQKRSITRPNAGFMRQLSEYEGILDASKQRHNKLWRQQTDSSLQQPVDDPAGPGDFLPETPDGTPESQLPFLDDAAQPGLGPPLPCCFRRLSDPLLPSPEDETGSLVHLEDPEREALLEEAAPPAEVHRPARQPQQGSGLCEKDVKKKLEFGSPKGRSGSLLQVEETEREEGLGAGRWGQLPTQLDQNLLNSENLNNNSKRSCPNGMEDDAIFGILNKVKPSYKSCADCMYPTASGAPEASRERCEDPNAPAICTQPAFLPHITSSPVAHLASRSRVPEKPASGPTEPPPFLPPAGSRRADTSGPGAGAALEPPASLLEPSRETPKVLPKSLLLKNSHCDKNPPSTEVVIKEESSPKKDMKPAKDLRLLFSNESEKPTTNSYLMQHQESIIQLQKAGLVRKHTKELERLKSVPADPAPPSRDGPASRLEASIPEESQDPAALHELGPLVMPSQAGSDEKSEAAPASLEGGSLKSPPPFFYRLDHTSSFSKDFLKTICYTPTSSSMSSNLTRSSSSDSIHSVRGKPGLVKQRTQEIETRLRLAGLTVSSPLKRSHSLAKLGSLTFSTEDLSSEADPSTVADSQDTTLSESSFLHEPQGTPRDPAATSKPSGKPAPENLKSPSWMSKS

SEQ ID NO: 2380 - protein, 703 aa, Homo sapiens
MARARRAVVGSVRDVSTAATNLFYFTDFCIFLQPTHCFCCPEVSSSNYLSESFFMVKGAALFLQQGSSPQGQRSLQHPHKHAGDLPQHLQVMINLLRCEDRIKLAVRLESAWADRVRYMVVVYSSGRQDTEENILLGVDFSSKESKSCTIGMVLRLWSDTKIHLDGDGGFSVSTAGRMHIFKPVSVQAMWSALQVLHKACEVARRHNYFPGGVALIWATYYESCISSEQSCINEWNAMQDLESTRPDSPALFVDKPTEGERTERLIKAKLRSIMMSQDLENVTSKEIRNELEKQMNCNLKELKEFIDNEMLLILGQMDKPSLIFDHLYLGSEWNASNLEELQGSGVDYILNVTREIDNFFPGLFAYHNIRVYDEETTDLLAHWNEAYHFINKAKRNHSKCLVHCKMGVSRSASTVIAYAMKEFGWPLEKAYNYVKQKRSITRPNAGFMRQLSEYEGILDASKQRHNKLWRQQTDSSLQQPVDDPAGPGDFLPETPDGTPESQLPFLDDAAQPGLGPPLPCCFRRLSDPLLPSPEDETGSLVHLEDPEREALLEEAAPPAEVHRPARQPQQGSGLCEKDVKKKLEFGSPKGRSGSLLQVEETEREEGLGAGRWGQLPTQLDQNLLNSENLNNNSKRSCPNGMEVGRARPAGWHTPSLPSHSNWPTSASVVGTTGTRHHTQLIFFYCLLWAPSSHLQGPEGSFTG

SEQ ID NO: 2381 - protein, 243 aa, Homo sapiens
MGKNKQPRGQQRQGGPPAADAAGPDDMEPKKGTGAPKECGEEEPRTCCGCRFPLLLALLQLALGIAVTVVGFLMASISSSLLVRDTPFWAGIIVCLVAYLGLFMLCVSYQVDERTCIQFSMKLLYFLLSALGLTVCVLAVAFAAHHYSQLTQFTCETTLDSCQCKLPSSEPLSRTFVYRDVTDCTSVTGTFKLFLLIQMILNLVCGLVCLLACFVMWKHRYQVFYVGVRICSLTASEGPQQKI

SEQ ID NO: 2382 - protein, 132 aa, Homo sapiens
MGKNKQPRGQQRQGGPPAADAAGPDDMEPKKGTGAPKECGEEEPRTCCGCRFPLLLALLQLALGIAVTVVGFLMASISSSLLVRDTPFWAGIIVCLVAYLGLFMLCVHRYQVFYVGVRICSLTASEGPQQKI

SEQ ID NO: 2383 - protein, 140 aa, Homo sapiens
MLCVSYQVDERTCIQFSMKLLYFLLSALGLTVCVLAVAFAAHHYSQLTQFTCETTLDSCQCKLPSSEPLSRTFVYRDVTDCTSVTGTFKLFLLIQMILNLVCGLVCLLACFVMWKHRYQVFYVGVRICSLTASEGPQQKI

SEQ ID NO: 2384 - protein, 196 aa, Homo sapiens
MATSVLCCLRCCRDGGTGHIPLKEMPAVQLDTQHMGTDVVIVKNGRRICGTGGCLASAPLHQNKSYFEFKIQSTGIWGIGVATQKVNLNQIPLGRDMHSLVMRNDGALYHNNEEKNRLPANSLPQEGDVVGITYDHVELNVYLNGKNMHCPASGIRGTVYPVVYVDDSAILDCQFSEFYHTPPPGFEKILFEQQIF

SEQ ID NO: 2385 - protein, 157 aa, Homo sapiens
MATSVLCCLRCCRDGGTGHIPLKEMPAVQLDTQHMGIWGIGVATQKVNLNQIPLGRDMHSLVMRNDGALYHNNEEKNRLPANSLPQEGDVVGITYDHVELNVYLNGKNMHCPASGIRGTVYPVVYVDDSAILDCQFSEFYHTPPPGFEKILFEQQIF

SEQ ID NO: 2386 - protein, 904 aa, Homo sapiens
MDAGFFRGTSAEQDNRFSNKQKKLLKQLKFAECLEKKVDMSKVNLEVIKPWITKRVTEILGFEDDVVIEFIFNQLEVKNPDSKMMQINLTGFLNGKNAREFMGELWPLLLSAQENIAGIPSAFLELKKEEIKQRQIEQEKLASMKKQDEDKDKRDKEEKESSREKRERSRSPRRRKSRSPSPRRRSSPVRRERKRSHSRSPRHRTKSRSPSPAPEKKEKTPELPEPSVKVKEPSVQEATSTSDILKVPKPEPIPEPKEPSPEKNSKKEKEKEKTRPRSRSRSKSRSRTRSRSPSHTRPRRRHRSRSRSYSPRRRPSPRRRPSPRRRTPPRRMPPPPRHRRSRSPVRRRRRSSASLSGSSSSSSSSRSRSPPKKPPKRTSSPPRKTRRLSPSASPPRRRHRPSPPATPPPKTRHSPTPQQSNRTRKSRVSVSPGRTSGKVTKHKGTEKRESPSPAPKPRKVELSESEEDKGGKMAAADSVQQRRQYRRQNQQSSSDSGSSSSSEDERPKRSHVKNGEVGRRRRHSPSRSASPSPRKRQKETSPRGRRRRSPSPPPTRRRRSPSPAPPPRRRRTPTPPPRRRTPSPPPRRRSPSPRRYSPPIQRRYSPSPPPKRRTASPPPPPKRRASPSPPPKRRVSHSPPPKQRSSPVTKRRSPSLSSKHRKGSSPSRSTREARSPQPNKRHSPSPRPRAPQTSSSPPPVRRGASSSPQRRQSPSPSTRPIRRVSRTPEPKKIKKAASPSPQSVRRVSSSRSVSGSPEPAAKKPPAPPSPVQSQSPSTNWSPAVPVKKAKSPTPSPSPPRNSDQEGGGKKKKKKKDKKHKKDKKHKKHKKHKKEKAVAAAAAAAVTPAAIAAATTTLAQEEPVAAPEPKKETESEAEDNLDDLEKHLREKALRSMRKAQVSPQS

SEQ ID NO: 2387 - protein, 902 aa, Homo sapiens
MDAGFFRGTSAEQDNRFSNKQKKLLKQLKFAECLEKKVDMSKVNLEVIKPWITKRVTEILGFEDDVVIEFIFNQLEVKNPDSKMMQINLTGFLNGKNAREFMGELWPLLLSAQENIAGIPSAFLELKKEEIKQRQIEQEKLASMKKQDEDKDKRDKEEKESSREKRERSRSPRRRKSRSPSPRRRSSPVRRERKRSHSRSPRHRTKSRSPSPAPEKKEKTPELPEPSVKVKEPSVQEATSTSDILKVPKPEPIPEPKEPSPEKNSKKEKEKEKTRPRSRSRSKSRSRTRSRSPSHTRPRRRHRSDKMYSPRRRPSPRRRPSPRRRTPPRRMPPPPRHRRSRSPVRRRRRSSASLSGSSSSSSSSRSRSPPKKPPKRTSSPPRKTRRLSPSASPPRRRHRPSPPATPPKTRHSPTPQQSNRTRKSRVSVSPGRTSGKVTKHKGTEKRESPSPAPKPRKVELSESEEDKGGKMAAADSVQQRRQYRRQNQQSSSDSGSSSSSEDERPKRSHVKNGEVGRRRRHSPSRSASPSPRKRQKETSPRGRRRRSPSPPPTRRRRSPSPAPPPRRRRTPTPPPRRRTPSPPPRRRSPSPRRYSPPIQRRYSPSPPPKRRTASPPPPPKRRASPSPPPKRRVSHSPPPKQRSSPVTKRRSPSLSSKHRKGSSPSRSTREARSPQPNKRHSPSPRPRAPQTSSSPPPVRRGASSSPQRRQSPSPSTRPIRRVSRTPEPKKIKKAASPSPQSVRRVSSSRSVSGSPEPAAKKPPAPPSPVQSQSPSTNWSPAVPVKKAKSPTPSPSPPRNSDQEGGGKKKKKKKDKKHKKDKKHKKHKKHKKEKAVAAAAAAAVTPAAIAAATTTLAQEEPVAAPEPKKETESEAEDNLDDLEKHLREKALRSMRKAQVSPQS

SEQ ID NO: 2388 - protein, 384 aa, Homo sapiens
MDPAGGPRGVLPRPCRVLVLLNPRGGKGKALQLFRSHVQPLLAEAEISFTLMLTERRNHARELVRSEELGRWDALVVMSGDGLMHEVVNGLMERPDWETAIQKPLCSLPAGSGNALAASLNHYAGYEQVTNEDLLTNCTLLLCRRLLSPMNLLSLHTASGLRLFSVLSLAWGFIADVDLESEKYRRLGEMRFTLGTFLRLAALRTYRGRLAYLPVGRVGSKTPASPVVVQQGPVDAHLVPLEEPVPSHWTVVPDEDFVLVLALLHSHLGSEMFAAPMGRCAAGVMHLFYVRAGVSRAMLLRLFLAMEKGRHMEYECPYLVYVPVVAFRLEPKDGKGVFAVDGELMVSEAVQGQVHPNYFWMVSGCVEPPPSWKPQQMPPPEEPL

SEQ ID NO: 2389 - protein, 470 aa, Homo sapiens
MSAQVLGFLRSWTPLPLAAPRGPAAAGNDAGAPAATAPGGEGEPHSRPCDARLGSTDKELKAGAAATGSAPTAPGTPWQREPRVEVMDPAGGPRGVLPRPCRVLVLLNPRGGKGKALQLFRSHVQPLLAEAEISFTLMLTERRNHARELVRSEELGRWDALVVMSGDGLMHEVVNGLMERPDWETAIQKPLCSLPAGSGNALAASLNHYAGYEQVTNEDLLTNCTLLLCRRLLSPMNLLSLHTASGLRLFSVLSLAWGFIADVDLESEKYRRLGEMRFTLGTFLRLAALRTYRGRLAYLPVGRVGSKTPASPVVVQQGPVDAHLVPLEEPVPSHWTVVPDEDFVLVLALLHSHLGSEMFAAPMGRCAAGVMHLFYVRAGVSRAMLLRLFLAMEKGRHMEYECPYLVYVPVVAFRLEPKDGKGVFAVDGELMVSEAVQGQVHPNYFWMVSGCVEPPPSWKPQQMPPPEEPL

SEQ ID NO: 2390 - protein, 398 aa, Homo sapiens
MDPVVGCGRGLFGFVFSAGGPRGVLPRPCRVLVLLNPRGGKGKALQLFRSHVQPLLAEAEISFTLMLTERRNHARELVRSEELGRWDALVVMSGDGLMHEVVNGLMERPDWETAIQKPLCSLPAGSGNALAASLNHYAGYEQVTNEDLLTNCTLLLCRRLLSPMNLLSLHTASGLRLFSVLSLAWGFIADVDLESEKYRRLGEMRFTLGTFLRLAALRTYRGRLAYLPVGRVGSKTPASPVVVQQGPVDAHLVPLEEPVPSHWTVVPDEDFVLVLALLHSHLGSEMFAAPMGRCAAGVMHLFYVRAGVSRAMLLRLFLAMEKGRHMEYECPYLVYVPVVAFRLEPKDGKGVFAVDGELMVSEAVQGQVHPNYFWMVSGCVEPPPSWKPQQMPPPEEPL

SEQ ID NO: 2391 - protein, 236 aa, Homo sapiens
MASSVDEEALHQLYLWVDNIPLSRPKRNLSRDFSDGVLVAEVIKFYFPKMVEMHNYVPANSLQQKLSNWGHLNRKVLKRLNFSVPDDVMRKIAQCAPGVVELVLIPLRQRLEERQRRRKQGAGSLQELAPQDGSGYMDVGVSQKARGEGVPDPQGGGQLSWDRPPAPRPPAYNRALQGDPSFVLQIAEKEQELLASQETVQVLQMKVRRLEHLLQLKNVRIEDLSRRLQQAERKQR

SEQ ID NO: 2392 - protein, 162 aa, Homo sapiens
MASSVDEEALHQLYLWVDNIPLSRPKRNLSRDFSDGVLVAEVIKFYFPKMVEMHNYVPANSLQQKLSNWGHLNRKVLKRLNFSVPDDVMRKIAQCAPGVVELVLIPLRQRLEERQRRRKQGAGSLQELAPQDGSGYMDVGKVAFSISPSRLELSFCPSSCHL

SEQ ID NO: 2393 - protein, 501 aa, Homo sapiens
MENQLWHNTVRCCNQYQESPHDAEDILLLLLGLIVLVNIGINVATMMWHGLQNALDKMIDWATQKNEIQASESPPSGPPDKAQDVHIHCILDPVQVKMSRPTQYSSFSCHHFSNHHSSSLLRCVRRRRRRHRRCRRRCCNHQQRPQNYRQIPHSHSVFRNPHRSQKMSQLHRVPFFDQEDPDSYLEEEDNLPFPYPKYPRRGWGGFYQRAGLPSNVGLWGHQGGILASLPPPSLYLSPELRCMPKRVEARSELRLQSYGRHGSQSRLWGNVEAEQWASSPPPPHRLPPNPSWVPVGHSPYPSVGWMLYDSWDQRRRGTEGFERPPASVSRNARPEAQGCREHHSPQSHQQSLLGHAYGQSHRSPHPSTEPLGYSSQDPREVRRRAADWAEALPAWRPLTTSASLTVLDEASHQRTPAPSSVLVPHSSQPWPKVQAADPAPPPTMFVPLSRNPGGNANYQVYDSLELKRQVQKSRARSSSLPPASTSTLRPSLHRSQTEKLN

SEQ ID NO: 2394 - protein, 548 aa, Homo sapiens
MAAPPARADADPSPTSPPTARDTPGRQAEKSETACEDRSNAESLDRLLPPVGTGRSPRKRTTSQCKSEPPLLRTSKRTIYTAGRPPWYNEHGTQSKEAFAIGLGGGSASGKTTVARMIIEALDVPWVVLLSMDSFYKVLTEQQQEQAAHNNFNFDHPDAFDFDLIISTLKKLKQGKSVKVPIYDFTTHSRKKDWKTLYGANVIIFEGIMAFADKTLLELLDMKIFVDTDSDIRLVRRLRRDISERGRDIEGVIKQYNKFVKPSFDQYIQPTMRLADIVVPRGSGNTVAIDLIVQHVHSQLEERELSVRAALASAHQCHPLPRTLSVLKSTPQVRGMHTIIRDKETSRDEFIFYSKRLMRLLIEHALSFLPFQDCVVQTPQGQDYAGKCYAGKQITGVSILRAGETMEPALRAVCKDVRIGTILIQTNQLTGEPELHYLRLPKDISDDHVILMDCTVSTGAAAMMAVRVLLDHDVPEDKIFLLSLLMAEMGVHSVAYAFPRVRIITTAVDKRVNDLFRIIPGIGNFGDRYFGTDAVPDGSDEEEVAYTG

SEQ ID NO: 2395 - protein, 419 aa, Homo sapiens
MAAPPARADADPSPTSPPTARDTPGRQAEKSETACEDRSNAESLDRLLPPVGTGRSPRKRTTSQCKSEPPLLRTSKRTIYTAGRPPWYNEHGTQSKEAFAIGLGGGSASGKTTVARMIIEALDVPWVVLLSMDSFYKVLTEQQQEQAAHNNFNFDHPDAFDFDLIISTLKKLKQGKSVKVPIYDFTTHSRKKDWKTLYGANVIIFEGIMAFADKTLLELLDMKIFVDTDSDIRLVRRLRRDISERGRDIEGVIKQYNKFVKPSFDQYIQPTMRLADIVVPRGSGNTVAIDLIVQHVHSQLEEGCAGLGTPVPPAAPDAERPEEHAAGTGHAHHHQVRAHLGTGRPRARAPAQLLAPQGQGDQSRRVHLLLQETDAAAHRARALLPALSGLRRTDPAGAGLCGQVLCGEADHRCVHSARR

SEQ ID NO: 2396 - protein, 395 aa, Homo sapiens
MAAPPARADADPSPTSPPTARDTPGRQAEKSETACEDRSNAESLDRLLPPVGTGRSPRKRTTSQCKSEPPLLRTSKRTIYTAGRPPWYNEHGTQSKEAFAIGLGGGSASGKTTVARMIIEALDVPWVVLLSMDSFYKVLTEQQQEQAAHNNFNFDHPDAFDFDLIISTLKKLKQGKSVKVPIYDFTTHSRKKDWKTLYGANVIIFEGIMAFADKTLLELLDMKIFVDTDSDIRLVRRLRRDISERGRDIEGVIKQYNKFVKPSFDQYIQPTMRLADIVVPRGSGNTVAIDLIVQHVHSQLEERELSVRAALASAHQCHPLPRTLSVLKSTPQVRGMHTIIRDKETSRDEFIFYSKRLMRLLIEHALSFLPFQDCVVQTPQGQDYADHRCVHSARR

SEQ ID NO: 2397 - protein, 533 aa, Homo sapiens
MSSPPAYPGIRISGCRALGAEGSSNAESLDRLLPPVGTGRSPRKRTTSQCKSEPPLLRTSKRTIYTAGRPPWYNEHGTQSKEAFAIGLGGGSASGKTTVARMIIEALDVPWVVLLSMDSFYKVLTEQQQEQAAHNNFNFDHPDAFDFDLIISTLKKLKQGKSVKVPIYDFTTHSRKKDWKTLYGANVIIFEGIMAFADKTLLELLDMKIFVDTDSDIRLVRRLRRDISERGRDIEGVIKQYNKFVKPSFDQYIQPTMRLADIVVPRGSGNTVAIDLIVQHVHSQLEERELSVRAALASAHQCHPLPRTLSVLKSTPQVRGMHTIIRDKETSRDEFIFYSKRLMRLLIEHALSFLPFQDCVVQTPQGQDYAGKCYAGKQITGVSILRAGETMEPALRAVCKDVRIGTILIQTNQLTGEPELHYLRLPKDISDDHVILMDCTVSTGAAAMMAVRVLLDHDVPEDKIFLLSLLMAEMGVHSVAYAFPRVRIITTAVDKRVNDLFRIIPGIGNFGDRYFGTDAVPDGSDEEEVAYTG

SEQ ID NO: 2398 - protein, 438 aa, Homo sapiens
MCKDYVYDKDIEQIAKEEQGEALKLQASTSTEVSHQQCSVPGLGEKFPTWETTKPELELLGHNPRRRRITSSFTIGLRGLINLGNTCFMNCIVQALTHTPILRDFFLSDRHRCEMPSPELCLVCEMSSLFRELYSGNPSPHVPYKLLHLVWIHARHLAGYRQQDAHEFLIAALDVLHRHCKGDDVGKAANNPNHCNCIIDQIFTGGLQSDVTCQACHGVSTTIDPCWDISLDLPGSCTSFWPMSPGRESSVNGESHIPGITTLTDCLRRFTRPEHLGSSAKIKCGSCQSYQESTKQLTMNKLPVVACFHFKRFEHSAKQRRKITTYISFPLELDMTPFMASSKESRMNGQLQLPTNSGNNENKYSLFAVVNHQGTLESGHYTSFIRHHKDQWFKCDDAVITKASIKDVLDSEGYLLFYHKQVLEHESEKVKEMNTQAY

SEQ ID NO: 2399 - protein, 538 aa, Homo sapiens
MALPYHIFLFTVLLPSFTLTAPPPCRCMTSSSPYQEFLWRMQRPGNIDAPSYRSLSKGTPTFTAHTHMPRNCYHSATLCMHANTHYWTGKMINPSCPGGLGVTVCWTYFTQTGMSDGGGVQDQAREKHVKEVISQLTRVHGTSSPYKGLDLSKLHETLRTHTRLVSLFNTTLTGLHEVSAQNPTNCWICLPLNFRPYVSIPVPEQWNNFSTEINTTSVLVGPLVSNLEITHTSNLTCVKFSNTTYTTNSQCIRWVTPPTQIVCLPSGIFFVCGTSAYRCLNGSSESMCFLSFLVPPMTIYTEQDLYSYVISKPRNKRVPILPFVIGAGVLGALGTGIGGITTSTQFYYKLSQELNGDMERVADSLVTLQDQLNSLAAVVLQNRRALDLLTAERGGTCLFLGEECCYYVNQSGIVTEKVKEIRDRIQRRAEELRNTGPWGLLSQWMPWILPFLGPLAAIILLLLFGPCIFNLLVNFVSSRIEAVKLQMEPKMQSKTKIYRRPLDRPASPRSDVNDIKGTPPEEISAAQPLLRPNSAGSS

SEQ ID NO: 2400 - protein, 213 aa, Homo sapiens
MKQALVDDTEDVSLDFGNEEELAFRKAKIRHPLATFFHLFFRVSAIVTYVSCDWFSKSFVGCFVMVLLLLSLDFWSVKNVTGRLLVGLRWWNQIDEDGKSHWIFEARKVSPNSIAATEAEARIFWLGLIICPMIWIVFFFSTLFSLKLKWLALVVAGISLQAANLYGYILCKMGGNSDIGKVTASFLSQTVFQTACPGDFQKPGLEGLEIHQH

SEQ ID NO: 2401 - protein, 188 aa, Homo sapiens
MKQALVDDTEDVSLDFGNEEELAFRKAKIRDRVSKLLASVILLPWPPKVLGLKNVTGRLLVGLRWWNQIDEDGKSHWIFEARKVSPNSIAATEAEARIFWLGLIICPMIWIVFFFSTLFSLKLKWLALVVAGISLQAANLYGYILCKMGGNSDIGKVTASFLSQTVFQTACPGDFQKPGLEGLEIHQH

SEQ ID NO: 2402 - protein, 112 aa, Homo sapiens
METLLKVLSGTLLWQLTWVRSQQPVQSPQAVILREGEDAVINCSSSKALYSVHWYRQKHGEAPVFLMILLKGGEQKGHDKISASFNEKKQQSSLYLTASQLSYSGTYFCGTE

SEQ ID NO: 2403 - protein, 132 aa, Homo sapiens
MKAEGGDHSMINLSVQQVLSLWAHGTVLRNLTEMWYWIFLWALFSSLFVHGAAGVLMFVMLQRHRQGRVISVIAVSIGFLASVTGAMITSAAVAGIYRVAGKNMAPLEALVWGVGQTVLTLIISFSRILATL

SEQ ID NO: 2404 - protein, 113 aa, Homo sapiens
MMKCPQALLAIFWLLLSWVSSEDKVVQSPLSLVVHEGDTVTLNCSYEVTNFRSLLWYKQEKKAPTFLFMLTSSGIEKKSGRLSSILDKKELFSILNITATQTGDSAIYLCAVE

SEQ ID NO: 2405 - protein, 1314 aa, Homo sapiens
MALRPGAGSGGGGAAGAGAGSAGGGGFMFPVAGGIRPPQAGLMPMQQQGFPMVSVMQPNMQGIMGMNYSSQMSQGPIAMQAGIPMGPMPAAGMPYLGQAPFLGMRPPGPQYTPDMQKQFAEEQQKRFEQQQKLLEEERKRRQFEEQKQKLRLLSSVKPKTGEKSRDDALEAIKGNLDGFSRDAKMHPTPASHPKKPGPSLEEKFLVSCDISTSGQEQIKLNTSEVGHKALGPGSSKKYPSLMASNGVAVDGCVSGTTTAEAENTSDQNLSIEESGVGVFPSQDPAQPRMPPWIYNESLVPDAYKKILETTMTPTGIDTAKLYPILMSSGLPRETLGQIWALANRTTPGKLTKEELYTVLAMIAVTQRGVPAMSPDALNQFPAAPIPTLSGFSMTLPTPVSQPTVIPSGPAGSMPLSLGQPVMGINLVGPVGGAAAQASSGFIPTYPANQVVKPEEDDFQDFQDASKSGSLDDSFSDFQELPASSKTSNSQHGNSAPSLLMPLPGTKALPSMDKYAVFKGIAADKSSENTVPPGDPGDKYSAFRELEQTAENKPLGESFAEFRSAGTDDGFTDFKTADSVSPLEPPTKDKTFPPSFPSGTIQQKQQTQVKNPLNLADLDMFSSVNCSSEKPLSFSAVFSTSKSVSTPQSTGSAATMTALAATKTSSLADDFGEFSLFGEYSGLAPVGEQDDFADFMAFSNSSISSEQKPDDKYDALKEEASPVPLTSNVGSTVKGGQNSTAASTKYDVFRQLSLEGSGLGVEDLKDNTPSGKSDDDFADFHSSKFSSINSDKSLGEKAVAFRHTKEDSASVKSLDLPSIGGSSVGKEDSEDALSVQFDMKLADVGGDLKHVMSDSSLDLPTVSGQHPPAADIEDLKYAAFGSYSSNFAVSTLTSYDWSDRDDATQGRKLSPFVLSAGSGSPSATSILQKKETSFGSSENITMTSLSKVTTFVSEDALPETTFPALASFKDTIPQTSEQKEYENRDYKDFTKQDLPTAERSQEATCPSPASSGASQETPNECSDDFGEFQSEKPKISKFDFLVATSQSKMKSSEEMIKSELATFDLSVQGSHKRSLSLGDKEISRSSPSPALEQPFRDRSNTLNEKPALPVIRDKYKDLTGEVEENERYAYEWQRCLGSALNVIKKANDTLNGISSSSVCTEVIQSAQGMEYLLGVVEVYRVTKRVELGIKATAVCSEKLQQLLKDIDKVWNNLIGFMSLATLTPDENSLDFSSCMLRPGIKNAQELACGVCLLNVDSRSRKEEKPAEEHPKKAFNSETDSFKLAYGGHQYHASCANFWINCVEPKPPGLVLPDLL

SEQ ID NO: 2406 - protein, 1236 aa, Homo sapiens
MALRPGAGSGGGGAAGAGAGSAGGGGFMFPVAGGIRPPQAGLMPMQQQGFPMVSVMQPNMQGIMGMNYSSQMSQGPIAMQAGIPMGPMPAAGMPYLGQAPFLGMRPPGPQYTPDMQKQFAEEQQKRFEQQQKLLEEERKRRQFEEQKQKLRLLSSVKPKTGEKSRDDALEAIKGNLDGFSRDAKMHPTPASHPKKPGVGVFPSQDPAQPRMPPWIYNESLVPDAYKKILETTMTPTGIDTAKLYPILMSSGLPRETLGQIWALANRTTPGKLTKEELYTVLAMIAVTQRGVPAMSPDALNQFPAAPIPTLSGFSMTLPTPVSQPTVIPSGPAGSMPLSLGQPVMGINLVGPVGGAAAQASSGFIPTYPANQVVKPEEDDFQDFQDASKSGSLDDSFSDFQELPASSKTSNSQHGNSAPSLLMPLPGTKALPSMDKYAVFKGIAADKSSENTVPPGDPGDKYSAFRELEQTAENKPLGESFAEFRSAGTDDGFTDFKTADSVSPLEPPTKDKTFPPSFPSGTIQQKQQTQVKNPLNLADLDMFSSVNCSSEKPLSFSAVFSTSKSVSTPQSTGSAATMTALAATKTSSLADDFGEFSLFGEYSGLAPVGEQDDFADFMAFSNSSISSEQKPDDKYDALKEEASPVPLTSNVGSTVKGGQNSTAASTKYDVFRQLSLEGSGLGVEDLKDNTPSGKSDDDFADFHSSKFSSINSDKSLGEKAVAFRHTKEDSASVKSLDLPSIGGSSVGKEDSEDALSVQFDMKLADVGGDLKHVMSDSSLDLPTVSGQHPPAADIEDLKYAAFGSYSSNFAVSTLTSYDWSDRDDATQGRKLSPFVLSAGSGSPSATSILQKKETSFGSSENITMTSLSKVTTFVSEDALPETTFPALASFKDTIPQTSEQKEYENRDYKDFTKQDLPTAERSQEATCPSPASSGASQETPNECSDDFGEFQSEKPKISKFDFLVATSQSKMKSSEEMIKSELATFDLSVQGSHKRSLSLGDKEISRSSPSPALEQPFRDRSNTLNEKPALPVIRDKYKDLTGEVEENERYAYEWQRCLGSALNVIKKANDTLNGISSSSVCTEVIQSAQGMEYLLGVVEVYRVTKRVELGIKATAVCSEKLQQLLKDIDKVWNNLIGFMSLATLTPDENSLDFSSCMLRPGIKNAQELACGVCLLNVDSRSRKEEKPAEEHPKKAFNSETDSFKLAYGGHQYHASCANFWINCVEPKPPGLVLPDLL

SEQ ID NO: 2407 - protein, 1224 aa, Homo sapiens
MALRPGAGSGGGGAAGAGAGSAGGGGFMFPVAGGIRPPQAGLMPMQQQGFPMVSVMQPNMQGIMGMNYSSQMSQGPIAMQAGIPMGPMPAAGMPYLGQAPFLGMRPPGPQYTPDMQKQFAEEQQKRFEQQQKLLEEERKRRQFEEQKQKLRLLSSVKPKTGEKSRDDALEAIKGNLDGFSRDAKMHPTPASHPKKPGVGVFPSQDPAQPRMPPWIYNESLVPDAYKKILETTMTPTGIDTAKLYPILMSSGLPRETLGQIWALANRTTPGKLTKEELYTVLAMIAVTQRGVPAMSPDALNQFPAAPIPTLSGFSMTLPTPVSQPTVIPSGPAGSMPLSLGQPVMGINLVGPVGGAAAQASSGFIPTYPANQVVKPEEDDFQDFQDASKSGSLDDSFSDFQELPASSKTSNSQHGNSAPSLLMPLPGTKALPSMDKYAVFKGIAADKSSENTVPPGDPGDKYSAFRELEQTAENKPLGESFAEFRSAGTDDGFTDFKTADSVSPLEPPTKDKTFPPSFPSGTIQQKQQTQVKNPLNLADLDMFSSVNCSSEKPLSFSAVFSTSKSVSTPQSTGSAATMTALAATKTSSLADDFGEFSLFGEYSGLAPVGEQDDFADFMAFSNSSISSEQKPDDKYDALKEEASPVPLTSNVGSTVKGGQNSTAASTKYDVFRQLSLEGSGLGVEDLKDNTPSGKSDDDFADFHSSKFSSINSDKSLGEKAVAFRHTKEDSASVKSLDLPSIGGSSVGKEDSEDALSVQFDMKLADVGGDLKHVMSDSSLDLPTVSGQHPPAADIEDLKYAAFGSYSSNFAVSTLTSYDWSDRDDATQGRKLSPFVLSAGSGSPSATSILQKKETSFGSSENITMTSLSKVTTFVSEDALPETTFPALASFKDTIPQTSEQKEYENRDYKDFTKQDLPTAERSQEATCPSPASSGASQETPNECSDDFGEFQSEKPKISKFDFLVATSQSKMKSSEEMIKSELATFDLSVQGSHKRSLSLGDKEISRSSPSPALEQPFRDRSNTLNEKPALPVIRDKYKDLTGEVEENERYAYEWQRCLGSALNVIKKANDTLNGISSSSVCTEVIQSAQGMEYLLGVVEVYRVTKRVELGIKATAVCSEKLQQLLKDIDKVWNNLIGFMSLATLTPDENSLDFSSCMLRPGIKNAQELACGVCLLNVDSRSRAFNSETDSFKLAYGGHQYHASCANFWINCVEPKPPGLVLPDLL

SEQ ID NO: 2408 - protein, 1302 aa, Homo sapiens
MALRPGAGSGGGGAAGAGAGSAGGGGFMFPVAGGIRPPQAGLMPMQQQGFPMVSVMQPNMQGIMGMNYSSQMSQGPIAMQAGIPMGPMPAAGMPYLGQAPFLGMRPPGPQYTPDMQKQFAEEQQKRFEQQQKLLEEERKRRQFEEQKQKLRLLSSVKPKTGEKSRDDALEAIKGNLDGFSRDAKMHPTPASHPKKPGPSLEEKFLVSCDISTSGQEQIKLNTSEVGHKALGPGSSKKYPSLMASNGVAVDGCVSGTTTAEAENTSDQNLSIEESGVGVFPSQDPAQPRMPPWIYNESLVPDAYKKILETTMTPTGIDTAKLYPILMSSGLPRETLGQIWALANRTTPGKLTKEELYTVLAMIAVTQRGVPAMSPDALNQFPAAPIPTLSGFSMTLPTPVSQPTVIPSGPAGSMPLSLGQPVMGINLVGPVGGAAAQASSGFIPTYPANQVVKPEEDDFQDFQDASKSGSLDDSFSDFQELPASSKTSNSQHGNSAPSLLMPLPGTKALPSMDKYAVFKGIAADKSSENTVPPGDPGDKYSAFRELEQTAENKPLGESFAEFRSAGTDDGFTDFKTADSVSPLEPPTKDKTFPPSFPSGTIQQKQQTQVKNPLNLADLDMFSSVNCSSEKPLSFSAVFSTSKSVSTPQSTGSAATMTALAATKTSSLADDFGEFSLFGEYSGLAPVGEQDDFADFMAFSNSSISSEQKPDDKYDALKEEASPVPLTSNVGSTVKGGQNSTAASTKYDVFRQLSLEGSGLGVEDLKDNTPSGKSDDDFADFHSSKFSSINSDKSLGEKAVAFRHTKEDSASVKSLDLPSIGGSSVGKEDSEDALSVQFDMKLADVGGDLKHVMSDSSLDLPTVSGQHPPAADIEDLKYAAFGSYSSNFAVSTLTSYDWSDRDDATQGRKLSPFVLSAGSGSPSATSILQKKETSFGSSENITMTSLSKVTTFVSEDALPETTFPALASFKDTIPQTSEQKEYENRDYKDFTKQDLPTAERSQEATCPSPASSGASQETPNECSDDFGEFQSEKPKISKFDFLVATSQSKMKSSEEMIKSELATFDLSVQGSHKRSLSLGDKEISRSSPSPALEQPFRDRSNTLNEKPALPVIRDKYKDLTGEVEENERYAYEWQRCLGSALNVIKKANDTLNGISSSSVCTEVIQSAQGMEYLLGVVEVYRVTKRVELGIKATAVCSEKLQQLLKDIDKVWNNLIGFMSLATLTPDENSLDFSSCMLRPGIKNAQELACGVCLLNVDSRSRAFNSETDSFKLAYGGHQYHASCANFWINCVEPKPPGLVLPDLL

SEQ ID NO: 2409 - protein, 1108 aa, Homo sapiens
MALRPGAGSGGGGAAGAGAGSAGGGGFMFPVAGGIRPPQAGLMPMQQQGFPMVSVMQPNMQGIMGMNYSSQMSQGPIAMQAGIPMGPMPAAGMPYLGQAPFLGMRPPGPQYTPDMQKQFAEEQQKRFEQQQKLLEEERKRRQFEEQKQKLRLLSSVKPKTGEKSRDDALEAIKGNLDGFSRDAKMHPTPASHPKKPGVGVFPSQDPAQPRMPPWIYNESLVPDAYKKILETTMTPTGIDTAKLYPILMSSGLPRETLGQIWALANRTTPGKLTKEELYTVLAMIAVTQVVKPEEDDFQDFQDASKSGSLDDSFSDFQELPASSKTSNSQHGNSAPSLLMPLPGTKALPSMDKYAVFKGIAADKSSENTVPPGDPGDKYSAFRELEQTAENKPLGESFAEFRSAGTDDGFTDFKTADSVSPLEPPTKDKTFPPSFPSGTIQQKQQTQVKNPLNLADLDMFSSVNCSSEKPLSFSAVFSTSKSVSTPQSTGSAATMTALAATKTSSLADDFGEFSLFGEYSGLAPVGEQDDFADFMAFSNSSISSEQKPDDKYDALKEEASPVPLTSNVGSTVKGGQNSTAASTKYDVFRQLSLEGSGLGVEDLKDNTPSGKSDDDFADFHSSKFSSINSDKSLGEKAVAFRHTKEDSASVKSLDLPSIGGSSVGKEDSEDALSVQFDMKLADVGGDLKHVMSDSSLDLPTVSGQHPPAAAGSGSPSATSILQKKETSFGSSENITMTSLSKVTTFVSEDALPETTFPALASFKDTIPQTSEQKEYENRDYKDFTKQDLPTAERSQEATCPSPASSGASQETPNECSDDFGEFQSEKPKISKFDFLVATSQSKMKSSEEMIKSELATFDLSVQGSHKRSLSLGDKEISRSSPSPALEQPFRDRSNTLNEKPALPVIRDKYKDLTGEVEENERYAYEWQRCLGSALNVIKKANDTLNGISSSSVCTEVIQSAQGMEYLLGVVEVYRVTKRVELGIKATAVCSEKLQQLLKDIDKVWNNLIGFMSLATLTPDENSLDFSSCMLRPGIKNAQELACGVCLLNVDSRSRKEEKPAEEHPKKAFNSETDSFKLAYGGHQYHASCANFWINCVEPKPPGLVLPDLL

SEQ ID NO: 2410 - protein, 1259 aa, Homo sapiens
MALRPGAGSGGGGAAGAGAGSAGGGGFMFPVAGGIRPPQAGLMPMQQQGFPMVSVMQPNMQGIMGMNYSSQMSQGPIAMQAGIPMGPMPAAGMPYLGQAPFLGMRPPGPQYTPDMQKQFAEEQQKRFEQQQKLLEEERKRRQFEEQKQKLRLLSSVKPKTGEKSRDDALEAIKGNLDGFSRDAKMHPTPASHPKKPGVGVFPSQDPAQPRMPPWIYNESLVPDAYKKILETTMTPTGIDTAKLYPILMSSGLPRETLGQIWALANRTTPGKLTKEELYTVLAMIAVTQRGVPAMSPDALNQFPAAPIPTLSGFSMTLPTPVSQPTVIPSGPAGSMPLSLGQPVMGINLVGPVGGAAAQASSGFIPTYPANQVVKPEEDDFQDFQDASKSGSLDDSFSDFQELPASSKTSNSQHGNSAPSLLMPLPGTKALPSMDKYAVFKGIAADKSSENTVPPGDPGDKYSAFRELEQTAENKPLGESFAEFRSAGTDDGFTDFKTADSVSPLEPPTKDKTFPPSFPSGTIQQKQQTQVKNPLNLADLDMFSSVNCSSEKPLSFSAVFSTSKSVSTPQSTGSAATMTALAATKTSSLADDFGEFSLFGEYSGLAPVGEQDDFADFMAFSNSSISSEQKPDDKYDALKEEASPVPLTSNVGSTVKGGQNSTAASTKYDVFRQLSLEGSGLGVEDLKDNTPSGKSDDDFADFHSSKFSSINSDKSLGEKAVAFRHTKEDSASVKSLDLPSIGGSSVGKEDSEDALSVQFDMKLADVGGDLKHVMSDSSLDLPTVSGQHPPAADIEDLKYAAFGSYSSNFAVSTLTSYDWSDRDDATQGRKLSPFVLSAGSGSPSATSILQKKETSFGSSENITMTSLSKVTTFVSEDALPETTFPALASFKDTIPQTSEQKEYENRDYKDFTKQDLPTAERSQEATCPSPASSGASQETPNECSDDFGEFQSEKPKISKFDFLVATSQSKMKSSEEMIKSELATFDLSVQGSHKRSLSLGDKEISRSSPSPALEQPFRDRSNTLNEKPALPVIRDKYKDLTGEVEENERYAYEWQRCLGSALNVIKKANDTLNGISSSSVCTEVIQSAQGMEYLLGVVEVYRVTKRVELGIKATAVCSEKLQQLLKDIDKVWNNLIGFMSLATLTCCWEKMTVITKHLSPYHELLEEKPDENSLDFSSCMLRPGIKNAQELACGVCLLNVDSRSRKEEKPAEEHPKKAFNSETDSFKLAYGGHQYHASCANFWINCVEPKPPGLVLPDLL

SEQ ID NO: 2411 - protein, 1235 aa, Homo sapiens
MALRPGAGSGGGGAAGAGAGSAGGGGFMFPVAGGIRPPQGLMPMQQQGFPMVSVMQPNMQGIMGMNYSSQMSQGPIAMQAGIPMGPMPAAGMPYLGQAPFLGMRPPGPQYTPDMQKQFAEEQQKRFEQQQKLLEEERKRRQFEEQKQKLRLLSSVKPKTGEKSRDDALEAIKGNLDGFSRDAKMHPTPASHPKKPGVGVFPSQDPAQPRMPPWIYNESLVPDAYKKILETTMTPTGIDTAKLYPILMSSGLPRETLGQIWALANRTTPGKLTKEELYTVLAMIAVTQRGVPAMSPDALNQFPAAPIPTLSGFSMTLPTPVSQPTVIPSGPAGSMPLSLGQPVMGINLVGPVGGAAAQASSGFIPTYPANQVVKPEEDDFQDFQDASKSGSLDDSFSDFQELPASSKTSNSQHGNSAPSLLMPLPGTKALPSMDKYAVFKGIAADKSSENTVPPGDPGDKYSAFRELEQTAENKPLGESFAEFRSAGTDDGFTDFKTADSVSPLEPPTKDKTFPPSFPSGTIQQKQQTQVKNPLNLADLDMFSSVNCSSEKPLSFSAVFSTSKSVSTPQSTGSAATMTALAATKTSSLADDFGEFSLFGEYSGLAPVGEQDDFADFMAFSNSSISSEQKPDDKYDALKEEASPVPLTSNVGSTVKGGQNSTAASTKYDVFRQLSLEGSGLGVEDLKDNTPSGKSDDDFADFHSSKFSSINSDKSLGEKAVAFRHTKEDSASVKSLDLPSIGGSSVGKEDSEDALSVQFDMKLADVGGDLKHVMSDSSLDLPTVSGQHPPAADIEDLKYAAFGSYSSNFAVSTLTSYDWSDRDDATQGRKLSPFVLSAGSGSPSATSILQKKETSFGSSENITMTSLSKVTTFVSEDALPETTFPALASFKDTIPQTSEQKEYENRDYKDFTKQDLPTAERSQEATCPSPASSGASQETPNECSDDFGEFQSEKPKISKFDFLVATSQSKMKSSEEMIKSELATFDLSVQGSHKRSLSLGDKEISRSSPSPALEQPFRDRSNTLNEKPALPVIRDKYKDLTGEVEENERYAYEWQRCLGSALNVIKKANDTLNGISSSSVCTEVIQSAQGMEYLLGVVEVYRVTKRVELGIKATAVCSEKLQQLLKDIDKVWNNLIGFMSLATLTPDENSLDFSSCMLRPGIKNAQELACGVCLLNVDSRSRKEEKPAEEHPKKAFNSETDSFKLAYGGHQYHASCANFWINCVEPKPPGLVLPDLL

SEQ ID NO: 2412 - protein, 1179 aa, Homo sapiens
MALRPGAGSGGGGAAGAGAGSAGGGGFMFPVAGGIRPPQAGLMPMQQQGFPMVSVMQPNMQGIMGMNYSSQMSQGPIAMQAGIPMGPMPAAGMPYLGQAPFLGMRPPGPQYTPDMQKQFAEEQQKRFEQQQKLLEEERKRRQFEEQKQKLRLLSSVKPKTGEKSRDDALEAIKGNLDGFSRDAKMHPTPASHPKKPGVGVFPSQDPAQPRMPPWIYNESLVPDAYKKILETTMTPTGIDTAKLYPILMSSGLPRETLGQIWALANRTTPGKLTKEELYTVLAMIAVTQRGVPAMSPDALNQFPAAPIPTLSGFSMTLPTPVSQPTVIPSGPAGSMPLSLGQPVMGINLVGPVGGAAAQASSGFIPTYPANQVVKPEEDDFQDFQDASKSGSLDDSFSDFQELPASSKTSNSQHGNSAPSLLMPLPGTKALPSMDKYAVFKGIAADKSSENTVPPGDPGDKYSAFRELEQTAENKPLGESFAEFRSAGTDDGFTDFKTADSVSPLEPPTKDKTFPPSFPSGTIQQKQQTQVKNPLNLADLDMFSSVNCSSEKPLSFSAVFSTSKSVSTPQSTGSAATMTALAATKTSSLADDFGEFSLFGEYSGLAPVGEQDDFADFMAFSNSSISSEQKPDDKYDALKEEASPVPLTSNVGSTVKGGQNSTAASTKYDVFRQLSLEGSGLGVEDLKDNTPSGKSDDDFADFHSSKFSSINSDKSLGEKAVAFRHTKEDSASVKSLDLPSIGGSSVGKEDSEDALSVQFDMKLADVGGDLKHVMSDSSLDLPTVSGQHPPAAAGSGSPSATSILQKKETSFGSSENITMTSLSKVTTFVSEDALPETTFPALASFKDTIPQTSEQKEYENRDYKDFTKQDLPTAERSQEATCPSPASSGASQETPNECSDDFGEFQSEKPKISKFDFLVATSQSKMKSSEEMIKSELATFDLSVQGSHKRSLSLGDKEISRSSPSPALEQPFRDRSNTLNEKPALPVIRDKYKDLTGEVEENERYAYEWQRCLGSALNVIKKANDTLNGISSSSVCTEVIQSAQGMEYLLGVVEVYRVTKRVELGIKATAVCSEKLQQLLKDIDKVWNNLIGFMSLATLTPDENSLDFSSCMLRPGIKNAQELACGVCLLNVDSRSRAFNSETDSFKLAYGGHQYHASCANFWINCVEPKPPGLVLPDLL

SEQ ID NO: 2413 - protein, 114 aa, Homo sapiens
MASAPISMLAMLFTLSGLRAQSVAQPEDQVNVAEGNPLTVKCTYSVSGNPYLFWYVQYPNRGLQFLLKYITGDNLVKGSYGFEAEFNKSQTSFHLKKPSALVSDSALYFCAVRD

SEQ ID NO: 2414 - protein, 566 aa, Homo sapiens
MRRQWGSAMRAAEQAGCMVSASRAGQPEAGPWSCSGVILSRSPGLVLCHGGIFVPFLRAGSEVLTAAGAVFLPGDSCRDDLRLHVQWAPTAAGPGGGAERGRPGLCTPQCASLEPGPPAPSRGRPLQPRLPAELLLLLSCPAFWAHFARLFGDEAAEQWRFSSAARDDEVSEDEEADQLRALGWFALLGVRLGQEEVEEERGPAMAVSPLGAVPKGAPLLVCGSPFGAFCPDIFLNTLSCGVLSNVAGPLLLTDARCLPGTEGGGVFTARPAGALVALVVAPLCWKAGEWVGFTLLCAAAPLFRAARDALHRLPHSTAALAALLPPEVGVPWGLPLRDSGPLWAAAAVLVECGTVWGSGVAVAPRLVVTCRHVSPREAARVLVRSTTPKSVAIWGRVVFATQETCPYDIAVVSLEEDLDDVPIPVPAEHFHEGEAVSVVGFGVFGQSCGPSVTSGILSAVVQVNGTPVMLQTTCAVHSGSSGGPLFSNHSGNLLGIITSNTRDNNTGATYPHLNFSIPITVLQPALQQYSQTQDLGGLRELDRAAEPVRVVWRLQRPLAEAPRSKL

SEQ ID NO: 2415 - protein, 398 aa, Homo sapiens
MRRQWGSAMRAAEQAGCMVSASRAGQPEAGPWSCSGVILSRSPGLVLCHGGIFVPFLRAGSEVLTAAGAVFLPGDSCRDDLRLHVQWAPTAAGPGGGAERGRPGLCTPQCASLEPGPPAPSRGRPLQPRLPAELLLLLSCPAFWAHFARLFGDEAAEQWRFSSAARDDEVSEDEEADQLRALGWFALLGVRLGQEEVEEERGPAMAVSPLGAVPKGAPLLVCGSPFGAFCPDIFLNTLSCGVLSNVAGPLLLTDARCLPGTEGGGVFTARPAGALVALVVAPLCWKAGEWVGFTLLCAAAPLFRAARDALHRLPHSTAALAALLPPEVGVPWGLPLRDSGPLWAAAAVLVECGTVWGSGVAVAPRLVVTCRHVSPREAARVLVRSTTPKHNHQQHPGQ

SEQ ID NO: 2416 - protein, 105 aa, Homo sapiens
MNSSLDFLILILMFGGTSSNSVKQTGQITVSEGASVTMNCTYTSTGYPTLFWYVEYPSKPLQLLQRETMENSKNFGGGNIKDKNSPIVKYSVQVSDSAVYYCLLG

SEQ ID NO: 2417 - protein, 112 aa, Homo sapiens
MVKIRQFLLAILWLQLSCVSAAKNEVEQSPQNLTAQEGEFITINCSYSVGISALHWLQQHPGGGIVSLFMLSSGKKKHGRLIATINIQEKHSSLHITASHPRDSAVYICAVR

SEQ ID NO: 2418 - protein, 109 aa, Homo sapiens
MRQVARVIVFLTLSTLSLAKTTQPISMDSYEGQEVNITCSHNNIATNDYITWYQQFPSQGPRFIIQGYKTKVTNEVASLFIPADRKSSTLSLPRVSLSDTAVYYCLVGD

SEQ ID NO: 2419 - protein, 113 aa, Homo sapiens
MKTFAGFSFLFLWLQLDCMSRGEDVEQSLFLSVREGDSSVINCTYTDSSSTYLYWYKQEPGAGLQLLTYIFSNMDMKQDQRLTVLLNKKDKHLSLRIADTQTGDSAIYFCAES

SEQ ID NO: 2420 - protein, 132 aa, Homo sapiens
MAFWLRSLGLHFRPHLGRRMESFLGGVLLILWLQVDWVKSQKIEQNSEALNIQEGKTATLTCNYTNYSPAYLQWYRQDPGRGPVFLLLIRENEKEKRKERLKVTFDTTLKQSLFHITASQPADSATYLCALD

SEQ ID NO: 2421 - protein, 685 aa, Homo sapiens
MQIFVKTLTGKTITLEVEPSDTIENVKAKIQDKEGIPPDQQRLIFAGKQLEDGRTLSDYNIQKESTLHLVLRLRGGMQIFVKTLTGKTITLEVEPSDTIENVKAKIQDKEGIPPDQQRLIFAGKQLEDGRTLSDYNIQKESTLHLVLRLRGGMQIFVKTLTGKTITLEVEPSDTIENVKAKIQDKEGIPPDQQRLIFAGKQLEDGRTLSDYNIQKESTLHLVLRLRGGMQIFVKTLTGKTITLEVEPSDTIENVKAKIQDKEGIPPDQQRLIFAGKQLEDGRTLSDYNIQKESTLHLVLRLRGGMQIFVKTLTGKTITLEVEPSDTIENVKAKIQDKEGIPPDQQRLIFAGKQLEDGRTLSDYNIQKESTLHLVLRLRGGMQIFVKTLTGKTITLEVEPSDTIENVKAKIQDKEGIPPDQQRLIFAGKQLEDGRTLSDYNIQKESTLHLVLRLRGGMQIFVKTLTGKTITLEVEPSDTIENVKAKIQDKEGIPPDQQRLIFAGKQLEDGRTLSDYNIQKESTLHLVLRLRGGMQIFVKTLTGKTITLEVEPSDTIENVKAKIQDKEGIPPDQQRLIFAGKQLEDGRTLSDYNIQKESTLHLVLRLRGGMQIFVKTLTGKTITLEVEPSDTIENVKAKIQDKEGIPPDQQRLIFAGKQLEDGRTLSDYNIQKESTLHLVLRLRGGV

SEQ ID NO: 2422 - protein, 112 aa, Homo sapiens
MEKMRRPVLIIFCLCLGWANGENQVEHSPHFLGPQQGDVASMSCTYSVSRFNNLQWYRQNTGMGPKHLLSMYSAGYEKQKGRLNATLLKNGSSLYITAVQPEDSATYFCAVD

SEQ ID NO: 2423 - protein, 113 aa, Homo sapiens
MLLLLIPVLGMIFALRDARAQSVSQHNHHVILSEAASLELGCNYSYGGTVNLFWYVQYPGQHLQLLLKYFSGDPLVKGIKGFEAEFIKSKFSFNLRKPSVQWSDTAEYFCAVN

SEQ ID NO: 2424 - protein, 315 aa, Homo sapiens
MAGQHLPVPRLEGVSREQFMQHLYPQRKPLVLEGIDLGPCTSKWTVDYLSQVGGKKEVKIHVAAVAQMDFISKNFVYRTLPFDQLVQRAAEEKHKEFFVSEDEKYYLRSLGEDPRKDVADIRKQFPLLKGDIKFPEFFKEEQFFSSVFRISSPGLQLWTHYDVMDNLLIQVTGKKRVVLFSPRDAQYLYLKGTKSEVLNIDNPDLAKYPLFSKARRYECSLEAGDVLFIPALWFHNVISEEFGVGVNIFWKHLPSECYDKTDTYGNKDPTAASRAAQILDRALKTLAELPEEYRDFYARRMVLHIQDKAYSKNSE

SEQ ID NO: 2425 - protein, 152 aa, Homo sapiens
MDNLLIQVTGKKRVVLFSPRDAQYLYLKGTKSEVLNIDNPDLAKYPLFSKARRYECSLEAGDVLFIPALWFHNVISEEFGVGVNIFWKHLPSECYDKTDTYGNKDPTAASRAAQILDRALKTLAELPEEYRDFYARRMVLHIQDKAYSKNSE

SEQ ID NO: 2426 - protein, 113 aa, Homo sapiens
MLLLLVPVLEVIFTLGGTRAQSVTQLDSHVSVSEGTPVLLRCNYSSSYSPSLFWYVQHPNKGLQLLLKYTSAATLVKGINGFEAEFKKSETSFHLTKPSAHMSDAAEYFCVVS

SEQ ID NO: 2427 - protein, 113 aa, Homo sapiens
MLLELIPLLGIHFVLRTARAQSVTQPDIHITVSEGASLELRCNYSYGATPYLFWYVQSPGQGLQLLLKYFSGDTLVQGIKGFEAEFKRSQSSFNLRKPSVHWSDAAEYFCAVG

SEQ ID NO: 2428 - protein, 113 aa, Homo sapiens
MLLLLVPVLEVIFTLGGTRAQSVTQLGSHVSVSEGALVLLRCNYSSSVPPYLFWYVQYPNQGLQLLLKYTSAATLVKGINGFEAEFKKSETSFHLTKPSAHMSDAAEYFCAVS

SEQ ID NO: 2429 - protein, 113 aa, Homo sapiens
MLLLLVPAFQVIFTLGGTRAQSVTQLDSQVPVFEEAPVELRCNYSSSVSVYLFWYVQYPNQGLQLLLKYLSGSTLVESINGFEAEFNKSQTSFHLRKPSVHISDTAEYFCAVS

SEQ ID NO: 2430 - protein, 414 aa, Homo sapiens
MASGDTLYIATDGSEMPAEIVELHEIEVETIPVETIETTVVGEEEEEDDDDEDGGGGDHGGGGGHGHAGHHHHHHHHHHHPPMIALQPLVTDDPTQVHHHQEVILVQTREEVVGGDDSDGLRAEDGFEDQILIPVPAPAGGDDDYIEQTLVTVAAAGKSGGGGSSSSGGGRVKKGGGKKSGKKSYLSGGAGAAGGGGADPGNKKWEQKQVQIKTLEGEFSVTMWSSDEKKDIDHETVVEEQIIGENSPPDYSEYMTGKKLPPGGIPGIDLSDPKQLAEFARMKPRKIKEDDAPRTIACPHKGCTKMFRDNSAMRKHLHTHGPRVHVCAECGKAFVESSKLKRHQLVHTGEKPFQCTFEGCGKRFSLDFNLRTHVRIHTGDRPYVCPFDGCNKKFAQSTNLKSHILTHAKAKNNQ

SEQ ID NO: 2431 - protein, 112 aa, Homo sapiens
MNSSPGPAIALFLMFGGINGDSVVQTEGQVLPSEGDSLIVNCSYETTQYPSLFWYVQYPGEGPQLHLKAMKANDKGRNKGFEAMYRKETTSFHLEKDSVQESDSAVYFCALS

SEQ ID NO: 2432 - protein, 112 aa, Homo sapiens
MNYSPGLVSLILLLLGRTRGDSVTQMEGPVTLSEEAFLTINCTYTATGYPSLFWYVQYPGEGLQLLLKATKADDKGSNKGFEATYRKETTSFHLEKGSVQVSDSAVYFCALS

SEQ ID NO: 2433 - protein, 165 aa, Homo sapiens
MAPNASCLCVHVRSEEWDLMTFDANPYDSVKKIKEHVRSKTKVPVQDQVLLLGSKILKPRRSLSSYGIDKEKTIHLTLKVVKPSDEELPLFLVESGDEAKRHLLQVRRSSSVAQVKAMIETKTGIIPETQIVTCNGKRLEDGKMMADYGIRKGNLLFLACYCIGG

SEQ ID NO: 2434 - protein, 112 aa, Homo sapiens
MISLRVLLVILWLQLSWVWSQRKEVEQDPGPFNVPEGATVAFNCTYSNSASQSFFWYRQDCRKEPKLLMSVYSSGNEDGRFTAQLNRASQYISLLIRDSKLSDSATYLCVVN

SEQ ID NO: 2435 - protein, 113 aa, Homo sapiens
MKSLRVLLVILWLQLSWVWSQQKEVEQNSGPLSVPEGAIASLNCTYSDRGSQSFFWYRQYSGKSPELIMFIYSNGDKEDGRFTAQLNKASQYVSLLIRDSQPSDSATYLCAVN

SEQ ID NO: 2436 - protein, 372 aa, Homo sapiens
MASNEDFSITQDLEIPADIVELHDINVEPLPMEDIPTESVQYEDVDGNWIYGGHNHPPLMVLQPLFTNTGYGDHDQEMLMLQTQEEVVGYCDSDNQLGNDLEDQLALPDSIEDEHFQMTLASLSASAASTSTSTQSRSKKPSKKPSGKSATSTEANPAGSSSSLGTRKWEQKQMQVKTLEGEFSVTMWSPNDNNDQGAVGEGQAENPPDYSEYLKGKKLPPGGLPGIDLSDPKQLAEFTKVKPKRSKGEPPKTVPCSYSGCEKMFRDYAAMRKHLHIHGPRVHVCAECGKAFLESSKLRRHQLVHTGEKPFQCTFEGCGKRFSLDFNLRTHLRIHTGDKPFVCPFDVCNRKFAQSTNLKTHILTHVKTKNNP

SEQ ID NO: 2437 - protein, 114 aa, Homo sapiens
MMKSLRVLLVILWLQLSWVWSQQKEVEQDPGPLSVPEGAIVSLNCTYSNSAFQYFMWYRQYSRKGPELLMYTYSSGNKEDGRFTAQVDKSSKYISLFIRDSQPSDSATYLCAMS

SEQ ID NO: 2438 - protein, 112 aa, Homo sapiens
MTSIRAVFIFLWLQLDLVNGENVEQHPSTLSVQEGDSAVIKCTYSDSASNYFPWYKQELGKGPQLIIDIRSNVGEKKDQRIAVTLNKTAKHFSLHITETQPEDSAVYFCAAS

SEQ ID NO: 2439 - protein, 113 aa, Homo sapiens
MAGIRALFMYLWLQLDWVSRGESVGLHLPTLSVQEGDNSIINCAYSNSASDYFIWYKQESGKGPQFIIDIRSNMDKRQGQRVTVLLNKTVKHLSLQIAATQPGDSAVYFCAEN

SEQ ID NO: 2440 - protein, 109 aa, Homo sapiens
MRLVARVTVFLTFGTIIDAKTTQPTSMDCAEGRAANLPCNHSTISGNEYVYWYRQIHSQGPQYIIHGLKNNETNEMASLIITEDRKSSTLILPHATLRDTAVYYCIVRV

SEQ ID NO: 2441 - protein, 109 aa, Homo sapiens
MKLVTSITVLLSLGIMGDAKTTQPNSMESNEEEPVHLPCNHSTISGTDYIHWYRQLPSQGPEYVIHGLTSNVNNRMASLAIAEDRKSSTLILHRATLRDAAVYYCILRD

SEQ ID NO: 2442 - protein, 152 aa, Homo sapiens
MSTPARRRLMRDFKRLQEDPPAGVSGAPSENNIMVWNAVIFGPEGTPFEDGTFKLTIEFTEEYPNKPPTVRFVSKMFHPNVYADGSICLDILQNRWSPTYDVSSILTSIQSLLDEPNPNSPANSQAAQLYQENKREYEKRVSAIVEQSWRDC

SEQ ID NO: 2443 - protein, 122 aa, Homo sapiens
MSTPARRRLMRDFKRLQEDPPAGVSGAPSENNIMVWNAVIFGPEGTPFEDVYADGSICLDILQNRWSPTYDVSSILTSIQSLLDEPNPNSPANSQAAQLYQENKREYEKRVSAIVEQSWRDC

SEQ ID NO: 2444 - protein, 77 aa, Homo sapiens
MFHPNVYADGSICLDILQNRWSPTYDVSSILTSIQSLLDEPNPNSPANSQAAQLYQENKREYEKRVSAIVEQSWRDC

SEQ ID NO: 2445 - protein, 124 aa, Homo sapiens
MLSPDLPDSAWNTRLLCRVMLCLLGAGSVAAGVIQSPRHLIKEKRETATLKCYPIPRHDTVYWYQQGPGQDPQFLISFYEKMQSDKGSIPDRFSAQQFSDYHSELNMSSLELGDSALYFCASSL

SEQ ID NO: 2446 - protein, 688 aa, Homo sapiens
MDGSFVQHSVRVLQELNKQREKGQYCDATLDVGGLVFKAHWSVLACCSHFFQSLYGDGSGGSVVLPAGFAEIFGLLLDFFYTGHLALTSGNRDQVLLAARELRVPEAVELCQSFKPKTSVGQAAGGQSGLGPPASQNVNSHVKEPAGLEEEEVSRTLGLVPRDQEPRGSHSPQRPQLHSPAQSEGPSSLCGKLKQALKPCPLEDKKPEDCKVPPRPLEAEGAQLQGGSNEWEVVVQVEDDGDGDYMSEPEAVLTRRKSNVIRKPCAAEPALSAGSLAAEPAENRKGTAVPVECPTCHKKFLSKYYLKVHNRKHTGEKPFECPKCGKCYFRKENLLEHEARNCMNRSEQVFTCSVCQETFRRRMELRVHMVSHTGEMPYKCSSCSQQFMQKKDLQSHMIKLHGAPKPHACPTCAKCFLSRTELQLHEAFKHRGEKLFVCEECGHRASSRNGLQMHIKAKHRNERPHVCEFCSHAFTQKANLNMHLRTHTGEKPFQCHLCGKTFRTQASLDKHNRTHTGERPFSCEFCEQRFTEKGPLLRHVASRHQEGRPHFCQICGKTFKAVEQLRVHVRRHKGVRKFECTECGYKFTRQAHLRRHMEIHDRVENYNPRQRKLRNLIIEDEKMVVVALQPPAELEVGSAEVIVESLAQGGLASQLPGQRLCAEESFTGPGVLEPSLIITAAVPEDCDT

SEQ ID NO: 2447 - protein, 115 aa, Homo sapiens
MVSRLLSLVSLCLLGAKHIEAGVTQFPSHSVIEKGQTVTLRCDPISGHDNLYWYRRVMGKEIKFLLHFVKESKQDESGMPNNRFLAERTGGTYSTLKVQPAELEDSGVYFCASSQ

SEQ ID NO: 2448 - protein, 115 aa, Homo sapiens
MSPIFTCITILCLLAAGSPGEEVAQTPKHLVRGEGQKAKLYCAPIKGHSYVFWYQQVLKNEFKFLISFQNENVFDETGMPKERFSAKCLPNSPCSLEIQATKLEDSAVYFCASSQ

SEQ ID NO: 2449 - protein, 152 aa, Homo sapiens
MSTPARRRLMRDFKRLQEDPPVGVSGAPSENNIMQWNAVIFGPEGTPFEDGTFKLVIEFSEEYPNKPPTVRFLSKMFHPNVYADGSICLDILQNRWSPTYDVSSILTSIQSLLDEPNPNSPANSQAAQLYQENKREYEKRVSAIVEQSWNDS

SEQ ID NO: 2450 - protein, 114 aa, Homo sapiens
MDIWLLCWVTLCLLAAGHSEPGVSQTPRHKVTNMGQEVILRCDPSSGHMFVHWYRQNLRQEMKLLISFQYQNIAVDSGMPKERFTAERPNGTSSTLKIHPAEPRDSAVYLYSSG

SEQ ID NO: 2451 - protein, 115 aa, Homo sapiens
MDTRLLCCAVICLLGAGLSNAGVMQNPRHLVRRRGQEARLRCSPMKGHSHVYWYRQLPEEGLKFMVYLQKENIIDESGMPKERFSAEFPKEGPSILRIQQVVRGDSAAYFCASSP

SEQ ID NO: 2452 - protein, 114 aa, Homo sapiens
MSNQVLCCVVLCLLGANTVDGGITQSPKYLFRKEGQNVTLSCEQNLNHDAMYWYRQDPGQGLRLIYYSQIVNDFQKGDIAEGYSVSREKKESFPLTVTSAQKNPTAFYLCASSI

SEQ ID NO: 2453 - protein, 115 aa, Homo sapiens
MGTRLLGCAALCLLAADSFHAKVTQTPGHLVKGKGQKTKMDCTPEKGHTFVYWYQQNQNKEFMLLISFQNEQVLQETEMHKKRFSSQCPKNAPCSLAILSSEPGDTALYLCASSQ

SEQ ID NO: 2454 - protein, 114 aa, Homo sapiens
MGPQLLGYVVLCLLGAGPLEAQVTQNPRYLITVTGKKLTVTCSQNMNHEYMSWYRQDPGLGLRQIYYSMNVEVTDKGDVPEGYKVSRKEKRNFPLILESPSPNQTSLYFCASSL

SEQ ID NO: 2455 - protein, 114 aa, Homo sapiens
MGIRLLCRVAFCFLAVGLVDVKVTQSSRYLVKRTGEKVFLECVQDMDHENMFWYRQDPGLGLRLIYFSYDVKMKEKGDIPEGYSVSREKKERFSLILESASTNQTSMYLCASSL

SEQ ID NO: 2456 - protein, 179 aa, Homo sapiens
MASQNRDPAATSVAAARKGAEPSGGAARGPVGKRLQQELMTLMMSGDKGISAFPESDNLFKWVGTIHGAAGTVYEDLRYKLSLEFPSGYPYNAPTVKFLTPCYHPNVDTQGNICLDILKEKWSALYDVRTILLSIQSLLGEPNIDSPLNTHAAELWKNPTAFKKYLQETYSKQVTSQEP

SEQ ID NO: 2457 - protein, 140 aa, Homo sapiens
MTLMMSGDKGISAFPESDNLFKWVGTIHGAAGTVYEDLRYKLSLEFPSGYPYNAPTVKFLTPCYHPNVDTQGNICLDILKEKWSALYDVRTILLSIQSLLGEPNIDSPLNTHAAELWKNPTAFKKYLQETYSKQVTSQEP

SEQ ID NO: 2458 - protein, 150 aa, Homo sapiens
MASQNRDPAATSVAAARKGAEPSGGAARGPVGKRLQQELMTLMVYEDLRYKLSLEFPSGYPYNAPTVKFLTPCYHPNVDTQGNICLDILKEKWSALYDVRTILLSIQSLLGEPNIDSPLNTHAAELWKNPTAFKKYLQETYSKQVTSQEP

SEQ ID NO: 2459 - protein, 161 aa, Homo sapiens
MASQNRDPAATSVAAARKGAEPSGGAARGPVGKRLQQELMTLMMSGDKGISAFPESDNLFKWVGTIHGAAGTAVGSIRTSSTVCLLSGPRETQDSSKPLVWGLGWDMRLLLELTLQLFLQMPEPNIDSPLNTHAAELWKNPTAFKKYLQETYSKQVTSQEP

SEQ ID NO: 2460 - protein, 111 aa, Homo sapiens
MLSLLLLLLGLGSVFSAVISQKPSRDICQRGTSLTIQCQVDSQVTMMFWYRQQPGQSLTLIATANQGSEATYESGFVIDKFPISRPNLTFSTLTVSNMSPEDSSIYLCSVE

SEQ ID NO: 2461 - protein, 115 aa, Homo sapiens
MDTWLVCWAIFSLLKAGLTEPEVTQTPSHQVTQMGQEVILRCVPISNHLYFYWYRQILGQKVEFLVSFYNNEISEKSEIFDDQFSVERPDGSNFTLKIRSTKLEDSAMYFCASSE

SEQ ID NO: 2462 - protein, 111 aa, Homo sapiens
MLCSLLALLLGTFFGVRSQTIHQWPATLVQPVGSPLSLECTVEGTSNPNLYWYRQAAGRGLQLLFYSVGIGQISSEVPQNLSASRPQDRQFILSSKKLLLSDSGFYLCAWS

SEQ ID NO: 2463 - protein, 114 aa, Homo sapiens
MGCRLLCCVVFCLLQAGPLDTAVSQTPKYLVTQMGNDKSIKCEQNLGHDTMYWYKQDSKKFLKIMFSYNNKELIINETVPNRFSPKSPDKAHLNLHINSLELGDSAVYFCASSQ

SEQ ID NO: 2464 - protein, 240 aa, Homo sapiens
MKVKKGGGGAGTATESAPGPSGQSVAPIPQPPAESESGSESEPDAGPGPRPGPLQRKQPIGPEDVLGLQRITGDYLCSPEENIYKIDFVRFKIRDMDSGTVLFEIKKPPVSERLPINRRDLDPNAGRFVRYQFTPAFLRLRQVGATVEFTVGDKPVNNFRMIERHYFRNQLLKSFDFHFGFCIPSSKNTCEHIYDFPPLSEELISEMIRHPYETQSDSFYFVDDRLVMHNKADYSYSGTP

SEQ ID NO: 2465 - protein, 220 aa, Homo sapiens
MKVKKGGGGAGTATESAPGPSGQSVAPIPQPPAESESGSESEPDAGPGPRPGPLQRKQPIGPEDVLGLQRITGDYLCSPEENIYKIDFVRFKIRDMDSGTVLFEIKKPPVSERLPINRRDLDPNAGRFVRYQFTPAFLRLRQVGATVEFTVGDKPVNNFRMIERHYFRNQLLKSFDFHFGFCIPSSKNTCEHIYDFPPLSEELSARAGSSGSGEVGASRD

SEQ ID NO: 2466 - protein, 114 aa, Homo sapiens
MGCRLLCCAVLCLLGAVPIDTEVTQTPKHLVMGMTNKKSLKCEQHMGHRAMYWYKQKAKKPPELMFVYSYEKLSINESVPSRFSPECPNSSLLNLHLHALQPEDSALYLCASSQ

SEQ ID NO: 2467 - protein, 185 aa, Homo sapiens
MLTLASKLKRDDGLKGSRTAATASDSTRRVSVRDKLLVKEVAELEANLPCTCKVHFPDPNKLHCFQLTVTPDEGYYQGGKFQFETEVPDAYNMVPPKVKCLTKIWHPNITETGEICLSLLREHSIDGTGWAPTRTLKDVVWGLNSLFTDLLNFDDPLNIEAAEHHLRDKEDFRNKVDDYIKRYAR

SEQ ID NO: 2468 - protein, 211 aa, Homo sapiens
MLTLASKLKRDDGLKGSRTAATASDSTRRVSVRDKLLVKEVAELEANLPCTCKVHFPDPNKLHCFQLTVTPDEGYYQGGKFQFETEVPDAYNMVPPKVKCLTKIWHPNITETGEICLSLLREHSIDGTGWAPTRTLKDVVWGLNSLFTDLLNFDDPLNIEAAEHHLRDKSPMLLLHRRTSGIKWMTTSNVMPDNKRGRLQAHGLCYSLSLT

SEQ ID NO: 2469 - protein, 153 aa, Homo sapiens
MLTLASKLKRDDGLKGSRTAATASDSTRRVSVRDKLLVKDEGYYQGGKFQFETEVPDAYNMVPPKVKCLTKIWHPNITETGEICLSLLREHSIDGTGWAPTRTLKDVVWGLNSLFTDLLNFDDPLNIEAAEHHLRDKEDFRNKVDDYIKRYAR

SEQ ID NO: 2470 - protein, 120 aa, Homo sapiens
MLTLASKLKRDDGLKGSRTAATASDSTRRVSVRDKLLVKEVAELEANLPCTCKVHFPDPNKLHCFQLTVTPDEGYYQGGKFQFETEVPDAYNMVPPKVKCLTKIWHPNITETGEICLRIF

SEQ ID NO: 2471 - protein, 102 aa, Homo sapiens
MLTLASKLKRDDGLKGSRTAATASDSTRRVSVRDKLLVKEVAELEANLPCTCKVHFPDPNKLHCFQLTVTPASQSEMPDQDLAPQHHRDRGNMSEFIERTFN

SEQ ID NO: 2472 - protein, 164 aa, Homo sapiens
MLTLASKLKRDDGLKGSRTAATASDSTRRVSVRDKLLVKEVAELEANLPCTCKVHFPDPNKLHCFQLTVTPDEGYYQGGKFQFETEVPDAYNMVPPKVKCLTKIWHPNITETGEICLSLLREHSIDGTGWAPTRTLKDVVWGLNSLFTEDFRNKVDDYIKRYAR

SEQ ID NO: 2473 - protein, 161 aa, Homo sapiens
MVLGAGPASPVSGSPEVAELEANLPCTCKVHFPDPNKLHCFQLTVTPDEGYYQGGKFQFETEVPDAYNMVPPKVKCLTKIWHPNITETGEICLSLLREHSIDGTGWAPTRTLKDVVWGLNSLFTDLLNFDDPLNIEAAEHHLRDKEDFRNKVDDYIKRYAR

SEQ ID NO: 2474 - protein, 114 aa, Homo sapiens
MGCRLLCCAVLCLLGAVPMETGVTQTPRHLVMGMTNKKSLKCEQHLGHNAMYWYKQSAKKPLELMFVYNFKEQTENNSVPSRFSPECPNSSHLFLHLHTLQPEDSALYLCASSQ

SEQ ID NO: 2475 - protein, 114 aa, Homo sapiens
MGCRLLCCAVLCLLGAVPMETGVTQTPRHLVMGMTNKKSLKCEQHLGHNAMYWYKQSAKKPLELMFVYSLEERVENNSVPSRFSPECPNSSHLFLHLHTLQPEDSALYLCASSQ

SEQ ID NO: 2476 - protein, 114 aa, Homo sapiens
MGSRLLCWVLLCLLGAGPVKAGVTQTPRYLIKTRGQQVTLSCSPISGHRSVSWYQQTPGQGLQFLFEYFSETQRNKGNFPGRFSGRQFSNSRSEMNVSTLELGDSALYLCASSL

SEQ ID NO: 2477 - protein, 114 aa, Homo sapiens
MGPGLLCWELLYLLGAGPVEAGVTQSPTHLIKTRGQQVTLRCSPISGHSSVSWYQQAPGQGPQFIFEYANELRRSEGNFPNRFSGRQFHDYCSEMNVSALELGDSALYLCARSL

SEQ ID NO: 2478 - protein, 183 aa, Homo sapiens
MSSPSPGKRRMDTDVVKLIESKHEVTILGGLNEFVVKFYGPQGTPYEGGVWKVRVDLPDKYPFKSPSIGFMNKIFHPNIDEASGTVCLDVINQTWTALYDLTNIFESFLPQLLAYPNPIDPLNGDAAAMYLHRPEEYKQKIKEYIQKYATEEALKEQEEGTGDSSSESSMSDFSEDEAQDMEL

SEQ ID NO: 2479 - protein, 152 aa, Homo sapiens
MSSPSPGKRRMDTDVVKLIESKHEVTILGGLNEFVVKFYGPQGTPYEGGVWKVRVDLPDKYPFKSPSIDLTNIFESFLPQLLAYPNPIDPLNGDAAAMYLHRPEEYKQKIKEYIQKYATEEALKEQEEGTGDSSSESSMSDFSEDEAQDMEL

SEQ ID NO: 2480 - protein, 251 aa, Homo sapiens
MSGSNPKAAAAASAAGPGGLVAGKEEKKKAGGGVLNRLKARRQAPHHAADDGVGAAVTEQELLALDTIRPEHVLRLSRVTENYLCKPEDNIYSIDFTRFKIRDLETGTVLFEIAKPCVSDQEEDEEEGGGDVDISAGRFVRYQFTPAFLRLRTVGATVEFTVGDKPVSNFRMIERHYFREHLLKNFDFDFGFCIPSSRNTCEHIYEFPQLSEDVIRLMIENPYETRSDSFYFVDNKLIMHNKADYAYNGGQ

SEQ ID NO: 2481 - protein, 114 aa, Homo sapiens
MGPGLLCWALLCLLGAGSVETGVTQSPTHLIKTRGQQVTLRCSSQSGHNTVSWYQQALGQGPQFIFQYYREEENGRGNFPPRFSGLQFPNYSSELNVNALELDDSALYLCASSL

SEQ ID NO: 2482 - protein, 114 aa, Homo sapiens
MGPGLLCWVLLCLLGAGPVDAGVTQSPTHLIKTRGQQVTLRCSPISGHKSVSWYQQVLGQGPQFIFQYYEKEERGRGNFPDRFSARQFPNYSSELNVNALLLGDSALYLCASSL

SEQ ID NO: 2483 - protein, 114 aa, Homo sapiens
MGPGLLCWALLCLLGAGLVDAGVTQSPTHLIKTRGQQVTLRCSPKSGHDTVSWYQQALGQGPQFIFQYYEEEERQRGNFPDRFSGHQFPNYSSELNVNALLLGDSALYLCASSL

SEQ ID NO: 2484 - protein, 114 aa, Homo sapiens
MGPGLLCWVLLCPLGEGPVDAGVTQSPTHLIKTRGQHVTLRCSPISGHTSVSSYQQALGQGPQFIFQYYEKEERGRGNFPDQFSGHQFPNYSSELNVNALLLGDSALYLCASSL

SEQ ID NO: 2485 - protein, 200 aa, Homo sapiens
MANIAVQRIKREFKEVLKSEETSKNQIKVDLVDENFTELRGEIAGPPDTPYEGGRYQLEIKIPETYPFNPPKVRFITKIWHPNISSVTGAICLDILKDQWAAAMTLRTVLLSLQALLAAAEPDDPQDAVVANQYKQNPEMFKQTARLWAHVYAGAPVSSPEYTKKIENLCAMGFDRNAVIVALSSKSWDVETATELLLSN

SEQ ID NO: 2486 - protein, 149 aa, Homo sapiens
MANIAVQRIKREFKEVLKSEEVRFITKIWHPNISSVTGAICLDILKDQWAAAMTLRTVLLSLQALLAAAEPDDPQDAVVANQYKQNPEMFKQTARLWAHVYAGAPVSSPEYTKKIENLCAMGFDRNAVIVALSSKSWDVETATELLLSN

SEQ ID NO: 2487 - protein, 157 aa, Homo sapiens
MANIAVQRIKREFKEVLKSEETSKNQIKVDLVDENFTELRGEIAGPPDTPYEGGRYQLEIKIPETYPFNPPKVRFITKIWHPNISSVTGAICLDILKDQWAAAMTLRTVLLSLQALLAAAEPDDPQDAVVANQNAVIVALSSKSWDVETATELLLSN

SEQ ID NO: 2488 - protein, 114 aa, Homo sapiens
MGPRLLFWALLCLLGTGPVEAGVTQSPTHLIKTRGQQATLRCSPISGHTSVYWYQQALGLGLQFLLWYDEGEERNRGNFPPRFSGRQFPNYSSELNVNALELEDSALYLCASSL

SEQ ID NO: 2489 - protein, 114 aa, Homo sapiens
MSIGLLCCVAFSLLWASPVNAGVTQTPKFQVLKTGQSMTLQCAQDMNHNSMYWYRQDPGMGLRLIYYSASEGTTDKGEVPNGYNVSRLNKREFSLRLESAAPSQTSVYFCASSE

SEQ ID NO: 2490 - protein, 114 aa, Homo sapiens
MSLGLLCCGAFSLLWAGPVNAGVTQTPKFRVLKTGQSMTLLCAQDMNHEYMYWYRQDPGMGLRLIHYSVGEGTTAKGEVPDGYNVSRLKKQNFLLGLESAAPSQTSVYFCASSY

SEQ ID NO: 2491 - protein, 114 aa, Homo sapiens; identical to SEQ ID NO: 2490

SEQ ID NO: 2492 - protein, 530 aa, Homo sapiens
MGDDSLYLGGEWQFNHFSKLTSSRPDAAFAEIQRTSLPEKSPLSSETRVDLCDDLAPVARQLAPREKLPLSSRRPAAVGAGLQNMGNTCYENASLQCLTYTLPLANYMLSREHSQTCQRPKCCMLCTMQAHITWALHSPGHVIQPSQALAAGFHRGKQEDVHEFLMFTVDAMKKACLPGHKQVDHHCKDTTLIHQIFGGCWRSQIKCLHCHGISDTFDPYLDIALDIQAAQSVKQALEQLVKPEELNGENAYHCGLCLQRAPASNTLTLHTSAKVLILVLKRFSDVAGNKLAKNVQYPECLDMQPYMSQQNTGPLVYVLYAVLVHAGWSCHDGHYFSYVKAQEVQWYKMDDAEVTVCSIISVLSQQAYVLFYIQKSEWERHSESVSRGREPRALGAEDTDRRAKQGELKRDHPCLQAPELDEHLVERATQESTLDHWKFLQEQNKTKPEFNVGKVEGTLPPNALVIHQSKYKCGMKNHHPEQQSSLLNLSSTTRTDQESMNTGTLASLQGRTRRAKGKNKHSKRALLVCQ

SEQ ID NO: 2493 - protein, 114 aa, Homo sapiens
MSIRLLCCVAFSLLWAGPVTAGITQAPTSQILAAGRSMTLRCTQDMRHNAMYWYRQDLGLGLRLIHYSNTAGTTGKGEVPDGYSVSRANTDDFPLTLASAVPSQTSVYFCASSD

SEQ ID NO: 2494 - protein, 114 aa, Homo sapiens
MSIGLLCCAALSLLWAGPVNAGVTQTPKFQVLKTGQSMTLQCAQDMNHEYMSWYRQDPGMGLRLIHYSVGAGITDQGEVPNGYNVSRSTTEDFPLRLLSAAPSQTSVYFCASSY

SEQ ID NO: 2495 - protein, 530 aa, Homo sapiens
MEDDSLYLGGEWQFNHFSKLTSSRPDAAFAEIQRTSLPEKSPLSSEARVDLCDDLAPVARQLAPRKKLPLSSRRPAAVGAGLQNMGNTCYENASLQCLTYTPPLANYMLSREHSQTCQRPKCCMLCTMQAHITWALHSPGHVIQPSQALAAGFHRGKQEDAHEFLMFTVDAMKKACLPGHKQVDHHSKDTTLIHQIFGGCWRSQIKCLHCHGISDTFDPYLDIALDIQAAQSVKQALEQLVKPEELNGENAYHCGLCLQRAPASKTLTLHTSAKVLILVLKRFSDVTGNKLAKNVQYPECLDMQPYMSQQNTGPLVYVLYAVLVHAGWSCHDGHYFSYVKAQEGQWYKMDDAKVTACSITSVLSQQAYVLFYIQKSEWERHSESVSRGREPRALGAEDTDRRATQGELKRDHPCLQAPELDERLVERATQESTLDHWKFPQEQNKTKPEFNVRKVEGTLPPNVLVIHQSKYKCGMKNHHPEQQSSLLNLSSTTRTDQESVNTGTLASLQGRTRRSKGKNKHSKRALLVCQ

SEQ ID NO: 2496 - protein, 114 aa, Homo sapiens
MSISLLCCAAFPLLWAGPVNAGVTQTPKFRILKIGQSMTLQCAQDMNHNYMYWYRQDPGMGLKLIYYSVGAGITDKGEVPNGYNVSRSTTEDFPLRLELAAPSQTSVYFCASSY

SEQ ID NO: 2497 - protein, 530 aa, Homo sapiens
MGDDSLYLGGEWQFNHFSKLTSSRPDAAFAEIQRTSLPEKSPLSSETRVDLCDDLAPVARQLAPREKLPLSSRRPAAVGAGLQNMGNTCYENASLQCLTYTLPLANYMLSREHSQTCQRPKCCMLCTMQAHITWALHSPGHVIQPSQALASGFHRGKQEDVHEFLMFTVDAMKKACLPGHKQVDHHSKDTTLIHQIFGGCWRSQIKCLHCHGISDTFDPYLDIALDIQAAQSVKQALEQLVKPEELNGENAYHCGLCLQRAPASNTLTLHTSAKVLILVLKRFSDVAGNKLAKNVQYPECLDMQPYMSQQNTGPLVYVLYAVLVHAGWSCHDGHYFSYVKAQEGQWYKMDDAEVTVCSITSVLSQQAYVLFYIQKSEWERHSESVSRGREPRALGAEDTDRRAKQGELKRDHPCLQAPELDEHLVERATQESTLDHWKFLQEQNKTKPEFNVGKVEGTLPPNALVIHQSKYKCGMKNHHPEQQSSLLNLSSTTRTDQESMNTGTLASLQGRTRRAKGKNKHSKRALLVCQ

SEQ ID NO: 2498 - protein, 152 aa, Homo sapiens
MAGLPRRIIKETQRLLAEPVPGIKAEPDESNARYFHVVIAGPQDSPFEGGTFKLELFLPEEYPMAAPKVRFMTKIYHPNVDKLGRICLDILKDKWSPALQIRTVLLSIQALLSAPNPDDPLANDVAEQWKTNEAQAIETARAWTRLYAMNNI

SEQ ID NO: 2499 - protein, 114 aa, Homo sapiens
MSLGLLCCVAFSLLWAGPMNAGVTQTPKFHVLKTGQSMTLLCAQDMNHEYMYRYRQDPGKGLRLIYYSVAAALTDKGEVPNGYNVSRSNTEDFPLKLESAAPSQTSVYFCASSY

SEQ ID NO: 2500 - protein, 530 aa, Homo sapiens
MGDDSLYLGGEWQFNHFSKLTSSRPDAAFAEIQRTSLPEKSPLSSETRVDLCDDLAPVARQLAPREKLPLSSRRPAAVGAGLQNMGNTCYENASLQCLTYTLPLANYMLSREHSQTCQRPKCCMLCTMQAHITWALHSPGHVIQPSQALAAGFHRGKQEDVHEFLMFTVDAMKKACLPGHKQVDHHSKDTTLIHQIFGGCWRSQIKCLHCHGISDTFDPYLDIALDIQAAQSVKQALEQLVKPEELNGENAYHCGLCLQRAPASNTLTLHTSAKVLILVLKRFSDVAGNKLAKNVQYPECLDMQPYMSQQNTGPLVYVLYAVLVHAGWSCHDGYYFSYVKAQEGQWYKMDDAEVTVCSITSVLSQQAYVLFYIQKSEWERHSESVSRGREPRALGAEDTDRPATQGELKRDHPCLQVPELDEHLVERATEESTLDHWKFPQEQNKMKPEFNVRKVEGTLPPNVLVIHQSKYKCGMKNHHPEQQSSLLNLSSMNSTDQESMNTGTLASLQGRTRRSKGKNKHSKRSLLVCQ

SEQ ID NO: 2501 - protein, 113 aa, Homo sapiens
MSLGLLCCAAFSLLWAGPVNAGVTQTPKFHILKTGQSMTLQCAQDMNHGYMSWYRQDPGMGLRLIYYSAAAGTTDKEVPNGYNVSRLNTEDFPLRLVSAAPSQTSVYLCASSY

SEQ ID NO: 2502 - protein, 530 aa, Homo sapiens
MEDDSLYLRGEWQFNHFSKLTSSRPDAAFAEIQRTSLPEKSPLSCETRVDLCDDLAPVARQLAPREKLPLSSRRPAAVGAGLQNMGNTCYVNASLQCLTYTPPLANYMLSREHSQTCHRHKGCMLCTMQAHITRALHNPGHVIQPSQALAAGFHRGKQEDAHEFLMFTVDAMKKACLPGHKQVDHHSKDTTLIHQIFGGYWRSQIKCLHCHGISDTFDPYLDIALDIQAAQSVQQALEQLAKPEELNGENAYHCGVCLQRAPASKTLTLHTSAKVLILVLKRFSDVTGNKIAKNVQYPECLDMQPYMSQPNTGPLVYVLYAVLVHAGWSCHNGHYFSYVKAQEGQWYKMDDAEVTASSITSVLSQQAYVLFYIQKSEWERHSESVSRGREPRALGAEDTDRRATQGELKRDHPCLQAPELDEHLVERATQESTLDHWKFLQEQNKTKPEFNVRKVEGTLPPDVLVIHQSKYKCGMKNHHPEQQSSLLNLSSSTPTHQESMNTGTLASLRGRARRSKGKNKHSKRALLVCQ

SEQ ID NO: 2503 - protein, 114 aa, Homo sapiens
MSIGLLCCVAFSLLWAGPVNAGVTQTPKFHILKTGQSMTLQCAQDMNHGYLSWYRQDPGMGLRRIHYSVAAGITDKGEVPDGYNVSRSNTEDFPLRLESAAPSQTSVYFCASSY

SEQ ID NO: 2504 - protein, 398 aa, Homo sapiens
MEDDSLYLRGEWQFNHFSKLTSSRPDAAFAEIQRTSLPEKSPLSCETRVDLCDDLAPVARQLAPREKLPLSSRRPAAVGAGLQNMGNTCYVNASLQCLTYTPPLANYMLSREHSQTCHRHKGCMLCTMQAHITRALHNPGHVIQPSQALAAGFHRGKQEDAHEFLMFTVDAMKKACLPGHKQVDHHSKDTTLIHQIFGGYWRSQIKCLHCHGISDTFDPYLDIALDIQAAQSVQQALEQLVKPEELNGENAYHCGVCLQRAPASKTLTLHTSAKVLILVLKRFSDVTGNKIAKNVQYPECLDMQPYMSQQNTGPLVYVLYAVLVHAGWSCHNGHYFSYVKAQEGQWYKMDDAEVTASSITSVLSQQAYVLFYIQKSEWERHSESVSRGREPRALGSED

SEQ ID NO: 2505 - protein, 115 aa, Homo sapiens
MGTRLLCWAAICLLGADHTGAGVSQSLRHKVAKKGKDVALRYDPISGHNALYWYRQSLGQGLEFPIYFQGKDAADKSGLPRDRFSAQRSEGSISTLKFQRTQQGDLAVYLCASSS

SEQ ID NO: 2506 - protein, 115 aa, Homo sapiens
MGTRLLFWVAFCLLGADHTGAGVSQSPSNKVTEKGKDVELRCDPISGHTALYWYRQSLGQGLEFLIYFQGNSAPDKSGLPSDRFSAERTGGSVSTLTIQRTQQEDSAVYLCASSL

SEQ ID NO: 2507 - protein, 115 aa, Homo sapiens
MGTRLLCWAALCLLGADHTGAGVSQTPSNKVTEKGKDVELRCDPISGHTALYWYRQSLGQGPEFLIYFQGTGAADDSGLPKDRFFAVRPEGSVSTLKIQRTEQGDSAAYLRASSL

SEQ ID NO: 2508 - protein, 115 aa, Homo sapiens
MGTRLLCWVVLGFLGTDHTGAGVSQSPRYKVAKRGRDVALRCDSISGHVTLYWYRQTLGQGSEVLTYSQSDAQRDKSGRPSGRFSAERPERSVSTLKIQRTEQGDSAVYLCASSL

SEQ ID NO: 2509 - protein, 115 aa, Homo sapiens
MGTSLLCWVVLGFLGTDHTGAGVSQSPRYKVTKRGQDVALRCDPISGHVSLYWYRQALGQGPEFLTYFNYEAQQDKSGLPNDRFSAERPEGSISTLTIQRTEQRDSAMYRCASSL

SEQ ID NO: 2510 - protein, 1292 aa, Homo sapiens
MADPAAPTPAAPAPAQAPAPAPEAVPAPAAAPVPAPAPASDSASGPSSDSGPEAGSQRLLFSHDLVSGRYRGSVHFGLVRLIHGEDSDSEGEEEGRGSSGCSEAGGAGHEEGRASPLRRGYVRVQWYPEGVKQHVKETKLKLEDRSVVPRDVVRHMRSTDSQCGTVIDVNIDCAVKLIGTNCIIYPVNSKDLQHIWPFMYGDYIAYDCWLGKVYDLKNQIILKLSNGARCSMNTEDGAKLYDVCPHVSDSGLFFDDSYGFYPGQVLIGPAKIFSSVQWLSGVKPVLSTKSKFRVVVEEVQVVELKVTWITKSFCPGGTDSVSPPPSVITQENLGRVKRLGCFDHAQRQLGERCLYVFPAKVEPAKIAWECPEKNCAQGEGSMAKKVKRLLKKQVVRIMSCSPDTQCSRDHSMEDPDKKGESKTKSEAESASPEETPDGSASPVEMQDEGAEEPHEAGEQLPPFLLKEGRDDRLHSAEQDADDEAADDTDDTSSVTSSASSTTSSQSGSGTSRKKSIPLSIKNLKRKHKRKKNKITRDFKPGDRVAVEVVTTMTSADVMWQDGSVECNIRSNDLFPVHHLDNNEFCPGDFVVDKRVQSCPDPAVYGVVQSGDHIGRTCMVKWFKLRPSGDDVELIGEEEDVSVYDIADHPDFRFRTTDIVIRIGNTEDGAPHKEDEPSVGQVARVDVSSKVEVVWADNSKTIILPQHLYNIESEIEESDYDSVEGSTSGASSDEWEDDSDSWETDNGLVEDEHPKIEEPPIPPLEQPVAPEDKGVVISEEAATAAVQGAVAMAAPMAGLMEKAGKDGPPKSFRELKEAIKILESLKNMTVEQLLTGSPTSPTVEPEKPTREKKFLDDIKKLQENLKKTLDNVAIVEEEKMEAVPDVERKEDKPEGQSPVKAEWPSETPVLCQQCGGKPGVTFTSAKGEVFSVLEFAPSNHSFKKIEFQPPEAKKFFSTVRKEMALLATSLPEGIMVKTFEDRMDLFSALIKGPTRTPYEDGLYLFDIQLPNIYPAVPPHFCYLSQCSGRLNPNLYDNGKVCVSLLGTWIGKGTERWTSKSSLLQVLISIQGLILVNEPYYNEAGFDSDRGLQEGYENSRCYNEMALIRVVQSMTQLVRRPPEVFEQEIRQHFSTGGWRLVNRIESWLETHALLEKAQALPNGVPKASSSPEPPAVAELSDSGQQEPEDGGPAPGEASQGSDSEGGAQGLASASRDHTDQTSETAPDASVPPSVKPKKRRKSYRSFLPEKSGYPDIGFPLFPLSKGFIKSIRGVLTQFRAALLEAGMPECTEDK

SEQ ID NO: 2511 - protein, 115 aa, Homo sapiens
MGTSLLCWVVLGFLGTDHTGAGVSQSPRYKVTKRGQDVTLRCDPISSHATLYWYQQALGQGPEFLTYFNYEAQPDKSGLPSDRFSAERPEGSISTLTIQRTEQRDSAMYRCASSL

SEQ ID NO: 2512 - protein, 115 aa, Homo sapiens
MGTRLLCWVVLGFLGTDHTGAGVSQSPRYKVAKRGQDVALRCDPISGHVSLFWYQQALGQGPEFLTYFQNEAQLDKSGLPSDRFFAERPEGSVSTLKIQRTQQEDSAVYLCASSL

SEQ ID NO: 2513 - protein, 115 aa, Homo sapiens
MGTSLLCWMALCLLGADHADTGVSQNPRHKITKRGQNVTFRCDPISEHNRLYWYRQTLGQGPEFLTYFQNEAQLEKSRLLSDRFSAERPKGSFSTLEIQRTEQGDSAMYLCASSL

SEQ ID NO: 2514 - protein, 114 aa, Homo sapiens
MGFRLLCCVAFCLLGAGPVDSGVTQTPKHLITATGQRVTLRCSPRSGDLSVYWYQQSLDQGLQFLIHYYNGEERAKGNILERFSAQQFPDLHSELNLSSLELGDSALYFCASSV

SEQ ID NO: 2515 - protein, 114 aa, Homo sapiens
MGTRLFFYVALCLLWAGHRDAEITQSPRHKITETGRQVTLACHQTWNHNNMFWYRQDLGHGLRLIHYSYGVHDTNKGEVSDGYSVSRSNTEDLPLTLESAASSQTSVYFCASSE

SEQ ID NO: 2516 - protein, 114 aa, Homo sapiens
MGTRLFFYVALCLLWAGHRDAGITQSPRYKITETGRQVTLMCHQTWSHSYMFWYRQDLGHGLRLIYYSAAADITDKGEVPDGYVVSRSKTENFPLTLESATRSQTSVYFCASSE

SEQ ID NO: 2517 - protein, 114 aa, Homo sapiens
MGTRLFFYVALCLLWTGHMDAGITQSPRHKVTETGTPVTLRCHQTENHRYMYWYRQDPGHGLRLIHYSYGVKDTDKGEVSDGYSVSRSKTEDFLLTLESATSSQTSVYFCAISE

SEQ ID NO: 2518 - protein, 115 aa, Homo sapiens
MSTRLLCWMALCLLGAELSEAEVAQSPRYKITEKSQAVAFWCDPISGHATLYWYRQILGQGPELLVQFQDESVVDDSQLPKDRFSAERLKGVDSTLKIQPAELGDSAMYLCASSL

SEQ ID NO: 2519 - protein, 115 aa, Homo sapiens
MGTRLLCWAALCLLGAELTEAGVAQSPRYKIIEKRQSVAFWCNPISGHATLYWYQQILGQGPKLLIQFQNNGVVDDSQLPKDRFSAERLKGVDSTLKIQPAKLEDSAVYLCASSL

SEQ ID NO: 2520 - protein, 115 aa, Homo sapiens
MGTRLLCWVAFCLLVEELIEAGVVQSPRYKIIEKKQPVAFWCNPISGHNTLYWYLQNLGQGPELLIRYENEEAVDDSQLPKDRFSAERLKGVDSTLKIQPAELGDSAVYLCASSL

SEQ ID NO: 2521 - protein, 115 aa, Homo sapiens
MDSWTFCCVSLCILVAKHTDAGVIQSPRHEVTEMGQEVTLRCKPISGHNSLFWYRQTMMRGLELLIYFNNNVPIDDSGMPEDRFSAKMPNASFSTLKIQPSEPRDSAVYFCASSL

SEQ ID NO: 2522 - protein, 115 aa, Homo sapiens
MGSWTLCCVSLCILVAKHTDAGVIQSPRHEVTEMGQEVTLRCKPISGHDYLFWYRQTMMRGLELLIYFNNNVPIDDSGMPEDRFSAKMPNASFSTLKIQPSEPRDSAVYFCASSL

SEQ ID NO: 2523 - protein, 222 aa, Homo sapiens
MNSNVENLPPHIIRLVYKEVTTLTADPPDGIKVFPNEEDLTDLQVTIEGPEGTPYAGGLFRMKLLLGKDFPASPPKGYFLTKIFHPNVGANGEICVNVLKRDWTAELGIRHVLLTIKCLLIHPNPESALNEEAGRLLLENYEEYAARARLLTEIHGGAGGPSGRAEAGRALASGTEASSTDPGAPGGPGGAEGPMAKKHAGERDKKLAAKKKTDKKRALRRL

SEQ ID NO: 2524 - protein, 115 aa, Homo sapiens
MATRLLCCVVLCLLGEELIDARVTQTPRHKVTEMGQEVTMRCQPILGHNTVFWYRQTMMQGLELLAYFRNRAPLDDSGMPKDRFSAEMPDATLATLKIQPSEPRDSAVYFCASGL

SEQ ID NO: 2525 - protein, 111 aa, Homo sapiens
MLLLLLLLGPGSGLGAVVSQHPSRVICKSGTSVKIECRSLDFQATTMFWYRQFPKQSLMLMATSNEGSKATYEQGVEKDKFLINHASLTLSTLTVTSAHPEDSSFYICSAR

SEQ ID NO: 2526 - protein, 115 aa, Homo sapiens
MASLLFFCGAFYLLGTGSMDADVTQTPRNRITKTGKRIMLECSQTKGHDRMYWYRQDPGLGLQLIYYSFDVKDINKGEISDGYSVSRQAQAKFSLSLESAIPNQTALYFCATSDL

SEQ ID NO: 2527 - protein, 114 aa, Homo sapiens
MTIRLLCYVGFYFLGAGLMEADIYQTPRYLVIGTGKKITLECSQTMGHDKMYWYQQDPGMELHLIHYSYGVNSTEKGDLSSESTVSRIRTEHFPLTLESARPSHTSQYLCASSE

SEQ ID NO: 2528 - protein, 197 aa, Homo sapiens
MQRASRLKRELHMLATEPPPGITCWQDKDQMDDLRAQILGGANTPYEKGVFKLEVIIPERYPFEPPQIRFLTPIYHPNIDSAGRICLDVLKLPPKGAWRPSLNIATVLTSIQLLMSEPNPDDPLMADISSEFKYNKPAFLKNARQWTEKHARQKQKADEEEMLDNLPEAGDSRVHNSTQKRKASQLVGIEKKFHPDV

SEQ ID NO: 2529 - protein, 321 aa, Homo sapiens
MHGRAYLLLHRDFCDLKENNYKGITAKPVSEDMMEWEVEIEGLQNSVWQGLVFQLTIHFTSEYNYAPPVVKFITIPFHPNVDPHTGQPCIDFLDNPEKWNTNYTLSSILLALQVMLSNPVLENPVNLEAARILVKDESLYRTILRLFNRPLQMKDDSQELPKDPRKCIRPIKTTSFSDYYQTWSRIATSKATEYYRTPLLKVPNFIGQYYKWKKMDLQHQKEWNLKYSVIKCWLARKRMPHEVTHSMEEIKLCPTLIPTTDEIFLESPTAINSITDIYETEEEGWKSDTSLYENDTDEPREEEVEDLISWTNTLNTNTSED

SEQ ID NO: 2530 - protein, 226 aa, Homo sapiens
MHGRAYLLLHRDFCDLKENNYKGITAKPVSEDMMEWEVEIEGLQNSVWQGLVFQLTIHFTSEYNYAPPVVKFITIPFHPNVDPHTGQPCIDFLDNPEKWNTNYTLSSILLALQVMLSNPVLENPVNLEAARILVKDESLYRTILRLFNRPLQMKDDSQELPKDPRKCIRPIKTTSFSDYYQTWSRIATSKATEYYRTPLLKVPNFIGQYYKWKKMDLQHQKEWNLK

SEQ ID NO: 2531 - protein, 151 aa, Homo sapiens
MASMQKRLQKELLALQNDPPPGMTLNEKSVQNSITQWIVDMEGAPGTLYEGEKFQLLFKFSSRYPFDSPQVMFTGENIPVHPHVYSNGHICLSILTEDWSPALSVQSVCLSIISMLSSCKEKRRPPDNSFYVRTCNKNPKKTKWWYHDDTC

SEQ ID NO: 2532 - protein, 162 aa, Homo sapiens
MASMQTTGRRVEVWFPKRLQKELLALQNDPPPGMTLNEKSVQNSITQWIVDMEGAPGTLYEGEKFQLLFKFSSRYPFDSPQVMFTGENIPVHPHVYSNGHICLSILTEDWSPALSVQSVCLSIISMLSSCKEKRRPPDNSFYVRTCNKNPKKTKWWYHDDTC

SEQ ID NO: 2533 - protein, 180 aa, Homo sapiens
MLSPRGVTRARQLLPLRLWPRRSWGDGSIMASMQKRLQKELLALQNDPPPGMTLNEKSVQNSITQWIVDMEGAPGTLYEGEKFQLLFKFSSRYPFDSPQVMFTGENIPVHPHVYSNGHICLSILTEDWSPALSVQSVCLSIISMLSSCKEKRRPPDNSFYVRTCNKNPKKTKWWYHDDTC

SEQ ID NO: 2534 - protein, 354 aa, Homo sapiens
MAESPTEEAATAGAGAAGPGASSVAGVVGVSGSGGGFGPPFLPDVWAAAAAAGGAGGPGSGLAPLPGLPPSAAAHGAALLSHWDPTLSSDWDGERTAPQCLLRIKRDIMSIYKEPPPGMFVVPDTVDMTKIHALITGPFDTPYEGGFFLFVFRCPPDYPIHPPRVKLMTTGNNTVRFNPNFYRNGKVCLSILGTWTGPAWSPAQSISSVLISIQSLMTENPYHNEPGFEQERHPGDSKNYNECIRHETIRVAVCDMMEGKCPCPEPLRGVMEKSFLEYYDFYEVACKDRLHLQGQTMQDPFGEKRGHFDYQSLLMRLGLIRQKVLERLHNENAEMDSDSSSSGTETDLHGSLRV

SEQ ID NO: 2535 - protein, 246 aa, Homo sapiens
MSIYKEPPPGMFVVPDTVDMTKIHALITGPFDTPYEGGFFLFVFRCPPDYPIHPPRVKLMTTGNNTVRFNPNFYRNGKVCLSILGTWTGPAWSPAQSISSVLISIQSLMTENPYHNEPGFEQERHPGDSKNYNECIRHETIRVAVCDMMEGKCPCPEPLRGVMEKSFLEYYDFYEVACKDRLHLQGQTMQDPFGEKRGHFDYQSLLMRLGLIRQKVLERLHNENAEMDSDSSSSGTETDLHGSLRV

SEQ ID NO: 2536 - protein, 875 aa, Homo sapiens
MEKLHQCYWKSGEPQSDDIEASRMKRAAAKHLIERYYHQLTEGCGNEACTNEFCASCPTFLRMDNNAAAIKALELYKINAKLCDPHPSKKGASSAYLENSKGAPNNSCSEIKMNKKGARIDFKDVTYLTEEKVYEILELCREREDYSPLIRVIGRVFSSAEALVQSFRKVKQHTKEELKSLQAKDEDKDEDEKEKAACSAAAMEEDSEASSSRIGDSSQGDNNLQKLGPDDVSVDIDAIRRVYTRLLSNEKIETAFLNALVYLSPNVECDLTYHNVYSRDPNYLNLFIIVMENRNLHSPEYLEMALPLFCKAMSKLPLAAQGKLIRLWSKYNADQIRRMMETFQQLITYKVISNEFNSRNLVNDDDAIVAASKCLKMVYYANVVGGEVDTNHNEEDDEEPIPESSELTLQELLGEERRNKKGPRVDPLETELGVKTLDCRKPLIPFEEFINEPLNEVLEMDKDYTFFKVETENKFSFMTCPFILNAVTKNLGLYYDNRIRMYSERRITVLYSLVQGQQLNPYLRLKVRRDHIIDDALVRLEMIAMENPADLKKQLYVEFEGEQGVDEGGVSKEFFQLVVEEIFNPDIGMFTYDESTKLFWFNPSSFETEGQFTLIGIVLGLAIYNNCILDVHFPMVVYRKLMGKKGTFRDLGDSHPVLYQSLKDLLEYEGNVEDDMMITFQISQTDLFGNPMMYDLKENGDKIPITNENRKEFVNLYSDYILNKSVEKQFKAFRRGFHMVTNESPLKYLFRPEEIELLICGSRNLDFQALEETTEYDGGYTRDSVLIREFWEIVHSFTDEQKRLFLQFTTGTDRAPVGGLGKLKMIIAKNGPDTERLPTSHTCFNVLLLPEYSSKEKLKERLLKAITYAKGFGML

SEQ ID NO: 2537 - protein, 852 aa, Homo sapiens
MKRAAAKHLIERYYHQLTEGCGNEACTNEFCASCPTFLRMDNNAAAIKALELYKINAKLCDPHPSKKGASSAYLENSKGAPNNSCSEIKMNKKGARIDFKDVTYLTEEKVYEILELCREREDYSPLIRVIGRVFSSAEALVQSFRKVKQHTKEELKSLQAKDEDKDEDEKEKAACSAAAMEEDSEASSSRIGDSSQGDNNLQKLGPDDVSVDIDAIRRVYTRLLSNEKIETAFLNALVYLSPNVECDLTYHNVYSRDPNYLNLFIIVMENRNLHSPEYLEMALPLFCKAMSKLPLAAQGKLIRLWSKYNADQIRRMMETFQQLITYKVISNEFNSRNLVNDDDAIVAASKCLKMVYYANVVGGEVDTNHNEEDDEEPIPESSELTLQELLGEERRNKKGPRVDPLETELGVKTLDCRKPLIPFEEFINEPLNEVLEMDKDYTFFKVETENKFSFMTCPFILNAVTKNLGLYYDNRIRMYSERRITVLYSLVQGQQLNPYLRLKVRRDHIIDDALVRLEMIAMENPADLKKQLYVEFEGEQGVDEGGVSKEFFQLVVEEIFNPDIGMFTYDESTKLFWFNPSSFETEGQFTLIGIVLGLAIYNNCILDVHFPMVVYRKLMGKKGTFRDLGDSHPVLYQSLKDLLEYEGNVEDDMMITFQISQTDLFGNPMMYDLKENGDKIPITNENRKEFVNLYSDYILNKSVEKQFKAFRRGFHMVTNESPLKYLFRPEEIELLICGSRNLDFQALEETTEYDGGYTRDSVLIREFWEIVHSFTDEQKRLFLQFTTGTDRAPVGGLGKLKMIIAKNGPDTERLPTSHTCFNVLLLPEYSSKEKLKERLLKAITYAKGFGML

SEQ ID NO: 2538 - protein, 872 aa, Homo sapiens
MATACKRSGEPQSDDIEASRMKRAAAKHLIERYYHQLTEGCGNEACTNEFCASCPTFLRMDNNAAAIKALELYKINAKLCDPHPSKKGASSAYLENSKGAPNNSCSEIKMNKKGARIDFKDVTYLTEEKVYEILELCREREDYSPLIRVIGRVFSSAEALVQSFRKVKQHTKEELKSLQAKDEDKDEDEKEKAACSAAAMEEDSEASSSRIGDSSQGDNNLQKLGPDDVSVDIDAIRRVYTRLLSNEKIETAFLNALVYLSPNVECDLTYHNVYSRDPNYLNLFIIVMENRNLHSPEYLEMALPLFCKAMSKLPLAAQGKLIRLWSKYNADQIRRMMETFQQLITYKVISNEFNSRNLVNDDDAIVAASKCLKMVYYANVVGGEVDTNHNEEDDEEPIPESSELTLQELLGEERRNKKGPRVDPLETELGVKTLDCRKPLIPFEEFINEPLNEVLEMDKDYTFFKVETENKFSFMTCPFILNAVTKNLGLYYDNRIRMYSERRITVLYSLVQGQQLNPYLRLKVRRDHIIDDALVRLEMIAMENPADLKKQLYVEFEGEQGVDEGGVSKEFFQLVVEEIFNPDIGMFTYDESTKLFWFNPSSFETEGQFTLIGIVLGLAIYNNCILDVHFPMVVYRKLMGKKGTFRDLGDSHPVLYQSLKDLLEYEGNVEDDMMITFQISQTDLFGNPMMYDLKENGDKIPITNENRKEFVNLYSDYILNKSVEKQFKAFRRGFHMVTNESPLKYLFRPEEIELLICGSRNLDFQALEETTEYDGGYTRDSVLIREFWEIVHSFTDEQKRLFLQFTTGTDRAPVGGLGKLKMIIAKNGPDTERLPTSHTCFNVLLLPEYSSKEKLKERLLKAITYAKGFGML

SEQ ID NO: 2539 - protein, 1068 aa, Homo sapiens
MFTLSQTSRAWFIDRARQAREERLVQKERERAAVVIQAHVRSFLCRSRLQRDIRREIDDFFKADDPESTKRSALCIFKIARKLLFLFRIKEDNERFEKLCRSILSSMDAENEPKVWYVSLACSKDLTLLWIQQIKNILWYCCDFLKQLKPEILQDSRLITLYLTMLVTFTDTSTWKILRGKGESLRPAMNHICANIMGHLNQHGFYSVLQILLTRGLARPRPCLSKGTLTAAFSLALRPVIAAQFSDNLIRPFLIHIMSVPALVTHLSTVTPERLTVLESHDMLRKFIIFLRDQDRCRDVCESLEGCHTLCLMGNLLHLGSLSPRVLEEETDGFVSLLTQTLCYCRKYVSQKKSNLTHWHPVLGWFSQSVDYGLNESMHLITKQLQFLWGVPLIRIFFCDILSKKLLESQEPAHAQPASPQNVLPVKSLLKRAFQKSASVRNILRPVGGKRVDSAEVQKVCNICVLYQTSLTTLTQIRLQILTGLTYLDDLLPKLWAFICELGPHGGLKLFLECLNNDTEESKQLLAMLMLFCDCSRHLITILDDIEVYEEQISFKLEELVTISSFLNSFVFKMIWDGIVENAKGETLELFQSVHGWLMVLYERDCRRRFTPEDHWLRKDLKPSVLFQELDRDRKRAQLILQYIPHVIPHKNRVLLFRTMVTKEKEKLGLVETSSASPHVTHITIRRSRMLEDGYEQLRQLSQHAMKGVIRVKFVNDLGVDEAGIDQDGVFKEFLEEIIKRVFDPALNLFKTTSGDERLYPSPTSYIHENYLQLFEFVGKMLGKAVYEGIVVDVPFASFFLSQLLGHHHSVFYSSVDELPSLDSEFYKNLTSIKRYDGDITDLGLTLSYDEDVMGQLVCHELIPGGKTIPVTNENKISYIHLMAHFRMHTQIKNQTAALISGFRSIIKPEWIRMFSTPELQRLISGDNAEIDLEDLKKHTVYYGGFHGSHRVIIWLWDILASDFTPDERAMFLKFVTSCSRPPLLGFAYLKPPFSIRCVEVSDDQDTGDTLGSVLRGFFTIRKREPGGRLPTSSTCFNLLKLPNYSKKSVLREKLRYAISMNTGFELS

SEQ ID NO: 2540 - protein, 708 aa, Homo sapiens
MFTLSQTSRAWFIDRARQAREERLVQKERERAAVVIQAHVRSFLCRSRLQRDIRREIDDFFKADDPESTKRSALCIFKIARKLLFLFRIKEDNERFEKLCRSILSSMDAENEPKVWYVSLACSKDLTLLWIQQIKNILWYCCDFLKQLKPEILQDSRLITLYLTMLVTFTDTSTWKILRGKGESLRPAMNHICANIMGHLNQHGFYSVLQILLTRGLARPRPCLSKGTLTAAFSLALRPVIAAQFSDNLIRPFLIHIMSVPALVTHLSTVTPERLTVLESHDMLRKFIIFLRDQDRCRDVCESLEGCHTLCLMGNLLHLGSLSPRVLEEETDGFVSLLTQTLCYCRKYVSQKKSNLTHWHPVLGWFSQSVDYGLNESMHLITKQLQFLWGVPLIRIFFCDILSKKLLESQEPAHAQPASPQNVLPVKSLLKRAFQKSASVRNILRPVGGKRVDSAEVQKVCNICVLYQTSLTTLTQIRLQILTGLTYLDDLLPKLWAFICELGPHGGLKLFLECLNNDTEESKQLLAMLMLFCDCSRHLITILDDIEVYEEQISFKLEELVTISSFLNSFVFKMIWDGIVENAKGETLELFQSVHGWLMVLYERDCRRRFTPEDHWLRKDLKPSVLFQELDRDRKRAQLILQYIPHVIPHKNRVLLFRTMVTKEKEKLGLVETSSASPHVTHITIRRSRMLESLFECPWPLVINAESC

SEQ ID NO: 2541 - protein, 244 aa, Homo sapiens
MFTLSQTSRAWFIDRARQAREERLVQKERERAAVVIQAHVRSFLCRSRLQRDIRREIDDFFKADDPESTKRSALCIFKIARKLLFLFRIKEDNERFEKLCRSILSSMDAENEPKVWYVSLACSKDLTLLWIQQIKNILWYCCDFLKQLKPEILQDSRLITLYLTMLVTFTDTSTWKILRGKGESLRPAMNHICANIMGHLNQHGFYSVLQCCDGLFPDLVSYAPHNNPVRWSVGRSWYDWQLSR

SEQ ID NO: 2542 - protein, 1083 aa, Homo sapiens
MFSFEGDFKTRPKVSLGGASRKEEKASLLHRTQEERRKREEERRRLKNAIIIQSFIRGYRDRKQQYSIQRSAFDRCATLSQSGGAFPIANGPNLTLLVRQLLFFYKQNEDSKRLIWLYQNLIKHSSLFVKQLDGSERLTCLFQIKRLMSLCCRLLQNCNDDSLNVALPMRMLEVFSSENTYLPVLQDASYVVSVIEQILHYMIHNGYYRSLYLLINSKLPSSIEYSDLSRVPIAKILLENVLKPLHFTYNSCPEGARQQVFTAFTEEFLAAPFTDQIFHFIIPALADAQTVFPYEPFLNALLLIESRCSRKSGGAPWLFYFVLTVGENYLGALSEEGLLVYLRVLQTFLSQLPVSPASASCHDSASDSEEESEEADKPSSPEDGRLSVSYITEECLKKLDTKQQTNTLLNLVWRDSASEEVFTTMASVCHTLMVQHRMMVPKVRLLYSLAFNARFLRHLWFLISSMSTRMITGSMVPLLQVISRGSPMSFEDSSRIIPLFYLFSSLFSHSLISIHDNEFFGDPIEVVGQRQSSMMPFTLEELIMLSRCLRDACLGIIKLAYPETKPEVREEYITAFQSIGVTTSSEMQQCIQMEQKRWIQLFKVITNLVKMLKSRDTRRNFCPPNHWLSEQEDIKADKVTQLYVPASRHVWRFRRMGRIGPLQSTLDVGLESPPLSVSEERQLAVLTELPFVVPFEERVKIFQRLIYADKQEVQGDGPFLDGINVTIRRNYIYEDAYDKLSPENEPDLKKRIRVHLLNAHGLDEAGIDGGGIFREFLNELLKSGFNPNQGFFKTTNEGLLYPNPAAQMLVGDSFARHYYFLGRMLGKALYENMLVELPFAGFFLSKLLGTSADVDIHHLASLDPEVYKNLLFLKSYEDDVEELGLNFTVVNNDLGEAQVVELKFGGKDIPVTSANRIAYIHLVADYRLNRQIRQHCLAFRQGLANVVSLEWLRMFDQQEIQVLISGAQVPISLEDLKSFTNYSGGYSADHPVIKVFWRVVEGFTDEEKRKLLKFVTSCSRPPLLGFKELYPAFCIHNGGSDLERLPTASTCMNLLKLPEFYDETLLRSKLLYAIECAAGFELS

SEQ ID NO: 2543 - protein, 649 aa, Homo sapiens
MFSFEGDFKTRPKVSLGGASRKEEKASLLHRTQEERRKREEERRRLKNAIIIQSFIRGYRDRKQQYSIQRSAFDRCATLSQSGGAFPIANGPNLTLLVRQLLFFYKQNEDSKRLIWLYQNLIKHSSLFVKQLDGSERLTCLFQIKRLMSLCCRLLQNCNDDSLNVALPMRMLEVFSSENTYLPVLQDASYVVSVIEQILHYMIHNGYYRSLYLLINSKLPSSIEYSDLSRVPIAKILLENVLKPLHFTYNSCPEGARQQVFTAFTEEFLAAPFTDQIFHFIIPALADAQTVFPYEPFLNALLLIESRCSRKSGGAPWLFYFVLTVGENYLGALSEEGLLVYLRVLQTFLSQLPVSPASASCHDSASDSEEESEEADKPSSPEDGRLSVSYITEECLKKLDTKQQTNTLLNLVWRDSASEEVFTTMASVCHTLMVQHRMMVPKVRLLYSLAFNARFLRHLWFLISSMSTRMITGSMVPLLQVISRGSPMSFEDSSRIIPLFYLFSSLFSHSLISIHDNEFFGDPIEVVGQRQSSMMPFTLEELIMLSRCLRDACLGIIKLAYPETKPEVREEYITAFQSIGVTTSSEMQQCIQMEQKRWIQLFKVITNLVKMLKSRDTRRNFCPPNHWLSEQEDIKADKVLLKDLFNIYH

SEQ ID NO: 2544 - protein, 404 aa, Homo sapiens
MFSFEGDFKTRPKVSLGGASRKYSIQRSAFDRCATLSQSGGAFPIANGPNLTLLVRQLLFFYKQNEDSKRLIWLYQNLIKHSSLFVKQLDGSERLTCLFQIKRLMSLCCRLLQNCNDDSLNVALPMRMLEVFSSENTYLPVLQDASYVVSVIEQILHYMIHNGYYRSLYLLINSKLPSSIEYSDLSRVPIAKILLENVLKPLHFTYNSCPEGARQQVFTAFTEEFLAAPFTDQIFHFIIPALADAQTVFPYEPFLNALLLIESRCSRKSGGAPWLFYFVLTVGENYLGALSEEGLLVYLRVLQTFLSQLPVSPASASCHDSASDSEEESEEADKPSSPEDGRLSVSYITEECLKKLDTKQQTNTLLNLVWRDSASEEVFTTMASVCHTLMVQHRMMVPKVRVYK

SEQ ID NO: 2545 - protein, 389 aa, Homo sapiens
MAASAAETRVFLEVRGQLQSALLILGEPKEGGMPMNISIMPSSLQMKTPEGCTEIQLPAEVRLVPSSCRGLQFVVGDGLHLRLQTQAKLGTKLISMFNQSSQTQECCTFYCQSCGEVIIKDRKLLRVLPLPSENWGALVGEWCCHPDPFANKSLHPQENDCFIGDSFFLVNLRTSLWQQRPELSPVEMCCVSSDNHCKLEPKANTKVICKRCKVMLGETVSSETTKFYMTEIIIQSSERSFPIIPRSWFVQSVIAQCLVQLSSARSTFRFTIQGQDDKVYILLWLLNSDSLVIESLRNSKYIKKFPLLENTFKADSSSAWSAVKVLYQPCIKSRNEKLVSLWESDISVHPLTLPSATCLELLLILSKSNANLPSSLRRVNSFQVAFLKM

SEQ ID NO: 2546 - protein, 1066 aa, Homo sapiens
MTDQENNNNISSNPFAALFGSLADAKQFAAIQKEQLKQQSDELPASPDDSDNSVSESLDEFDYSVAEISRSFRSQQEICEQLNINHMIQRIFLITLDNSDPSLKSGNGIPSRCVYLEEMAVELEDQDWLDMSNVEQALFARLLLQDPGNHLINMTSSTTLNLSADRDAGERHIFCYLYSCFQRAKEEITKVPENLLPFAVQCRNLTVSNTRTVLLTPEIYVDQNIHEQLVDLMLEAIQGAHFEDVTEFLEEVIEALILDEEVRTFPEVMIPVFDILLGRIKDLELCQILLYAYLDILLYFTRQKDMAKVFVEYIQPKDPTNGQMYQKTLLGVILSISCLLKTPGVVENHGYFLNPSRSSPQEIKVQEANIHQFMAQFHEKIYQMLKNLLQLSPETKHCILSWLGNCLHANAGRTKIWANQMPEIFFQMYASDAFFLNLGAALLKLCQPFCKPRSSRLLTFNPTYCALKELNDEERKIKNVHMRGLDKETCLIPAVQEPKFPQNYNLVTENLALTEYTLYLGFHRLHDQMVKINQNLHRLQVAWRDAQQSSSPAADNLREQFERLMTIYLSTKTAMTEPQMLQNCLNLQVSMAVLLVQLAIGNEGSQPIELTFPLPDGYSSLAYVPEFFADNLGDFLIFLRRFADDILETSADSLEHVLHFITIFTGSIERMKNPHLRAKLAEVLEAVMPHLDQTPNPLVSSVFHRKRVFCNFQYAPQLAEALIKVFVDIEFTGDPHQFEQKFNYRRPMYPILRYMWGTDTYRESIKDLADYASKNLEAMNPPLFLRFLNLLMNDAIFLLDEAIQYLSKIKIQQIEKDRGEWDSLTPEARREKEAGLQMFGQLARFHNIMSNETIGTLAFLTSEIKSLFVHPFLAERIISMLNYFLQHLVGPKMGALKVKDFSEFDFKPQQLVSDICTIYLNLGDEENFCATVPKDGRSYSPTLFAQTVRVLKKINKPGNMIMAFSNLAERIKSLADLQQQEEETYADACDEFLDPIMSTLMCDPVVLPSSRVTVDRSTIARHLLSDQTDPFNRSPLTMDQIRPNTELKEKIQRWLAERKQQKEQLE

SEQ ID NO: 2547 - protein, 1073 aa, Homo sapiens
MTDQENNNNISSNPFAALFGSLADAKQFAAIQKEQLKQQSDELPASPDDSDNSVSESLDEFDYSVAEISRSFRSQQEICEQLNINHMIQRIFLITLDNSDPSLKSGNGIPSRCVYLEEMAVELEDQDWLDMSNVEQALFARLLLQDPGNHLINMTSSTTLNLSADRDAGERHIFCYLYSCFQRAKEEITKVPENLLPFAVQCRNLTVSNTRTVLLTPEIYVDQNIHEQLVDLMLEAIQGAREYMNKIYFEDVTEFLEEVIEALILDEEVRTFPEVMIPVFDILLGRIKDLELCQILLYAYLDILLYFTRQKDMAKVFVEYIQPKDPTNGQMYQKTLLGVILSISCLLKTPGVVENHGYFLNPSRSSPQEIKVQEANIHQFMAQFHEKIYQMLKNLLQLSPETKHCILSWLGNCLHANAGRTKIWANQMPEIFFQMYASDAFFLNLGAALLKLCQPFCKPRSSRLLTFNPTYCALKELNDEERKIKNVHMRGLDKETCLIPAVQEPKFPQNYNLVTENLALTEYTLYLGFHRLHDQMVKINQNLHRLQVAWRDAQQSSSPAADNLREQFERLMTIYLSTKTAMTEPQMLQNCLNLQVSMAVLLVQLAIGNEGSQPIELTFPLPDGYSSLAYVPEFFADNLGDFLIFLRRFADDILETSADSLEHVLHFITIFTGSIERMKNPHLRAKLAEVLEAVMPHLDQTPNPLVSSVFHRKRVFCNFQYAPQLAEALIKVFVDIEFTGDPHQFEQKFNYRRPMYPILRYMWGTDTYRESIKDLADYASKNLEAMNPPLFLRFLNLLMNDAIFLLDEAIQYLSKIKIQQIEKDRGEWDSLTPEARREKEAGLQMFGQLARFHNIMSNETIGTLAFLTSEIKSLFVHPFLAERIISMLNYFLQHLVGPKMGALKVKDFSEFDFKPQQLVSDICTIYLNLGDEENFCATVPKDGRSYSPTLFAQTVRVLKKINKPGNMIMAFSNLAERIKSLADLQQQEEETYADACDEFLDPIMSTLMCDPVVLPSSRVTVDRSTIARHLLSDQTDPFNRSPLTMDQIRPNTELKEKIQRWLAERKQQKEQLE

SEQ ID NO: 2548 - protein, 1302 aa, Homo sapiens
MEELSADEIRRRRLARLAGGQTSQPTTPLTSPQRENPPGPPIAASAPGPSQSLGLNVHNMTPATSPIGASGVAHRSQSSEGVSSLSSSPSNSLETQSQSLSRSQSMDIDGVSCEKSMSQVDVDSGIENMEVDENDRREKRSLSDKEPSSGPEVSEEQALQLVCKIFRVSWKDRDRDVIFLSSLSAQFKQNPKEVFSDFKDLIGQILMEVLMMSTQTRDENPFASLTATSQPIAAAARSPDRNLLLNTGSNPGTSPMFCSVASFGASSLSSLYESSPAPTPSFWSSVPVMGPSLASPSRAASQLAVPSTPLSPHSAASGTAAGSQPSSPRYRPYTVTHPWASSGVSILSSSPSPPALASSPQAVPASSSRQRPSSTGPPLPPASPSATSRRPSSLRISPSLGASGGASNWDSYSDHFTIETCKETDMLNYLIECFDRVGIEEKKAPKMCSQPAVSQLLSNIRSQCISHTALVLQGSLTQPRSLQQPSFLVPYMLCRNLPYGFIQELVRTTHQDEEVFKQIFIPILQGLALAAKECSLDSDYFKYPLMALGELCETKFGKTHPVCNLVASLRLWLPKSLSPGCGRELQRLSYLGAFFSFSVFAEDDVKVVEKYFSGPAITLENTRVVSQSLQHYLELGRQELFKILHSILLNGETREAALSYMAAVVNANMKKAQMQTDDRLVSTDGFMLNFLWVLQQLSTKIKLETVDPTYIFHPRCRITLPNDETRVNATMEDVNDWLTELYGDQPPFSEPKFPTECFFLTLHAHHLSILPSCRRYIRRLRAIRELNRTVEDLKNNESQWKDSPLATRHREMLKRCKTQLKKLVRCKACADAGLLDESFLRRCLNFYGLLIQLLLRILDPAYPDITLPLNSDVPKVFAALPEFYVEDVAEFLFFIVQYSPQALYEPCTQDIVMFLVVMLCNQNYIRNPYLVAKLVEVMFMTNPAVQPRTQKFFEMIENHPLSTKLLVPSLMKFYTDVEHTGATSEFYDKFTIRYHISTIFKSLWQNIAHHGTFMEEFNSGKQFVRYINMLINDTTFLLDESLESLKRIHEVQEEMKNKEQWDQLPRDQQQARQSQLAQDERVSRSYLALATETVDMFHILTKQVQKPFLRPELGPRLAAMLNFNLQQLCGPKCRDLKVENPEKYGFEPKKLLDQLTDIYLQLDCARFAKAIADDQRSYSKELFEEVISKMRKAGIKSTIAIEKFKLLAEKVEEIVAKNARAEIDYSDAPDEFRDPLMDTLMTDPVRLPSGTIMDRSIILRHLLNSPTDPFNRQTLTESMLEPVPELKEQIQAWMREKQNSDH

SEQ ID NO: 2549 - protein, 1173 aa, Homo sapiens
MEELSADEIRRRRLARLAGGQTSQPTTPLTSPQRENPPGPPIAASAPGPSQSLGLNVHNMTPATSPIGASGVAHRSQSSEGVSSLSSSPSNSLETQSQSLSRSQSMDIDGVSCEKSMSQVDVDSGIENMEVDENDRREKRSLSDKEPSSGPEVSEEQALQLVCKIFRVSWKDRDRDVIFLSSLSAQFKQNPKEVFSDFKDLIGQILMEVLMMSTQTRDENPFASLTATSQPIAAAARSPDRNLLLNTGSNPGTSPMFCSVASFGASSLSSLGASGGASNWDSYSDHFTIETCKETDMLNYLIECFDRVGIEEKKAPKMCSQPAVSQLLSNIRSQCISHTALVLQGSLTQPRSLQQPSFLVPYMLCRNLPYGFIQELVRTTHQDEEVFKQIFIPILQGLALAAKECSLDSDYFKYPLMALGELCETKFGKTHPVCNLVASLRLWLPKSLSPGCGRELQRLSYLGAFFSFSVFAEDDVKVVEKYFSGPAITLENTRVVSQSLQHYLELGRQELFKILHSILLNGETREAALSYMAAVVNANMKKAQMQTDDRLVSTDGFMLNFLWVLQQLSTKIKLETVDPTYIFHPRCRITLPNDETRVNATMEDVNDWLTELYGDQPPFSEPKFPTECFFLTLHAHHLSILPSCRRYIRRLRAIRELNRTVEDLKNNESQWKDSPLATRHREMLKRCKTQLKKLVRCKACADAGLLDESFLRRCLNFYGLLIQLLLRILDPAYPDITLPLNSDVPKVFAALPEFYVEDVAEFLFFIVQYSPQALYEPCTQDIVMFLVVMLCNQNYIRNPYLVAKLVEVMFMTNPAVQPRTQKFFEMIENHPLSTKLLVPSLMKFYTDVEHTGATSEFYDKFTIRYHISTIFKSLWQNIAHHGTFMEEFNSGKQFVRYINMLINDTTFLLDESLESLKRIHEVQEEMKNKEQWDQLPRDQQQARQSQLAQDERVSRSYLALATETVDMFHILTKQVQKPFLRPELGPRLAAMLNFNLQQLCGPKCRDLKVENPEKYGFEPKKLLDQLTDIYLQLDCARFAKAIADDQRSYSKELFEEVISKMRKAGIKSTIAIEKFKLLAEKVEEIVAKNARAEIDYSDAPDEFRDPLMDTLMTDPVRLPSGTIMDRSIILRHLLNSPTDPFNRQTLTESMLEPVPELKEQIQAWMREKQNSDH

SEQ ID NO: 2550 - protein, 1061 aa, Homo sapiens
MSQVDVDSGIENMEVDENDRREKRSLSDKEPSSGPEVSEEQALQLVCKIFRVSWKDRDRDVIFLSSLSAQFKQNPKEVFSDFKDLIGQILMEVLMMSTQTRDENPFASLTATSQPIAAAARSPDRNLLLNTGSNPGTSPMFCSVASFGASSLSSLGASGGASNWDSYSDHFTIETCKETDMLNYLIECFDRVGIEEKKAPKMCSQPAVSQLLSNIRSQCISHTALVLQGSLTQPRSLQQPSFLVPYMLCRNLPYGFIQELVRTTHQDEEVFKQIFIPILQGLALAAKECSLDSDYFKYPLMALGELCETKFGKTHPVCNLVASLRLWLPKSLSPGCGRELQRLSYLGAFFSFSVFAEDDVKVVEKYFSGPAITLENTRVVSQSLQHYLELGRQELFKILHSILLNGETREAALSYMAAVVNANMKKAQMQTDDRLVSTDGFMLNFLWVLQQLSTKIKLETVDPTYIFHPRCRITLPNDETRVNATMEDVNDWLTELYGDQPPFSEPKFPTECFFLTLHAHHLSILPSCRRYIRRLRAIRELNRTVEDLKNNESQWKDSPLATRHREMLKRCKTQLKKLVRCKACADAGLLDESFLRRCLNFYGLLIQLLLRILDPAYPDITLPLNSDVPKVFAALPEFYVEDVAEFLFFIVQYSPQALYEPCTQDIVMFLVVMLCNQNYIRNPYLVAKLVEVMFMTNPAVQPRTQKFFEMIENHPLSTKLLVPSLMKFYTDVEHTGATSEFYDKFTIRYHISTIFKSLWQNIAHHGTFMEEFNSGKQFVRYINMLINDTTFLLDESLESLKRIHEVQEEMKNKEQWDQLPRDQQQARQSQLAQDERVSRSYLALATETVDMFHILTKQVQKPFLRPELGPRLAAMLNFNLQQLCGPKCRDLKVENPEKYGFEPKKLLDQLTDIYLQLDCARFAKAIADDQRSYSKELFEEVISKMRKAGIKSTIAIEKFKLLAEKVEEIVAKNARAEIDYSDAPDEFRGKWTHPLMDTLMTDPVRLPSGTIMDRSIILRHLLNSPTDPFNRQTLTESMLEPVPELKEQIQAWMREKQNSDH

SEQ ID NO: 2551 - protein, 1353 aa, Homo sapiens
MEELSADEIRRRRLARLAGGQTSQPTTPLTSPQRENPPGPPIAASAPGPSQSLGLNVHNMTPATSPIGASGVAHRSQSSEGVSSLSSSPSNSLETQSQSLSRSQSMDIDGVSCEKSMSQVDVDSGIENMEVDENDRREKRSLSDKEPSSGPEVSEEQALQLVCKIFRVSWKDRDRDVIFLSSLSAQFKQNPKEVFSDFKDLIGQILMEVLMMSTQTRDENPFASLTATSQPIAAAARSPDRNLLLNTGSNPGTSPMFCSVASFGASSLSSLYESSPAPTPSFWSSVPVMGPSLASPSRAASQLAVPSTPLSPHSAASGTAAGSQPSSPRYRPYTVTHPWASSGVSILSSSPSPPALASSPQAVPASSSRQRPSSTGPPLPPASPSATSRRPSSLRISPSMYDNPFSFLFLALSGDSSDEEDEEEDDDDGDGDDEGGGGGDDFSCVQFGSSLGASGGASNWDSYSDHFTIETCKETDMLNYLIECFDRVGIEEKKAPKMCSQPAVSQLLSNIRSQCISHTALVLQGSLTQPRSLQQPSFLVPYMLCRNLPYGFIQELVRTTHQDEEVFKQIFIPILQGLALAAKECSLDSDYFKYPLMALGELCETKFGKTHPVCNLVASLRLWLPKSLSPGCGRELQRLSYLGAFFSFSVFAEDDVKVVEKYFSGPAITLENTRVVSQSLQHYLELGRQELFKILHSILLNGETREAALSYMAAVVNANMKKAQMQTDDRLVSTDGFMLNFLWVLQQLSTKIKLETVDPTYIFHPRCRITLPNDETRVNATMEDVNDWLTELYGDQPPFSEPKFPTECFFLTLHAHHLSILPSCRRYIRRLRAIRELNRTVEDLKNNESQWKDSPLATRHREMLKRCKTQLKKLVRCKACADAGLLDESFLRRCLNFYGLLIQLLLRILDPAYPDITLPLNSDVPKVFAALPEFYVEDVAEFLFFIVQYSPQALYEPCTQDIVMFLVVMLCNQNYIRNPYLVAKLVEVMFMTNPAVQPRTQKFFEMIENHPLSTKLLVPSLMKFYTDVEHTGATSEFYDKFTIRYHISTIFKSLWQNIAHHGTFMEEFNSGKQFVRYINMLINDTTFLLDESLESLKRIHEVQEEMKNKEQWDQLPRDQQQARQSQLAQDERVSRSYLALATETVDMFHILTKQVQKPFLRPELGPRLAAMLNFNLQQLCGPKCRDLKVENPEKYGFEPKKLLDQLTDIYLQLDCARFAKAIADDQRSYSKELFEEVISKMRKAGIKSTIAIEKFKLLAEKVEEIVAKNARAEIDYSDAPDEFRDPLMDTLMTDPVRLPSGTIMDRSIILRHLLNSPTDPFNRQTLTESMLEPVPELKEQIQAWMREKQNSDH

SEQ ID NO: 2552 - protein, 764 aa, Homo sapiens
MNGEADCPTDLEMAAPKGQDRWSQEDMLTLLECMKNNLPSNDSSKFKTTESHMDWEKVAFKDFSGDMCKLKWVEISNEVRKFRTLTELILDAQEHVKNPYKGKKLKKHPDFPKKPLTPYFRFFMEKRAKYAKLHPEMSNLDLTKILSKKYKELPEKKKMKYIQDFQREKQEFERNLARFREDHPDLIQNAKKSDIPEKPKTPQQLWYTHEKKVYLKVRPDATTKEVKDSLGKQWSQLSDKKRLKWIHKALEQRKEYEEIMRDYIQKHPELNISEEGITKSTLTKAERQLKDKFDGRPTKPPPNSYSLYCAELMANMKDVPSTERMVLCSQQWKLLSQKEKDAYHKKCDQKKKDYEVELLRFLESLPEEEQQRVLGEEKMLNINKKQATSPASKKPAQEGGKGGSEKPKRPVSAMFIFSEEKRRQLQEERPELSESELTRLLARMWNDLSEKKKAKYKAREAALKAQSERKPGGEREERGKLPESPKRAEEIWQQSVIGDYLARFKNDRVKALKAMEMTWNNMEKKEKLMWIKKAAEDQKRYERELSEMRAPPAATNSSKKMKFQGEPKKPPMNGYQKFSQELLSNGELNHLPLKERMVEIGSRWQRISQSQKEHYKKLAEEQQKQYKVHLDLWVKSLSPQDRAAYKEYISNKRKSMTKLRGPNPKSSRTTLQSKSESEEDDEEDEDDEDEDEEEEDDENGDSSEDGGDSSESSSEDESEDGDENEEDDEDEDDDEDDDEDEDNESEGSSSSSSSSGDSSDSDSN

SEQ ID NO: 2553 - protein, 727 aa, Homo sapiens
MNGEADCPTDLEMAAPKGQDRWSQEDMLTLLECMKNNLPSNDSSKFKTTESHMDWEKVAFKDFSGDMCKLKWVEISNEVRKFRTLTELILDAQEHVKNPYKGKKLKKHPDFPKKPLTPYFRFFMEKRAKYAKLHPEMSNLDLTKILSKKYKELPEKKKMKYIQDFQREKQEFERNLARFREDHPDLIQNAKKSDIPEKPKTPQQLWYTHEKKVYLKVRPDEIMRDYIQKHPELNISEEGITKSTLTKAERQLKDKFDGRPTKPPPNSYSLYCAELMANMKDVPSTERMVLCSQQWKLLSQKEKDAYHKKCDQKKKDYEVELLRFLESLPEEEQQRVLGEEKMLNINKKQATSPASKKPAQEGGKGGSEKPKRPVSAMFIFSEEKRRQLQEERPELSESELTRLLARMWNDLSEKKKAKYKAREAALKAQSERKPGGEREERGKLPESPKRAEEIWQQSVIGDYLARFKNDRVKALKAMEMTWNNMEKKEKLMWIKKAAEDQKRYERELSEMRAPPAATNSSKKMKFQGEPKKPPMNGYQKFSQELLSNGELNHLPLKERMVEIGSRWQRISQSQKEHYKKLAEEQQKQYKVHLDLWVKSLSPQDRAAYKEYISNKRKSMTKLRGPNPKSSRTTLQSKSESEEDDEEDEDDEDEDEEEEDDENGDSSEDGGDSSESSSEDESEDGDENEEDDEDEDDDEDDDEDEDNESEGSSSSSSSSGDSSDSDSN

SEQ ID NO: 2554 - protein, 309 aa, Homo sapiens
MAAAGAPDGMEEPGMDTEAETVATEAPARPVNCLEAEAAAGAAAEDSGAARGSLQPAPAQPPGDPAAQASVSNGEDAGGGAGRELVDLKIIWNKTKHDVKFPLDSTGSELKQKIHSITGLPPAMQKVMYKGLVPEDKTLREIKVTSGAKIMVVGSTINDVLAVNTPKDAAQQDAKAEENKKEPLCRQKQHRKVLDKGKPEDVMPSVKGAQERLPTVPLSGMYNKSGGKVRLTFKLEQDQLWIGTKERTEKLPMGSIKNVVSEPIEGHEDYHMMAFQLGPTEASYYWVYWVPTQYVDAIKDTVLGKWQYF

SEQ ID NO: 2555 - protein, 393 aa, Homo sapiens
MALPRSQGHWSNKDILRLLECMENNRPSDDNSTFSSTQSHMDWGKVAFKNFSGEMCRLKWLEISCNLRKFGTLKELVLEAKKCVKKMNKSQKYRNGPDFPKRPLTAYNRFFKESWPQYSQMYPGMRSQELTKILSKKYRELPEQMKQKYIQDFRKEKQEFEEKLARFREEHPDLVQKAKKSSVSKRTQNKVQKKFQKNIEEVRSLPKTDRFFKKVKFHGEPQKPPMNGYHKFHQDSWSSKEMQHLSVRERMVEIGRRWQRIPQSQKDHFKSQAEELQKQYKVKLDLWLKTLSPENYAAYKESTYAKGKNMAMTGGPDPRLKQADPQSSSAKGLQEGFGEGQGLQAAGTDSSQTIWVNCHVSMEPEENRKKDREKEESSNSSDCSSGEEIEVDV

SEQ ID NO: 2556 - protein, 400 aa, Homo sapiens
MPAKDIKVALPRSQGHWSNADILRLLECMENNLPYDDNGTFSSTQSHMDWGKVAFKNFSGEMCRLKWLEISCSLRKFSTLKKLVLEAKKCVKNTNKSQKGRNHPDFPKRLLTAYIRFFKENWPQYSQMYPGMRSQEVTKILSKKYKELPEQMKQKHIQDFRKEKQEFEEKLARFREEHPDLDQKGKKSDICKRVQTKVQKKVQKNIEEVRSLPKTDQFFKKVKFHGEPQKPPMNGYQKFHQDSWSSKELQHLSLRERMVEIGRRWQRIPQSQKDHYKSQAELLQKEYKVELDLWLKTLSPEDYAAYKESTYAKGKNMAMMGGPAPSLKQTDPQSSSAKGLQEGFGEGQGLQAAGTEASQTIWVNCQVSMEPEDNRKKDGEEEESSNSLDCSSGEDMEVDV

SEQ ID NO: 2557 - protein, 247 aa, Homo sapiens
MSGKDRIEIFPSRMAQTIMKARLKGAQTGRNLLKKKSDALTLRFRQILKKIIETKMLMGEVMREAAFSLAEAKFTAGDFSTTVIQNVNKAQVKIRAKKDNVAGVTLPVFEHYHEGTDSYELTGLARGGEQLAKLKRNYAKAVELLVELASLQTSFVTLDEAIKITNRRVNAIEHVIIPRIERTLAYIITELDEREREEFYRLKKIQEKKKILKEKSEKDLEQRRAAGEVLEPANLLAEEKDEDLLFE

SEQ ID NO: 2558 - protein, 782 aa, Homo sapiens
MNPEKDFAPLTPNIVRALNDKLYEKRKVAALEIEKLVREFVAQNNTVQIKHVIQTLSQEFALSQHPHSRKGGLIGLAACSIALGKDSGLYLKELIEPVLTCFNDADSRLRYYACEALYNIVKVARGAVLPHFNVLFDGLSKLAADPDPNVKSGSELLDRLLKDIVTESNKFDLVSFIPLLRERIYSNNQYARQFIISWILVLESVPDINLLDYLPEILDGLFQILGDNGKEIRKMCEVVLGEFLKEIKKNPSSVKFAEMANILVIHCQTTDDLIQLTAMCWMREFIQLAGRVMLPYSSGILTAVLPCLAYDDRKKSIKEVANVCNQSLMKLVTPEDDELDELRPGQRQAEPTPDDALPKQEGTASGGPDGSCDSSFSSGISVFTAASTERAPVTLHLDGIVQVLNCHLSDTAIGMMTRIAVLKWLYHLYIKTPRKMFRHTDSLFPILLQTLSDESDEVILKDLEVLAEIASSPAGQTDDPGPLDGPDLQASHSELQVPTPGRAGLLNTSGTKGLECSPSTPTMNSYFYKFMINLLKRFSSERKLLEVRGPFIIRQLCLLLNAENIFHSMADILLREEDLKFASTMVHALNTILLTSTELFQLRNQLKDLKTLESQNLFCCLYRSWCHNPVTTVSLCFLTQNYRHAYDLIQKFGDLEVTVDFLAEVDKLVQLIECPIFTYLRLQLLDVKNNPYLIKALYGLLMLLPQSSAFQLLSHRLQCVPNPELLQTEDSLKAAPKSQKADSPSIDYAELLQHFEKVQNKHLEVRHQRSGRGDHLDRRVVL

SEQ ID NO: 2559 - protein, 214 aa, Homo sapiens
MADILLREEDLKFASTMVHALNTILLTSTELFQLRNQLKDLKTLESQNLFCCLYRSWCHNPVTTVSLCFLTQNYRHAYDLIQKFGDLEVTVDFLAEVDKLVQLIECPIFTYLRLQLLDVKNNPYLIKALYGLLMLLPQSSAFQLLSHRLQCVPNPELLQTEDSLKAAPKSQKADSPSIDYAELLQHFEKVQNKHLEVRHQRSGRGDHLDRRVVL

SEQ ID NO: 2560 - protein, 297 aa, Homo sapiens
MSRFKFIDIGINLTDPMFRGIYRGVQKHQDDLQDVIGRAVEIGVKKFMITGGNLQDSKDALHLAQTNGMFFSTVGCHPTRCGEFEKNNPDLYLKELLNLAENNKGKVVAIGECGLDFDRLQFCPKDTQLKYFEKQFELSEQTKLPMFLHCRNSHAEFLDIMKRNRDRCVGGVVHSFDGTKEAAAALIDLDLYIGFNGCSLKTEANLEVLKSIPSEKLMIETDAPWCGVKSTHAGSKYIRTAFPTKKKWESGHCLKDRNEPCHIIQILEIMSAVRDEDPLELANTLYNNTIKVFFPGI

SEQ ID NO: 2561 - protein, 250 aa, Homo sapiens
MITGGNLQDSKDALHLAQTNGMFFSTVGCHPTRCGEFEKNNPDLYLKELLNLAENNKGKVVAIGECGLDFDRLQFCPKDTQLKYFEKQFELSEQTKLPMFLHCRNSHAEFLDIMKRNRDRCVGGVVHSFDGTKEAAAALIDLDLYIGFNGCSLKTEANLEVLKSIPSEKLMIETDAPWCGVKSTHAGSKYIRTAFPTKKKWESGHCLKDRNEPCHIIQILEIMSAVRDEDPLELANTLYNNTIKVFFPGI

SEQ ID NO: 2562 - protein, 278 aa, Homo sapiens
MDKSGIDSLDHVTSDAVELANRSDNSSDSSLFKTQCIPYSPKGEKRNPIRKFVRTPESVHASDSSSDSSFEPIPLTIKAIFERFKNRKKRYKKKKKRRYQPTGRPRGRPEGRRNPIYSLIDKKKQFRSRGSGFPFLESENEKNAPWRKILTFEQAVARGFFNYIEKLKYEHHLKESLKQMNVGEDLENEDFDSRRYKFLDDDGSISPIEESTAEDEDATHLEDNECDIKLAGDSFIVSSEFPVRLSVYLEEEDITEEAALSKKRATKAKNTGQRGLKM

SEQ ID NO: 2563 - protein, 115 aa, Homo sapiens
MARTPGALLLAPLLLLQLATPALVYQDYQYLGQQGEGDSWEQLRLQHLKEVEDSILGPWGKWRCLCDLGKQERSREVVGTAPGPVFMDPEKLIQLRPCRQRDCPSCKPFDCDWRL

SEQ ID NO: 2564 - protein, 642 aa, Homo sapiens
MYPAGPPAGPVPRRGRRPLPGPPAPAPAPVPAARPPPPAPGPRPRVAVKMAFRKAYSIKDKLQAIERVKGGERQASVCRDFGVPGGTLRGWLKDEPKLRWFLEQLGGEVGTQRKKMRLANEEEIDRAVYAWFLALRQHGVPLSGPLIQAQAEAFARQIYGPECTFKASHGWFWRWQKRHGISSQRFYGEAGPPAPSPAPGPPVKEEPALPSGAGPLPDRAPAPPPPAEGGYGDEQIYSASVTGLYWKLLPEQAAPPGAGDPGAGGCGRRWRGDRVTVLLAANLTGSHKLKPLVIGRLPDPPSLRHHNQDKFPASYRYSPDAWLSRPLLRGWFFEEFVPGVKRYLRRSCLQQKAVLLVAHPPCPSPAASMPALDSEDAPVRCRPEPLGPPEELQTPDGAVRVLFLSKGSSRAHIPAPLEQGVVAAFKQLYKRELLRLAVSCASGSPLDFMRSFMLKDMLYLAGLSWDLVQAGSIERCWLLGLRAAFEPRPGEDSAGQPAQAEEAAEHSRVLSDLTHLAALAYKCLAPEEVAEWLHLDDDGGPPEGCREEVGPALPPAAPPAPASLPSAMGGGEDEEEATDYGGTSVPTAGEAVRGLETALRWLENQDPREVGPLRLVQLRSLISMARRLGGIGHTPAGPYDGV

SEQ ID NO: 2565 - protein, 593 aa, Homo sapiens
MAFRKAYSIKDKLQAIERVKGGERQASVCRDFGVPGGTLRGWLKDEPKLRWFLEQLGGEVGTQRKKMRLANEEEIDRAVYAWFLALRQHGVPLSGPLIQAQAEAFARQIYGPECTFKASHGWFWRWQKRHGISSQRFYGEAGPPAPSPAPGPPVKEEPALPSGAGPLPDRAPAPPPPAEGGYGDEQIYSASVTGLYWKLLPEQAAPPGAGDPGAGGCGRRWRGDRVTVLLAANLTGSHKLKPLVIGRLPDPPSLRHHNQDKFPASYRYSPDAWLSRPLLRGWFFEEFVPGVKRYLRRSCLQQKAVLLVAHPPCPSPAASMPALDSEDAPVRCRPEPLGPPEELQTPDGAVRVLFLSKGSSRAHIPAPLEQGVVAAFKQLYKRELLRLAVSCASGSPLDFMRSFMLKDMLYLAGLSWDLVQAGSIERCWLLGLRAAFEPRPGEDSAGQPAQAEEAAEHSRVLSDLTHLAALAYKCLAPEEVAEWLHLDDDGGPPEGCREEVGPALPPAAPPAPASLPSAMGGGEDEEEATDYGGTSVPTAGEAVRGLETALRWLENQDPREVGPLRLVQLRSLISMARRLGGIGHTPAGPYDGV

SEQ ID NO: 2566 - protein, 525 aa, Homo sapiens
MLGKRKRVVLTIKDKLDIIKKLEEGISFKKLSVVYGIGESTVRDIKKNKERIINYANSSDPTSGVSKRKSMKSSTYEELDRVMIEWFNQQKTDGIPVSGTICAKQAKFFFDALGMEGDFNASSGWLTRFKQRHGIPKAAGKGTKLKGDETAAREFCGSFQEFVEKENLQPEQIYGADQTGLFWKCLPSRTLTLETDQSTSGCRSSRERIIIMCCANATGLHKLNLCVVGKAKKPRAFKGTDLSNLPVTYYSQKGAWIEQSVFRQWFEKYFVPQVQKHLKSKGLLEKAVLLLDFPPARPNEEMLSSDDGRIIVKYLPPNVTSLIQPMSQGVLATVKRYYRAGLLQKYMDEGNDPKIFWKNLTVLDAIYEVSRAWNMVKSSTITKAWKKLFPGNEENSGMNIDEGAILAANLATVLQNTEECEHVDIENIDQWFDSRSSDSSCQVLTDSESAEDQTKAAEQKPSSKSRKTELNPEKHISHKAALEWTENLLDYLEQQDDMLLSDKLVLRRLRTIIRKKQKIQNNKNH

SEQ ID NO: 2567 - protein, 505 aa, Homo sapiens
MATGALLPCSRPCPMSRLDFLKASHFSLGPDLRLHEGTMRTTSHRDFAYPAATREPPSLQPPPALLFPMDPRWDREERVSEAHRAFPPPSTPPWELLQAQARERTLAMQAGNLHLHEDAHAGIGLSNAHAAYGWPELPARTRERIRGARLIFDRDSLPPGDRDKLRIPPTTHQALFPPHDARPQPRAPSCHLGGPNTLKWDYTRQDGTSYQRQFQALPGPPALRCKRASSGVELGDCKISYGSTCSEQKQAYRPQDLPEDRYDKAQATAHIHCVNIRPGDGLFRDRTTKAEHFYAREPEPFVLHHDQTPESHILKGNWCPGPGSLDTFMQYFYGQPPPPTQPPSRHVPHEKLQSHVTLGEPKLLKRFFKTTMGSDYCPSEWRQVQKAPNLHLQQSYLPRGTGEFDFLTMNQKMLKPHRTPPAPVTEEMLQRCKYSHMEPPLGGLRFFSTQYKDEFPFKYQGPAALRLKNPQEGFVPLGTPHQRGCREKIDPLVPQPPMYLCPSQQ

SEQ ID NO: 2568 - protein, 545 aa, Homo sapiens
MLQDKGLSESEEAFRAPGPALGEASAANAPEPALAAPGLSGAALGSPPGPGADVVAAAAAEQTIENIKVGLHEKELWKKFHEAGTEMIITKAGRRMFPSYKVKVTGMNPKTKYILLIDIVPADDHRYKFCDNKWMVAGKAEPAMPGRLYVHPDSPATGAHWMRQLVSFQKLKLTNNHLDPFGHIILNSMHKYQPRLHIVKADENNAFGSKNTAFCTHVFPETSFISVTSYQNHKITQLKIENNPFAKGFRGSDDSDLRVARLQSKEYPVISKSIMRQRLISPQLSATPDVGPLLGTHQALQHYQHENGAHSQLAEPQDLPLSTFPTQRDSSLFYHCLKRRDGTRHLDLPCKRSYLEAPSSVGEDHYFRSPPPYDQQMLSPSYCSEVTPREACMYSGSGPEIAGVSGVDDLPPPPLSCNMWTSVSPYTSYSVQTMETVPYQPFPTHFTATTMMPRLPTLSAQSSQPPGNAHFSVYNQLSQSQVRERGPSASFPRERGLPQGCERKPPSPHLNAANEFLYSQTFSLSRESSLQYHSGMGTVENWTDG

SEQ ID NO: 2569 - protein, 546 aa, Homo sapiens
MLQDKGLSESEEAFRAPGPALGEASAANAPEPALAAPGLSGAALGSPPGPGADVVAAAAAEQTIENIKVGLHEKELWKKFHEAGTEMIITKAGRRMFPSYKVKVTGMNPKTKYILLIDIVPADDHRYKFCDNKWMVAGKAEPAMPGRLYVHPDSPATGAHWMRQLVSFQKLKLTNNHLDPFGHIILNSMHKYQPRLHIVKADENNAFGSKNTAFCTHVFPETSFISVTSYQNHKITQLKIENNPFAKGFRGSDDSDLRVARLQSKEYPVISKSIMRQRLISPQLSATPDVGPLLGTHQALQHYQHENGAHSQLAEPQDLPLSTFPTQRDSSLFYHCLKRRADGTRHLDLPCKRSYLEAPSSVGEDHYFRSPPPYDQQMLSPSYCSEVTPREACMYSGSGPEIAGVSGVDDLPPPPLSCNMWTSVSPYTSYSVQTMETVPYQPFPTHFTATTMMPRLPTLSAQSSQPPGNAHFSVYNQLSQSQVRERGPSASFPRERGLPQGCERKPPSPHLNAANEFLYSQTFSLSRESSLQYHSGMGTVENWTDG

SEQ ID NO: 2570 - protein, 2109 aa, Homo sapiens
MDALESLLDEVALEGLDGLCLPALWSRLETRVPPFPLPLEPCTQEFLWRALATHPGISFYEEPRERPDLQLQDRYEEIDLETGILESRRDPVALEDVYPIHMILENKDGIQGSCRYFKERKNITNDIRTKSLQPRCTMVEAFDRWGKKLIIVASQAMRYRALIGQEGDPDLKLPDFSYCILERLGRSRWQGELQRDLHTTAFKVDAGKLHYHRKILNKNGLITMQSHVIRLPTGAQQHSILLLLNRFHVDRRSKYDILMEKLSVMLSTRTNHIETLGKLREELGLCERTFKRLYQYMLNAGLAKVVSLRLQEIHPECGPCKTKKGTDVMVRCLKLLKEFKRNDHDDDEDEEVISKTVPPVDIVFERDMLTQTYDLIERRGTKGISQAEIRVAMNVGKLEARMLCRLLQRFKVVKGFMEDEGRQRTTKYISCVFAEESDLSRQYQREKARSELLTTVSLASMQEESLLPEGEDTFLSESDSEEERSSSKRRGRGSQKDTRASANLRPKTQPHHSTPTKGGWKVVNLHPLKKQPPSFPGAAEERACQSLASRDSLLDTSSVSEPNVSFVSHCADSNSGDIAVIEEVRMENPKESSSSLKTGRHSSGQDKPHETYRLLKRRNLIIEAVTNLRLIESLFTIQKMIMDQEKQEGVSTKCCKKSIVRLVRNLSEEGLLRLYRTTVIQDGIKKKVDLVVHPSMDQNDPLVRSAIEQVRFRISNSSTANRVKTSQPPVPQGEAEEDSQGKEGPSGSGDSQLSASSRSESGRMKKSDNKMGITPLRNYHPIVVPGLGRSLGFLPKMPRLRVVHMFLWYLIYGHPASNTVEKPSFISERRTIKQESGRAGVRPSSSGSAWEACSEAPSKGSQDGVTWEAEVELATETVYVDDASWMRYIPPIPVHRDFGFGWALVSDILLCLPLSIFIQIVQVSYKVDNLEEFLNDPLKKHTLIRFLPRPIRQQLLYKRRYIFSVVENLQRLCYMGLLQFGPTEKFQDKDQVFIFLKKNAVIVDTTICDPHYNLARSSRPFERRLYVLNSMQDVENYWFDLQCVCLNTPLGVVRCPRVRKNSSTDQGSDEEGSLQKEQESAMDKHNLERKCAMLEYTTGSREVVDEGLIPGDGLGAAGLDSSFYGHLKRNWIWTSYIINQAKKENTAAENGLTVRLQTFLSKRPMPLSARGNSRLNIWGEARVGSELCAGWEEQFEVDREPSLDRNRRVRGGKSQKRKRLKKDPGKKIKRKKKGEFPGEKSKRLRYHDEADQSALQRMTRLRVTWSMQEDGLLVLCRIASNVLNTKVKGPFVTWQVVRDILHATFEESLDKTSHSVGRRARYIVKNPQAYLNYKVCLAEVYQDKALVGDFMNRRGDYDDPKVCANEFKEFVEKLKEKFSSALRNSNLEIPDTLQELFARYRVLAIGDEKDQTRKEDELNSVDDIHFLVLQNLIQSTLALSDSQMKSYQSFQTFRLYREYKDHVLVKAFMECQKRSLVNRRRVNHTLGPKKNRALPFVPMSYQLSQTYYRIFTWRFPSTICTESFQFLDRMRAAGKLDQPDRFSFKDQDNNEPTNDMVAFSLDGPGGNCVAVLTLFSLGLISVDVRIPEQIIVVDSSMVENEVIKSLGKDGSLEDDEDEEDDLDEGVGGKRRSMEVKPAQASHTNYLLMRGYYSPGIVSTRNLNPNDSIVVNSCQMKFQLRCTPVPARLRPAAAPLEELTMGTSCLPDTFTKLINPQENTCSLEEFVLQLELSGYSPEDLTAALEILEAIIATGCFGIDKEELRRRFSALEKAGGGRTRTFADCIQALLEQHQVLEVGGNTARLVAMGSAWPWLLHSVRLKDREDADIQREDPQARPLEGSSSEDSPPEGQAPPSHSPRGTKRRASWASENGETDAEGTQMTPAKRPALQDSNLAPSLGPGAEDGAEAQAPSPPPALEDTAAAGAAQEDQEGVGEFSSPGQEQLSGQAQPPEGSEDPRGFTESFGAANISQAARERDCESVCFIGRPWRVVDGHLNLPVCKGMMEAMLYHIMTRPGIPESSLLRHYQGVLQPVAVLELLQGLESLGCIRKRWLRKPRPVSLFSTPVVEEVEVPSSLDESPMAFYEPTLDCTLRLGRVFPHEVNWNKWIHL

SEQ ID NO: 2571 - protein, 2084 aa, Homo sapiens
MDALESLLDEVALEGLDGLCLPALWSRLETRVPPFPLPLEPCTQEFLWRALATHPGISFYEEPRERPDLQLQDRYEEIDLETGILESRRDPVALEDVYPIHMILENKDGIQGSCRYFKERKNITNDIRTKSLQPRCTMVEAFDRWGKKLIIVASQAMRYRALIGQEGDPDLKLPDFSYCILERLGRSRWQGELQRDLHTTAFKVDAGKLHYHRKILNKNGLITMQSHVIRLPTGAQQHSILLLLNRFHVDRRSKYDILMEKLSVMLSTRTNHIETLGKLREELGLCERTFKRLYQYMLNAGLAKVVSLRLQEIHPECGPCKTKKGTDVMVRCLKLLKEFKRNDHDDDEDEEVISKTVPPVDIVFERDMLTQTYDLIERRGTKGISQAEIRVAMNVGKLEARMLCRLLQRFKVVKGFMEDEGRQRTTKYISCVFAEESDLSRQYQREKARSELLTTVSLASMQEESLLPEGEDTFLSESDSEEERSSSKRRGRGSQKDTRASANLRPKTQPHHSTPTKGGWKVVNLHPLKKQPPSFPGAAEERACQSLASRDSLLDTSSVSEPNVSFVSHCADSNSGDIAVIEEVRMENPKESSSSLKTGRHSSGQDKPHETYRLLKRRNLIIEAVTNLRLIESLFTIQKMIMDQEKQEGVSTKCCKKSIVRLVRNLSEEGLLRLYRTTVIQDGIKKKVDLVVHPSMDQNDPLVRSAIEQVRFRISNSSTANRVKTSQPPVPQGEAEEDSQGKEGPSGSGDSQLSASSRSESGRMKKSDNKMGITPLRNYHPIVVPGLGRSLGFLPKMPRLRVVHMFLWYLIYGHPASNTVEKPSFISERRTIKQESGRAGVRPSSSGSAWEACSEAPSKGSQDGVTWEAEVELATETVYVDDASWMRYIPPIPVHRDFGFGWALVSDILLCLPLSIFIQIVQVSYKVDNLEEFLNDPLKKHTLIRFLPRPIRQQLLYKRRYIFSVVENLQRLCYMGLLQFGPTEKFQDKDQVFIFLKKNAVIVDTTICDPHYNLARSSRPFERRLYVLNSMQDVENYWFDLQCVCLNTPLGVVRCPRVRKNSSTDQGSDEEGSLQKEQESAMDKHNLERKCAMLEYTTGSREVVDEGLIPGDGLGAAGLDSSFYGHLKRNWIWTSYIINQAKKENTAAENGLTVRLQTFLSKRPMPLSARGNSRLNIWGEARVGSELCAGWEEQFEVDREPSLDRNRRVRGGKSQKRKRLKKDPGKKIKRKKKGEFPGEKSKRLRYHDEADQSALQRMTRLRVTWSMQEDGLLVLCRIASNVLNTKVKGPFVTWQVVRDILHATFEESLDKTSHSVGRRARYIVKNPQAYLNYKVCLAEVYQDKALVGDFMNRRGDYDDPKVCANEFKEFVEKLKEKFSSALRNSNLEIPDTLQELFARYRVLAIGDEKDQTRKEDELNSVDDIHFLVLQNLIQSTLALSDSQMKSYQSFQTFRLYREYKDHVLVKAFMECQKRSLVNRRRVNHTLGPKKNRALPFVPMSYQLSQTYYRIFTWRFPSTICTESFQFLDRMRAAGKLDQPDRFSFKDQDNNEPTNDMVAFSLDGPGGNCVAVLTLFSLGLISVDVRIPEQIIVVDSSMVENEVIKSLGKDGSLEDDEDEEDDLDEGVGGKRRSMEVKPAQASHTNYLLMRGYYSPGIVSTRNLNPNDSIVVNSCQMKFQLRCTPVPARLRPAAAPLEELTMGTSCLPDTFTKLINPQENTCSLEEFVLQLELSGYSPEDLTAALEILEAIIATGCFGIDKEELRRRFSALEKAGGGRTRTFADCIQALLEQHQVLEVGGNTARLVAMGSAWPWLLHSVRLKDREDADIQREDPQARPLEGSSSEDSPPEGQAPPSHSPRGTKRRASWASENGETDAEGTQMTPAKRPALQDSNLAPSLGPGAEDGAEAQAPSPPPALEDTAAAGAAQEDQEGVGFTESFGAANISQAARERDCESVCFIGRPWRVVDGHLNLPVCKGMMEAMLYHIMTRPGIPESSLLRHYQGVLQPVAVLELLQGLESLGCIRKRWLRKPRPVSLFSTPVVEEVEVPSSLDESPMAFYEPTLDCTLRLGRVFPHEVNWNKWIHL

SEQ ID NO: 2572 - protein, 121 aa, Homo sapiens
MSLHGILASAGTIGAVAAWLMSYKPALFGFLFLLLLLSNWLVKYEHKLTLPEPQQDEILQRLLFSEMKMKVLENQMFIIWNKMNHHGRSSRHRNFPMKKHRMRRHESICPTLSDCTSSSPS

SEQ ID NO: 2573 - protein, 134 aa, Homo sapiens
MSYKPALFGFLFLLLLLSNWLVKYEHKLTLPEPQQEEEKPKTSENDSKNSKAVNTKEVNRTHACFALQDEILQRLLFSEMKMKVLENQMFIIWNKMNHHGRSSRHRNFPMKKHRMRRHESICPTLSDCTSSSPS

SEQ ID NO: 2574 - protein, 904 aa, Homo sapiens
MPQLLRNVLCVIETFHKYASEDSNGATLTGRELKQLIQGEFGDFFQPCVLHAVEKNSNLLNIDSNGIISFDEFVLAIFNLLNLCYLDIKSLLSSELRQVTKPEKEKLDDVDVQATTGDGQWTVGTSPTQEKRMLPSGMASSSQLIPEESGAVGNNRVDPWREAKTHNFPGEASEHNDPKNKHLEGDEQSQEVAQDIQTTEDNEGQLKTNKPMAGSKKTSSPTERKGQDKEISQEGDEPAREQSVSKIRDQFGEQEGNLATQSSPPKEATQRPCEDQEVRTEKEKHSNIQEPPLQREDEPSSQHADLPEQAAARSPSQTQKSTDSKDVCRMFDTQEPGKDADQTPAKTKNLGEPEDYGRTSETQEKECETKDLPVQYGSRNGSETSDMRDERKERRGPEAHGTAGQKERDRKTRPLVLETQTQDGKYQELQGLSKSKDAEKGSETQYLSSEGGDQTHPELEGTAVSGEEAEHTKEGTAEAFVNSKNAPAAERTLGARERTQDLAPLEKQSVGENTRVTKTHDQPVEEEDGYQGEDPESPFTQSDEGSSETPNSLASEEGNSSSETGELPVQGDSQSQGDQHGESVQGGHNNNPDTQRQGTPGEKNRALEAVVPAVRGEDVQLTEDQEQPARGEHKNQGPGTKGPGAAVEPNGHPEAQESTAGDENRKSLEIEITGALDEDFTDQLSLMQLPGKGDSRNELKVQGPSSKEEKGRATEAQNTLLESLDEDNSASLKIQLETKEPVTSEEEDESPQELAGEGGDQKSPAKKEHNSSVPWSSLEKQMQRDQEPCSVERGAVYSSPLYQYLQEKILQQTNVTQEEHQKQVQIAQASGPELCSVSLTSEISDCSVFFNYSQASQPYTRGLPLDESPAGAQETPAPQALEDKQGHPQRERLVLQREASTTKQ

SEQ ID NO: 2575 - protein, 105 aa, Homo sapiens
MVKQIESKTAFQEALDAAGDKLVVVDFSATWCGPCKMIKPFFHSLSEKYSNVIFLEVDVDDCQDVASECEVKCMPTFQFFKKGQKVGEFSGANKEKLEATINELV

SEQ ID NO: 2576 - protein, 85 aa, Homo sapiens
MVKQIESKTAFQEALDAAGDKLVVVDFSATWCGPCKMIKPFFHDVASECEVKCMPTFQFFKKGQKVGEFSGANKEKLEATINELV

SEQ ID NO: 2577 - protein, 498 aa, Homo sapiens
MALPTLPSYWCSQQRLNQQLARQREQEARLRQQWEQNSRYFRMSDICSSKQAEWSSKTSYQRSMHAYQREKMKEEKRRSLEARREKLRQLMQEEQDLLARELEELRLSMNLQERRIREQHGKLKSAKEEQRKLIAEQLLYEHWKKNNPKLREMELDLHQKHVVNSWEMQKEEKKQQEATAEQENKRYENEYERARREALERMKAEEERRQLEDKLQAEALLQQMEELKLKEVEATKLKKEQENLLKQRWELERLEEERKQMEAFRQKAELGRFLRHQYNAQLSRRTQQIQEELEADRRILQALLEKEDESQRLHLARREQVMADVAWMKQAIEEQLQLERAREAELQMLLREEAKEMWEKREAEWARERSARDRLMSEVLTGRQQQIQEKIEQNRRAQEESLKHREQLIRNLEEVRELARREKEESEKLKSARKQELEAQVAERRLQAWEADQQEEEEEEEARRVEQLSDALLQQEAETMAEQGYRPKPYGHPKIAWN

SEQ ID NO: 2578 - protein, 1934 aa, Homo sapiens
MDSTSFLPTFLDVDLTISHIKCLPKDILVKFQGIKSNECEFDYHVLQREIQHTPKVKNNVEIDEFCLVEERVSGEWQRGRVMEKKNELYTVLLIDRGEELRVAGPQIASACGNLFELPPRVVFGIFANILPVGEKWSPKALNYFKSLVGIQVKGYVQAILPLQMFLFEVPKIISQALELQLGRLVDGDSFRLIVEMLEEFPQQMPDLLQHKRPELSLGNKDTSLDIQHVLDKLQPSLSVGSTESVKVSSALSPSKFYCQLIKWTPELENLTAHMTLHYDTVCQETSPTCDNFGLLCVARRRNGQWHRGILQQLLPPNQVKIWFMDYGSSEAIPSIYVKKLKQDFILVPLFSFPCSLTCLHSPDRDARIFQLSIFKQALLGQVVYAHIDWFNKDECLYYVTLQTQESTVNSKCLLKTVGTQVLCPMSDSKISNILSETSVSDVNSFAVESFMGNIEWSIDSLNKKGILKVGFPIKTVQMEIEAAYIAFIAYVLNPSNFWVRTNDHRNEFQEIMKNINKFYDLCENDEMILRKPEPGLFCCARYSKDRRFYRAVITEINGYKINVYFLDYGNTDSIPFFDVKILLPEFCELPALAMCCSLAHIFPVEDLWTKAAIDYFKKLVLNKAILLQVIAKKDDKYTVNIQSVEASENIDVISLMLQAGYAEYFQVELEYFPKSVSEYSMLNSESKNKVNIKKVISALLEGPKSKKYHSNNLVENNLSLPKSLAVNISEFKNPFTLSVGPESSWPYKEYIFRPGTVLEVKCSCYYGPGDFSCQLQCKSEDLKLLMEQIQNYYSIHSDPYEIGQTACVAKYSGKWCRAAVLTQVSKEVDIVFVDYGYQKRVLIEDLCAINPRFLLLESQAFRCCLNHFIEPVSCKLFSWTRKAFRDLWNFISSSRGLLTCIIYALVIIHPNHLYNLVDLQSSFTSAKEFLMNRGSAQYITLSETFPSLFSLYSYCYSSFNIQIGSEEEVYISHIYSPQKFYCQLGRNNKDLEMIETKITESVNLQNFPKYDSNKMRVCISKYVEDGLSYRALAIPTDSSSEFQVYFVDFGNKQLVGENMLRAISAQFPELLFTPMQAIKCFLSDLRDVDIPAEISSWFKDNFLGRSLKAIILSQESDGQLGIELYDGSQYINEKIKVLLHAYGKRHCDQACCMEKSNKINENKRFTTSLKGKTGNNYRHNVINKPSPVTYSERKIDQLMHPKNIHARFLKPSVCYKMEPVSKNKMKTSLNDGLKGIKIVPGAAHILENRRVGQKSVKVVSQSFIRALNQTTSQNPYDLIRPQIKDLPQPQIYLNAKVKGYVSNISNPANFHIQLAENESVIIRLADALNATARRLRERKSVKPLVGDLVVAEYSGDNAIYRAVIKKILPGNSFEVEFIDYGNSAIVNTSKIYELQREFLTVPQLGIHAFLSGVKWNEPDEIWDDKTVDYFTSKVHNKTVYCEFLKKHDQKWEVNMICDEKCVINELLKWKACSKLQKSALQMPQVLSQKVRPGDNEMKKGKSNESEGSMNSNQQLFKIPLEEFKLGQLEKAEMLNVSKSGRFYVKLSKNKKILSDLIVLITKEEKKSPFLSMESIEKGLECLAKSKNTLKWHRSKVEEKYVDDKVLVFLVDCGIYEIVPVCNTKLLSNEIRNIPRQAVPCKWIWFENSKNISFECLFADLEINILFLKYLDAVWEVEILVDDLLLLEYLNLNTVPVEENKLRLAEIVYNIESKTPVSSCTIKSFTWVQFQNDRQYSGIATAVSDPSDFSIQLEDFFDIMKYLFMLLSDLPETLQTLPQEFIIPGSSCLFKYKSEDQWNRVEISEVSPQSLCLVLVDYGFSFYIRYSEIINLKVVPEELLNLPRLSYPCILYGILPAKGKHWSEEAKIFFRDFLSKPDLVFQFREYHSETKLKVDVIHEKNNLADILVASGLATYSKDSPHLDAITATESAKNPI

SEQ ID NO: 2579 - protein, 686 aa, Homo sapiens
MSFPRGSQTQKIKHPIGTRKGPLEVPPPTEKDWPKDDEQDHVLVDPDEELDSLPQPYRMINKLVNLLFDQSWEIIEERNALREAESSQIQPTVYPPLGEIQLNKMPNCMAVSQDYVFIGGAKGFSIYNLYSAKQIYAWEKLKVDVTSIWATDLGNEILIAPVDEMGIIRLFYFYKEGLYLVKAINEVDDTSKQTTCIKMEISQGGDFAAFLLQGAGDIWLDVYKLPKETWLKKLEHPQLTSNPKKKVRQPQLNSLGPISADPLEMDANVSFKGDIKLSLPVYIMKIKPPKPVTGTTFKSPLEVFAKIKDCYGLGSGQNHFIKDSQWEQQAEIFNASYKKYLDREWEEEPLSTATFYFLLPSCLFAMPPEVKGPSGMACVLGIHWTRSHNFFLYSLNRTLKDKADPEGVWPCAAPIAVSQLSCSSSYLVLACEDGVLTLWDLAKGFPLGVAALPQGCFCQSIHFLKYFSVHKGQNMYPEGQVKSQMKCVVLCTDASLHLVEASGTQGPTISVLVERPVKHLDKTICAVAPVPALPGMVLIFSKNGSVCLMDVAKREIICAFAPPGAFPLEVPWKPVFAVSPDHPCFLLRGDYSHETASTDDAGIQYSVFYFNFEACPLLENISKNCTIPQRDLDNMAFPQALPLEKRCERFLQKSYRKLEKNPEKEEEHWARLQRYSLSLQRENFKK

SEQ ID NO: 2580 - protein, 658 aa, Homo sapiens
MSFPRGSQTQKIKHPIGTRKGPLEVPPPTEKDWPKDDEQDHVLVDPDEELDSLPQPYRMINKLVNLLFDQSWEIIEERNALREAESSQIQPTVYPPLGEIQLNKMPNCMAVSQDYVFIGGAKGFSIYNLYSAKQIYAWEKLKVDVTSIWATDLGNEILIAPVDEMGIIRLFYFYKEGLYLVKAINEVDDTSKQTTCIKMEISQGGDFAAFLLQGAGDIWLDVYKLPKETWLKKLEHPQLTSNPKKKVRQPQLNSLGPISADPLEMDANVSFKGDIKLSLPVYIMKIKPPKPVTGTTFKSPLEVFAKIKDCYGLGSGQNHFIKDSQWEQQAEIFNASYKKYLDREWEEEPLSTATFYFLLPSCLFAMPPEVKGPSGMACVLGIHWTRSHNFFLYSLNRTLKDKADPEGVWPCAAPIAVSQLSCSSSYLVLACEDGVLTLWDLAKGQNMYPEGQVKSQMKCVVLCTDASLHLVEASGTQGPTISVLVERPVKHLDKTICAVAPVPALPGMVLIFSKNGSVCLMDVAKREIICAFAPPGAFPLEVPWKPVFAVSPDHPCFLLRGDYSHETASTDDAGIQYSVFYFNFEACPLLENISKNCTIPQRDLDNMAFPQALPLEKRCERFLQKSYRKLEKNPEKEEEHWARLQRYSLSLQRENFKK

SEQ ID NO: 2581 - protein, 2725 aa, Homo sapiens
MEQTDCKPYQPLPKVKHEMDLAYTSSSDESEDGRKPRQSYNSRETLHEYNQELRMNYNSQSRKRKEVEKSTQEMEFCETSHTLCSGYQTDMHSVSRHGYQLEMGSDVDTETEGAASPDHALRMWIRGMKSEHSSCLSSRANSALSLTDTDHERKSDGENGFKFSPVCCDMEAQAGSTQDVQSSPHNQFTFRPLPPPPPPPHACTCARKPPPAADSLQRRSMTTRSQPSPAAPAPPTSTQDSVHLHNSWVLNSNIPLETRHFLFKHGSGSSAIFSAASQNYPLTSNTVYSPPPRPLPRSTFSRPAFTFNKPYRCCNWKCTALSATAITVTLALLLAYVIAVHLFGLTWQLQPVEGELYANGVSKGNRGTESMDTTYSPIGGKVSDKSEKKVFQKGRAIDTGEVDIGAQVMQTIPPGLFWRFQITIHHPIYLKFNISLAKDSLLGIYGRRNIPPTHTQFDFVKLMDGKQLVKQDSKGSDDTQHSPRNLILTSLQETGFIEYMDQGPWYLAFYNDGKKMEQVFVLTTAIEIMDDCSTNCNGNGECISGHCHCFPGFLGPDCARDSCPVLCGGNGEYEKGHCVCRHGWKGPECDVPEEQCIDPTCFGHGTCIMGVCICVPGYKGEICEEEDCLDPMCSNHGICVKGECHCSTGWGGVNCETPLPVCQEQCSGHGTFLLDAGVCSCDPKWTGSDCSTELCTMECGSHGVCSRGICQCEEGWVGPTCEERSCHSHCTEHGQCKDGKCECSPGWEGDHCTIAHYLDAVRDGCPGLCFGNGRCTLDQNGWHCVCQVGWSGTGCNVVMEMLCGDNLDNDGDGLTDCVDPDCCQQSNCYISPLCQGSPDPLDLIQQSQTLFSQHTSRLFYDRIKFLIGKDSTHVIPPEVSFDSRRACVIRGQVVAIDGTPLVGVNVSFLHHSDYGFTISRQDGSFDLVAIGGISVILIFDRSPFLPEKRTLWLPWNQFIVVEKVTMQRVVSDPPSCDISNFISPNPIVLPSPLTSFGGSCPERGTIVPELQVVQEEIPIPSSFVRLSYLSSRTPGYKTLLRILLTHSTIPVGMIKVHLTVAVEGRLTQKWFPAAINLVYTFAWNKTDIYGQKVWGLAEALVSVGYEYETCPDFILWEQRTVVLQGFEMDASNLGGWSLNKHHILNPQSGIIHKGNGENMFISQQPPVISTIMGNGHQRSVACTNCNGPAHNNKLFAPVALASGPDGSVYVGDFNFVRRIFPSGNSVSILELSTSPAHKYYLAMDPVSESLYLSDTNTRKVYKLKSLVETKDLSKNFEVVAGTGDQCLPFDQSHCGDGGRASEASLNSPRGITVDRHGFIYFVDGTMIRKIDENAVITTVIGSNGLTSTQPLSCDSGMDITQVRLEWPTDLAVNPMDNSLYVLDNNIVLQISENRRVRIIAGRPIHCQVPGIDHFLVSKVAIHSTLESARAISVSHSGLLFIAETDERKVNRIQQVTTNGEIYIIAGAPTDCDCKIDPNCDCFSGDGGYAKDAKMKAPSSLAVSPDGTLYVADLGNVRIRTISRNQAHLNDMNIYEIASPADQELYQFTVNGTHLHTLNLITRDYVYNFTYNSEGDLGAITSSNGNSVHIRRDAGGMPLWLVVPGGQVYWLTISSNGVLKRVSAQGYNLALMTYPGNTGLLATKSNENGWTTVYEYDPEGHLTNATFPTGEVSSFHSDLEKLTKVELDTSNRENVLMSTNLTATSTIYILKQENTQSTYRVNPDGSLRVTFASGMEIGLSSEPHILAGAVNPTLGKCNISLPGEHNANLIEWRQRKEQNKGNVSAFERRLRAHNRNLLSIDFDHITRTGKIYDDHRKFTLRILYDQTGRPILWSPVSRYNEVNITYSPSGLVTFIQRGTWNEKMEYDQSGKIISRTWADGKIWSYTYLEKSVMLLLHSQRRYIFEYDQPDCLLSVTMPSMVRHSLQTMLSVGYYRNIYTPPDSSTSFIQDYSRDGRLLQTLHLGTGRRVLYKYTKQARLSEVLYDTTQVTLTYEESSGVIKTIHLMHDGFICTIRYRQTGPLIGRQIFRFSEEGLVNARFDYSYNNFRVTSMQAVINETPLPIDLYRYVDVSGRTEQFGKFSVINYDLNQVITTTVMKHTKIFSANGQVIEVQYEILKAIAYWMTIQYDNVGRMVICDIRVGVDANITRYFYEYDADGQLQTVSVNDKTQWRYSYDLNGNINLLSHGKSARLTPLRYDLRDRITRLGEIQYKMDEDGFLRQRGNDIFEYNSNGLLQKAYNKASGWTVQYYYDGLGRRVASKSSLGQHLQFFYADLTNPIRVTHLYNHTSSEITSLYYDLQGHLIAMELSSGEEYYVACDNTGTPLAVFSSRGQVIKEILYTPYGDIYHDTYPDFQVIIGFHGGLYDFLTKLVHLGQRDYDVVAGRWTTPNHHIWKQLNLLPKPFNLYSFENNYPVGKIQDVAKYTTDIRSWLELFGFQLHNVLPGFPKPELENLELTYELLRLQTKTQEWDPGKTILGIQCELQKQLRNFISLDQLPMTPRYNDGRCLEGGKQPRFAAVPSVFGKGIKFAIKDGIVTADIIGVANEDSRRLAAILNNAHYLENLHFTIEGRDTHYFIKLGSLEEDLVLIGNTGGRRILENGVNVTVSQMTSVLNGRTRRFADIQLQHGALCFNIRYGTTVEEEKNHVLEIARQRAVAQAWTKEQRRLQEGEEGIRAWTEGEKQQLLSTGRVQGYDGYFVLSVEQYLELSDSANNIHFMRQSEIGRR

SEQ ID NO: 2582 - protein, 2732 aa, Homo sapiens
MEQTDCKPYQPLPKVKHEMDLAYTSSSDESEDGRKPRQSYNSRETLHEYNQELRMNYNSQSRKRKEVEKSTQEMEFCETSHTLCSGYQTDMHSVSRHGYQLEMGSDVDTETEGAASPDHALRMWIRGMKSEHSSCLSSRANSALSLTDTDHERKSDGENGFKFSPVCCDMEAQAGSTQDVQSSPHNQFTFRPLPPPPPPPHACTCARKPPPAADSLQRRSMTTRSQPSPAAPAPPTSTQDSVHLHNSWVLNSNIPLETRHFLFKHGSGSSAIFSAASQNYPLTSNTVYSPPPRPLPRSTFSRPAFTFNKPYRCCNWKCTALSATAITVTLALLLAYVIAVHLFGLTWQLQPVEGELYANGVSKGNRGTESMDTTYSPIGGKVSDKSEKKVFQKGRAIDTGEVDIGAQVMQTIPPGLFWRFQITIHHPIYLKFNISLAKDSLLGIYGRRNIPPTHTQFDFVKLMDGKQLVKQDSKGSDDTQHSPRNLILTSLQETGFIEYMDQGPWYLAFYNDGKKMEQVFVLTTAIEIMDDCSTNCNGNGECISGHCHCFPGFLGPDCARDSCPVLCGGNGEYEKGHCVCRHGWKGPECDVPEEQCIDPTCFGHGTCIMGVCICVPGYKGEICEEEDCLDPMCSNHGICVKGECHCSTGWGGVNCETPLPVCQEQCSGHGTFLLDAGVCSCDPKWTGSDCSTELCTMECGSHGVCSRGICQCEEGWVGPTCEERSCHSHCTEHGQCKDGKCECSPGWEGDHCTIAHYLDAVRDGCPGLCFGNGRCTLDQNGWHCVCQVGWSGTGCNVVMEMLCGDNLDNDGDGLTDCVDPDCCQQSNCYISPLCQGSPDPLDLIQQSQTLFSQHTSRLFYDRIKFLIGKDSTHVIPPEVSFDSRRACVIRGQVVAIDGTPLVGVNVSFLHHSDYGFTISRQDGSFDLVAIGGISVILIFDRSPFLPEKRTLWLPWNQFIVVEKVTMQRVVSDPPSCDISNFISPNPIVLPSPLTSFGGSCPERGTIVPELQVVQEEIPIPSSFVRLSYLSSRTPGYKTLLRILLTHSTIPVGMIKVHLTVAVEGRLTQKWFPAAINLVYTFAWNKTDIYGQKVWGLAEALVSVGYEYETCPDFILWEQRTVVLQGFEMDASNLGGWSLNKHHILNPQSGIIHKGNGENMFISQQPPVISTIMGNGHQRSVACTNCNGPAHNNKLFAPVALASGPDGSVYVGDFNFVRRIFPSGNSVSILELRNRDTRHSTSPAHKYYLAMDPVSESLYLSDTNTRKVYKLKSLVETKDLSKNFEVVAGTGDQCLPFDQSHCGDGGRASEASLNSPRGITVDRHGFIYFVDGTMIRKIDENAVITTVIGSNGLTSTQPLSCDSGMDITQVRLEWPTDLAVNPMDNSLYVLDNNIVLQISENRRVRIIAGRPIHCQVPGIDHFLVSKVAIHSTLESARAISVSHSGLLFIAETDERKVNRIQQVTTNGEIYIIAGAPTDCDCKIDPNCDCFSGDGGYAKDAKMKAPSSLAVSPDGTLYVADLGNVRIRTISRNQAHLNDMNIYEIASPADQELYQFTVNGTHLHTLNLITRDYVYNFTYNSEGDLGAITSSNGNSVHIRRDAGGMPLWLVVPGGQVYWLTISSNGVLKRVSAQGYNLALMTYPGNTGLLATKSNENGWTTVYEYDPEGHLTNATFPTGEVSSFHSDLEKLTKVELDTSNRENVLMSTNLTATSTIYILKQENTQSTYRVNPDGSLRVTFASGMEIGLSSEPHILAGAVNPTLGKCNISLPGEHNANLIEWRQRKEQNKGNVSAFERRLRAHNRNLLSIDFDHITRTGKIYDDHRKFTLRILYDQTGRPILWSPVSRYNEVNITYSPSGLVTFIQRGTWNEKMEYDQSGKIISRTWADGKIWSYTYLEKSVMLLLHSQRRYIFEYDQPDCLLSVTMPSMVRHSLQTMLSVGYYRNIYTPPDSSTSFIQDYSRDGRLLQTLHLGTGRRVLYKYTKQARLSEVLYDTTQVTLTYEESSGVIKTIHLMHDGFICTIRYRQTGPLIGRQIFRFSEEGLVNARFDYSYNNFRVTSMQAVINETPLPIDLYRYVDVSGRTEQFGKFSVINYDLNQVITTTVMKHTKIFSANGQVIEVQYEILKAIAYWMTIQYDNVGRMVICDIRVGVDANITRYFYEYDADGQLQTVSVNDKTQWRYSYDLNGNINLLSHGKSARLTPLRYDLRDRITRLGEIQYKMDEDGFLRQRGNDIFEYNSNGLLQKAYNKASGWTVQYYYDGLGRRVASKSSLGQHLQFFYADLTNPIRVTHLYNHTSSEITSLYYDLQGHLIAMELSSGEEYYVACDNTGTPLAVFSSRGQVIKEILYTPYGDIYHDTYPDFQVIIGFHGGLYDFLTKLVHLGQRDYDVVAGRWTTPNHHIWKQLNLLPKPFNLYSFENNYPVGKIQDVAKYTTDIRSWLELFGFQLHNVLPGFPKPELENLELTYELLRLQTKTQEWDPGKTILGIQCELQKQLRNFISLDQLPMTPRYNDGRCLEGGKQPRFAAVPSVFGKGIKFAIKDGIVTADIIGVANEDSRRLAAILNNAHYLENLHFTIEGRDTHYFIKLGSLEEDLVLIGNTGGRRILENGVNVTVSQMTSVLNGRTRRFADIQLQHGALCFNIRYGTTVEEEKNHVLEIARQRAVAQAWTKEQRRLQEGEEGIRAWTEGEKQQLLSTGRVQGYDGYFVLSVEQYLELSDSANNIHFMRQSEIGRR

SEQ ID NO: 2583 - protein, 94 aa, Homo sapiens
MKRVLSCVPEPTVVMAARALCMLGLVLALLSSSSAEEYVGLSANQCAVPAKDRVDCGYPHVTPKECNNRGCCFDSRIPGVPWCFKPLQEAECTF

SEQ ID NO: 2584 - protein, 450 aa, Homo sapiens
MRECISIHVGQAGVQIGNACWELYCLEHGIQPDGQMPSDKTIGGGDDSFNTFFSETGAGKHVPRAVFVDLEPTVVDEVRTGTYRQLFHPEQLITGKEDAANNYARGHYTIGKEIVDLVLDRIRKLADLCTGLQGFLIFHSFGGGTGSGFASLLMERLSVDYGKKSKLEFAIYPAPQVSTAVVEPYNSILTTHTTLEHSDCAFMVDNEAIYDICRRNLDIERPTYTNLNRLIGQIVSSITASLRFDGALNVDLTEFQTNLVPYPRIHFPLATYAPVISAEKAYHEQLSVAEITNACFEPANQMVKCDPRHGKYMACCMLYRGDVVPKDVNAAIATIKTKRTIQFVDWCPTGFKVGINYQPPTVVPGGDLAKVQRAVCMLSNTTAIAEAWARLDHKFDLMYAKRAFVHWYVGEGMEEGEFSEAREDLAALEKDYEEVGVDSVEAEAEEGEEY

SEQ ID NO: 2585 - protein, 418 aa, Homo sapiens
MRECISIHVGQAGVQIGNACWELYCLEHGIQPDGQMPSDKTIGGGDDSFNTFFSETGAGKHVPRAVFVDLEPTVVDEVRTGTYRQLFHPEQLITGKEDAANNYARGHYTIGKEIVDLVLDRIRKLADLCTGLQGFLIFHSFGGGTGSGFASLLMERLSVDYGKKSKLEFAIYPAPQVSTAVVEPYNSILTTHTTLEHSDCAFMVDNEAIYDICRRNLDIERPTYTNLNRLIGQIVSSITASLRFDGALNVDLTEFQTNLVPYPRIHFPLATYAPVISAEKAYHEQLSVAEITNACFEPANQMVKCDPRHGKYMACCMLYRGDVVPKDVNAAIATIKTKRTIQFVDWCPTGFKVGINYQPPTVVPGGDLAKVQRAVCMLSNTTAIAEAWARLDLAALEKDYEEVGVDSVEAEAEEGEEY

SEQ ID NO: 2586 - protein, 1445 aa, Homo sapiens
MEEGHGLDLTYITERIIAVSFPAGCSEESYLHNLQEVTRMLKSKHGDNYLVLNLSEKRYDLTKLNPKIMDVGWPELHAPPLDKMCTICKAQESWLNSNLQHVVVIHCRGGKGRIGVVISSYMHFTNVSASADQALDRFAMKKFYDDKVSALMQPSQKRYVQFLSGLLSGSVKMNASPLFLHFVILHGTPNFDTGGVCRPFLKLYQAMQPVYTSGIYNVGPENPSRICIVIEPAQLLKGDVMVKCYHKKYRSATRDVIFRLQFHTGAVQGYGLVFGKEDLDNASKDDRFPDYGKVELVFSATPEKIQGSEHLYNDHGVIVDYNTTDPLIRWDSYENLSADGEVLHTQGPVDGSLYAKVRKKSSSDPGIPGGPQAIPATNSPDHSDHTLSVSSDSGHSTASARTDKTEERLAPGTRRGLSAQEKAELDQLLSGFGLEDPGSSLKEMTDARSKYSGTRHVVPAQVHVNGDAALKDRETDILDDEMPHHDLHSVDSLGTLSSSEGPQSAHLGPFTCHKSSQNSLLSDGFGSNVGEDPQGTLVPDLGLGMDGPYERERTFGSREPKQPQPLLRKPSVSAQMQAYGQSSYSTQTWVRQQQMVVAHQYSFAPDGEARLVSRCPADNPGLVQAQPRVPLTPTRGTSSRVAVQRGVGSGPHPPDTQQPSPSKAFKPRFPGDQVVNGAGPELSTGPSPGSPTLDIDQSIEQLNRLILELDPTFEPIPTHMNALGSQANGSVSPDSVGGGLRASSRLPDTGEGPSRATGRQGSSAEQPLGGRLRKLSLGQYDNDAGGQLPFSKCAWGKAGVDYAPNLPPFPSPADVKETMTPGYPQDLDIIDGRILSSKESMCSTPAFPVSPETPYVKTALRHPPFSPPEPPLSSPASQHKGGREPRSCPETLTHAVGMSESPIGPKSTMLRADASSTPSFQQAFASSCTISSNGPGQRRESSSSAERQWVESSPKPMVSLLGSGRPTGSPLSAEFSGTRKDSPVLSCFPPSELQAPFHSHELSLAEPPDSLAPPSSQAFLGFGTAPVGSGLPPEEDLGALLANSHGASPTPSIPLTATGAADNGFLSHNFLTVAPGHSSHHSPGLQGQGVTLPGQPPLPEKKRASEGDRSLGSVSPSSSGFSSPHSGSTISIPFPNVLPDFSKASEAASPLPDSPGDKLVIVKFVQDTSKFWYKADISREQAIAMLKDKEPGSFIVRDSHSFRGAYGLAMKVATPPPSVLQLNKKAGDLANELVRHFLIECTPKGVRLKGCSNEPYFGSLTALVCQHSITPLALPCKLLIPERDPLEEIAESSPQTAANSAAELLKQGAACNVWYLNSVEMESLTGHQAIQKALSITLVQEPPPVSTVVHFKVSAQGITLTDNQRKLFFRRHYPVNSVIFCALDPQDRKWIKDGPSSKVFGFVARKQGSATDNVCHLFAEHDPEQPASAIVNFVSKVMIGSPKKV

SEQ ID NO: 2587 - protein, 1205 aa, Homo sapiens
MEEGHGLDLTYITERIIAVSFPAGCSEESYLHNLQEVTRMLKSKHGDNYLVLNLSEKRYDLTKLNPKIMDVGWPELHAPPLDKMCTICKAQESWLNSNLQHVVVIHCRGGKGRIGVVISSYMHFTNVSASADQALDRFAMKKFYDDKVSALMQPSQKRYVQFLSGLLSGSVKMNASPLFLHFVILHGTPNFDTGGVCRPFLKLYQAMQPVYTSGIYNVGPENPSRICIVIEPAQLLKGDVEMPHHDLHSVDSLGTLSSSEGPQSAHLGPFTCHKSSQNSLLSDGFGSNVGEDPQGTLVPDLGLGMDGPYERERTFGSREPKQPQPLLRKPSVSAQMQAYGQSSYSTQTWVRQQQMVVAHQYSFAPDGEARLVSRCPADNPGLVQAQPRVPLTPTRGTSSRVAVQRGVGSGPHPPDTQQPSPSKAFKPRFPGDQVVNGAGPELSTGPSPGSPTLDIDQSIEQLNRLILELDPTFEPIPTHMNALGSQANGSVSPDSVGGGLRASSRLPDTGEGPSRATGRQGSSAEQPLGGRLRKLSLGQYDNDAGGQLPFSKCAWGKAGVDYAPNLPPFPSPADVKETMTPGYPQDLDIIDGRILSSKESMCSTPAFPVSPETPYVKTALRHPPFSPPEPPLSSPASQHKGGREPRSCPETLTHAVGMSESPIGPKSTMLRADASSTPSFQQAFASSCTISSNGPGQRRESSSSAERQWVESSPKPMVSLLGSGRPTGSPLSAEFSGTRKDSPVLSCFPPSELQAPFHSHELSLAEPPDSLAPPSSQAFLGFGTAPVGSGLPPEEDLGALLANSHGASPTPSIPLTATGAADNGFLSHNFLTVAPGHSSHHSPGLQGQGVTLPGQPPLPEKKRASEGDRSLGSVSPSSSGFSSPHSGSTISIPFPNVLPDFSKASEAASPLPDSPGDKLVIVKFVQDTSKFWYKADISREQAIAMLKDKEPGSFIVRDSHSFRGAYGLAMKVATPPPSVLQLNKKAGDLANELVRHFLIECTPKGVRLKGCSNEPYFGSLTALVCQHSITPLALPCKLLIPERDPLEEIAESSPQTAANSAAELLKQGAACNVWYLNSVEMESLTGHQAIQKALSITLVQEPPPVSTVVHFKVSAQGITLTDNQRKLFFRRHYPVNSVIFCALDPQDRKWIKDGPSSKVFGFVARKQGSATDNVCHLFAEHDPEQPASAIVNFVSKVMIGSPKKV

SEQ ID NO: 2588 - protein, 391 aa, Homo sapiens
MEEGHGLDLTYITERIIAVSFPAGCSEESYLHNLQEVTRMLKSKHGDNYLVLNLSEKRYDLTKLNPKIMDVGWPELHAPPLDKMCTICKAQESWLNSNLQHVVVIHCRGGKGRIGVVISSYMHFTNVSASADQALDRFAMKKFYDDKVSALMQPSQKRYVQFLSGLLSGSVKMNASPLFLHFVILHGTPNFDTGGVCRPFLKLYQAMQPVYTSGIYNVGPENPSRICIVIEPAQLLKGDVMVKCYHKKYRSATRDVIFRLQFHTGAVQGYGLVFGKEDLDNASKDDRFPDYGKVELVFSATPEKIQGSEHLYNDHGVIVDYNTTDPLIRWDSYENLSADGEVLHTQGPVDGSLYAKVRKKSSSDPGIPGGPQAIPATNSPANVLFELIGQV

SEQ ID NO: 2589 - protein, 250 aa, Homo sapiens
MEEGHGLDLTYITERIIAVSFPAGCSEESYLHNLQEVTRMLKSKHGDNYLVLNLSEKRYDLTKLNPKIMDVGWPELHAPPLDKMCTICKAQESWLNSNLQHVVVIHCRGGKGRIGVVISSYMHFTNVSASADQALDRFAMKKFYDDKVSALMQPSQKRYVQFLSGLLSGSVKMNASPLFLHFVILHGTPNFDTGGVCRPFLKLYQAMQPVYTSGIYNVGPENPSRICIVIEPAQLLKGDVMVMNYNIANI

SEQ ID NO: 2590 - protein, 1735 aa, Homo sapiens
MSVSRTMEDSCELDLVYVTERIIAVSFPSTANEENFRSNLREVAQMLKSKHGGNYLLFNLSERRPDITKLHAKVLEFGWPDLHTPALEKICSICKAMDTWLNADPHNVVVLHNKGNRGRIGVVIAAYMHYSNISASADQALDRFAMKRFYEDKIVPIGQPSQRRYVHYFSGLLSGSIKMNNKPLFLHHVIMHGIPNFESKGGCRPFLRIYQAMQPVYTSGIYNIPGDSQTSVCITIEPGLLLKGDILLKCYHKKFRSPARDVIFRVQFHTCAIHDLGVVFGKEDLDDAFKDDRFPEYGKVEFVFSYGPEKIQGMEHLENGPSVSVDYNTSDPLIRWDSYDNFSGHRDDGMEEVVGHTQGPLDGSLYAKVKKKDSLHGSTGAVNATRPTLSATPNHVEHTLSVSSDSGNSTASTKTDKTDEPVPGASSATAALSPQEKRELDRLLSGFGLEREKQGAMYHTQHLRSRPAGGSAVPSSGRHVVPAQVHVNGGALASERETDILDDELPNQDGHSAGSMGTLSSLDGVTNTSEGGYPEALSPLTNGLDKSYPMEPMVNGGGYPYESASRAGPAHAGHTAPMRPSYSAQEGLAGYQREGPHPAWPQPVTTSHYAHDPSGMFRSQSFSEAEPQLPPAPVRGGSSREAVQRGLNSWQQQQQQQQQPRPPPRQQERAHLESLVASRPSPQPLAETPIPSLPEFPRAASQQEIEQSIETLNMLMLDLEPASAAAPLHKSQSVPGAWPGASPLSSQPLSGSSRQSHPLTQSRSGYIPSGHSLGTPEPAPRASLESVPPGRSYSPYDYQPCLAGPNQDFHSKSPASSSLPAFLPTTHSPPGPQQPPASLPGLTAQPLLSPKEATSDPSRTPEEEPLNLEGLVAHRVAGVQAREKQPAEPPAPLRRRAASDGQYENQSPEATSPRSPGVRSPVQCVSPELALTIALNPGGRPKEPHLHSYKEAFEEMEGTSPSSPPPSGVRSPPGLAKTPLSALGLKPHNPADILLHPTGVTRRRIQPEEDEGKVVVRLSEEPRSYVESVARTAVAGPRAQDSEPKSFSAPATQAYGHEIPLRNGTLGGSFVSPSPLSTSSPILSADSTSVGSFPSGESSDQGPRTPTQPLLESGFRSGSLGQPSPSAQRNYQSSSPLPTVGSSYSSPDYSLQHFSSSPESQARAQFSVAGVHTVPGSPQARHRTVGTNTPPSPGFGWRAINPSMAAPSSPSLSHHQMMGPPGTGFHGSTVSSPQSSAATTPGSPSLCRHPAGVYQVSGLHNKVATTPGSPSLGRHPGAHQGNLASGLHSNAIASPGSPSLGRHLGGSGSVVPGSPCLDRHVAYGGYSTPEDRRPTLSRQSSASGYQAPSTPSFPVSPAYYPGLSSPATSPSPDSAAFRQGSPTPALPEKRRMSVGDRAGSLPNYATINGKVSSPVASGMSSPSGGSTVSFSHTLPDFSKYSMPDNSPETRAKVKFVQDTSKYWYKPEISREQAIALLKDQEPGAFIIRDSHSFRGAYGLAMKVSSPPPTIMQQNKKGDMTHELVRHFLIETGPRGVKLKGCPNEPNFGSLSALVYQHSIIPLALPCKLVIPNRDPTDESKDSSGPANSTADLLKQGAACNVLFVNSVDMESLTGPQAISKATSETLAADPTPAATIVHFKVSAQGITLTDNQRKLFFRRHYPLNTVTFCDLDPQERKWMKTEGGAPAKLFGFVARKQGSTTDNACHLFAELDPNQPASAIVNFVSKVMLNAGQKR

SEQ ID NO: 2591 - protein, 416 aa, Homo sapiens
MVPFQQRKDCVLEGSTRVTPSVQPHLQPIRNMSVSRTMEDSCELDLVYVTERIIAVSFPSTANEENFRSNLREVAQMLKSKHGGNYLLFNLSERRPDITKLHAKVLEFGWPDLHTPALEKICSICKAMDTWLNADPHNVVVLHNKGNRGRIGVVIAAYMHYSNISASADQALDRFAMKRFYEDKIVPIGQPSQRRYVHYFSGLLSGSIKMNNKPLFLHHVIMHGIPNFESKGGCRPFLRIYQAMQPVYTSGIYNIPGDSQTSVCITIEPGLLLKGDILLKCYHKKFRSPARDVIFRVQFHTCAIHDLGVVFGKEDLDDAFKDDRFPEYGKVEFVFSYGPEKIQGMEHLENGPSVSVDYNTSDPLIRWDSYDNFSGHRDDGMEDGNKQNTNSQSIGSISGGLEDQYTWPDTHWPSQS

SEQ ID NO: 2592 - protein, 108 aa, Homo sapiens
MVNLGLSRVDDAVAAKHPGLGEYAACQSHAFMKGVFTFVTGTGMAFGLQMFIQRKFPYPLQWSLLVAVVAGSVVSYGVTRVESEKCNNLWLFLETGQLPKDRSTDQRS

SEQ ID NO: 2593 - protein, 444 aa, Homo sapiens
MREIVHIQAGQCGNQIGAKFWEVISDEHGIDPTGTYHGDSDLQLDRISVYYNEATGGKYVPRAILVDLEPGTMDSVRSGPFGQIFRPDNFVFGQSGAGNNWAKGHYTEGAELVDSVLDVVRKEAESCDCLQGFQLTHSLGGGTGSGMGTLLISKIREEYPDRIMNTFSVVPSPKVSDTVVEPYNATLSVHQLVENTDETYCIDNEALYDICFRTLKLTTPTYGDLNHLVSATMSGVTTCLRFPGQLNADLRKLAVNMVPFPRLHFFMPGFAPLTSRGSQQYRALTVPELTQQVFDAKNMMAACDPRHGRYLTVAAVFRGRMSMKEVDEQMLNVQNKNSSYFVEWIPNNVKTAVCDIPPRGLKMAVTFIGNSTAIQELFKRISEQFTAMFRRKAFLHWYTGEGMDEMEFTEAESNMNDLVSEYQQYQDATAEEEEDFGEEAEEEA

SEQ ID NO: 2594 - protein, 767 aa, Homo sapiens
MSLGRLLRRASSKASDLLTLTPGGSGSGSPSVLDGEIIYSKNNVCVHPPEGLQGLGEHHPGYLCLYMEKDEMLGATLILAWVPNSRIQRQDEEALRYITPESSPVRKAPRPRGRRTRSSGASHQPSPTELRPTLTPKDEDILVVAQSVPDRMLASPAPEDEEKLAQGLGVDGAQPASQPACSPSGILSTVSPQDVTEEGREPRPEAGEEDGSLELSAEGVSRDSSFDSDSDTFSSPFCLSPISAALAESRGSVFLESDSSPPSSSDAGLRFPDSNGLLQTPRWDEPQRVCALEQICGVFRVDLGHMRSLRLFFSDEACTSGQLVVASRESQYKVFHFHHGGLDKLSDVFQQWKYCTEMQLKDQQVAPDKTCMQFSIRRPKLPSSETHPEESMYKRLGVSAWLNHLNELGQVEEEYKLRKAIFFGGIDVSIRGEVWPFLLRYYSHESTSEEREALRLQKRKEYSEIQQKRLSMTPEEHRAFWRNVQFTVDKDVVRTDRNNQFFRGEDNPNVESMRRILLNYAVYNPAVGYSQGMSDLVAPILAEVLDESDTFWCFVGLMQNTIFVSSPRDEDMEKQLLYLRELLRLTHVRFYQHLVSLGEDGLQMLFCHRWLLLCFKREFPEAEALRIWEACWAHYQTDYFHLFICVAIVAIYGDDVIEQQLATDQMLLHFGNLAMHMNGELVLRKARSLLYQFRLLPRIPCSLHDLCKLCGSGMWDSGSMPAVECTGHHPGSESCPYGGTVEMPSPKSLREGKKGPKTPQDGFGFRR

SEQ ID NO: 2595 - protein, 405 aa, Homo sapiens
MKVAPDKTCMQFSIRRPKLPSSETHPEESMYKRLGVSAWLNHLNELGQVEEEYKLRKAIFFGGIDVSIRGEVWPFLLRYYSHESTSEEREALRLQKRKEYSEIQQKRLSMTPEEHRAFWRNVQFTVDKDVVRTDRNNQFFRGEDNPNVESMRRILLNYAVYNPAVGYSQGMSDLVAPILAEVLDESDTFWCFVGLMQNTIFVSSPRDEDMEKQLLYLRELLRLTHVRFYQHLVSLGEDGLQMLFCHRWLLLCFKREFPEAEALRIWEACWAHYQTDYFHLFICVAIVAIYGDDVIEQQLATDQMLLHFGNLAMHMNGELVLRKARSLLYQFRLLPRIPCSLHDLCKLCGSGMWDSGSMPAVECTGHHPGSESCPYGGTVEMPSPKSLREGKKGPKTPQDGFGFRR

SEQ ID NO: 2596 - protein, 278 aa, Homo sapiens
MKVAPDKTCMQFSIRRPKLPSSETHPEESMYKRLGVSAWLNHLNELGQVEEEYKLRKAIFFGGIDVSIRGEVWPFLLRYYSHESTSEEREALRLQKRKEYSEIQQKRLSMTPEEHRAFWRNVQFTVDKDVVRTDRNNQFFRGEDNPNVESMRRILLNYAVYNPAVGYSQGMSDLVAPILAEVLDESDTFWCFVGLMQNTIFVSSPRDEDMEKQLLYLRELLRLTHVRFYQHLVSLGEDGLQMLFCHRWLLLCFKREFPEAEALRIWEACWAHYQGADV

SEQ ID NO: 2597 - protein, 392 aa, Homo sapiens
MKQVAPDKTCMQFSIRRPKLPSSETHPEESMYKRLGVSAWLNHLNELGQVEEEYKLRKVWPFLLRYYSHESTSEEREALRLQKRKEYSEIQQKRLSMTPEEHRAFWRNVQFTVDKDVVRTDRNNQFFRGEDNPNVESMRRILLNYAVYNPAVGYSQGMSDLVAPILAEVLDESDTFWCFVGLMQNTIFVSSPRDEDMEKQLLYLRELLRLTHVRFYQHLVSLGEDGLQMLFCHRWLLLCFKREFPEAEALRIWEACWAHYQTDYFHLFICVAIVAIYGDDVIEQQLATDQMLLHFGNLAMHMNGELVLRKARSLLYQFRLLPRIPCSLHDLCKLCGSGMWDSGSMPAVECTGHHPGSESCPYGGTVEMPSPKSLREGKKGPKTPQDGFGFRR

SEQ ID NO: 2598 - protein, 475 aa, Homo sapiens
MTQSVVVQVGQCGNQIGCCFWDLALREHAAVNQKGIYDEAISSFFRNVDTRVVGDGGSISKGKICSLKARAVLIDMEEGVVNEILQGPLRDVFDTKQLITDISGSGNNWAVGHKVFGSLYQDQILEKFRKSAEHCDCLQCFFIIHSMGGGTGSGLGTFLLKVLEDEFPEVYRFVTSIYPSGEDDVITSPYNSILAMKELNEHADCVLPIDNQSLFDIISKIDLMVNSGKLGTTVKPKSLVTSSSGALKKQHKKPFDAMNNIVANLLLNLTSSARFEGSLNMDLNEISMNLVPFPQLHYLVSSLTPLYTLTDVNIPPRRLDQMFSDAFSKDHQLLRADPKHSLYLACALMVRGNVQISDLRRNIERLKPSLQFVSWNQEGWKTSLCSVPPVGHSHSLLALANNTCVKPTFMELKERFMRLYKKKAHLHHYLQVEGMEESCFTEAVSSLSALIQEYDQLDATKNMPVQDLPRLSIAM

SEQ ID NO: 2599 - protein, 375 aa, Homo sapiens
MASAPWPERVPRLLAPRLPSYPPPPPTVGLRSMEQEETYLELYLDQCAAQDGLAPPRSPLFSPVVPYDMYILNASNPDTAFNSNPEVKETSGDFSSVDLSFLPDEVTQENKDQPVISKHETEENSESQSPQSRLPSPSEQDVGLGLNSSSLSNSHSQLHPGDTDSVQPSPEKPNSDSLSLASITPMTPMTPISECCGIVPQLQNIVSTVNLACKLDLKKIALHAKNAEYNPKRFAAVIMRIREPRTTALIFSSGKMVCTGAKSEEQSRLAARKYARVVQKLGFPARFLDFKIQNMVGSCDVRFPIRLEGLVLTHQQFSSYEPELFPGLIYRMVKPRIVLLIFVSGKVVLTGAKERSEIYEAFENIYPILKGFKKA

SEQ ID NO: 2600 - protein, 488 aa, Homo sapiens
MASKILLNVQEEVTCPICLELLTEPLSLDCGHSLCRACITVSNKEAVTSMGGKSSCPVCGISYSFEHLQANQHLANIVERLKEVKLSPDNGKKRDLCDHHGEKLLLFCKEDRKVICWLCERSQEHRGHHTVLTEEVFKECQEKLQAVLKRLKKEEEEAEKLEADIREEKTSWKYQVQTERQRIQTEFDQLRSILNNEEQRELQRLEEEEKKTLDKFAEAEDELVQQKQLVRELISDVECRSQWSTMELLQDMSGIMKWSEIWRLKKPKMVSKKLKTVFHAPDLSRMLQMFRELTAVRCYWVDVTLNSVNLNLNLVLSEDQRQVISVPIWPFQCYNYGVLGSQYFSSGKHYWEVDVSKKTAWILGVYCRTYSRHMKYVVRRCANRQNLYTKYRPLFGYWVIGLQNKCKYGVFEESLSSDPEVLTLSMAVPPCRVGVFLDYEAGIVSFFNVTSHGSLIYKFSKCCFSQPVYPYFNPWNCPAPMTLCPPSS

SEQ ID NO: 2601 - protein, 270 aa, Homo sapiens
MASKILLNVQEEVTCPICLELLTEPLSLDCGHSLCRACITVSNKEAVTSMGGKSSCPVCGISYSFEHLQANQHLANIVERLKEVKLSPDNGKKRDLCDHHGEKLLLFCKEDRKVICWLCERSQEHRGHHTVLTEEVFKECQEKLQAVLKRLKKEEEEAEKLEADIREEKTSWKYQVQTERQRIQTEFDQLRSILNNEEQRELQRLEEEEKKTLDKFAEAEDELVQQKQLVRELISDVECRSQWSTMELLQDMSGIMKWCVWVATSGACEL

SEQ ID NO: 2602 - protein, 735 aa, Homo sapiens
MGESPASVVLNASGGLFSLKMETLESELTCPICLELFEDPLLLPCAHSLCFSCAHRILVSSCSSGESIEPITAFQCPTCRYVISLNHRGLDGLKRNVTLQNIIDRFQKASVSGPNSPSESRRERTYRPTTAMSSERIACQFCEQDPPRDAVKTCITCEVSYCDRCLRATHPNKKPFTSHRLVEPVPDTHLRGITCLDHENEKVNMYCVSDDQLICALCKLVGRHRDHQVASLNDRFEKLKQTLEMNLTNLVKRNSELENQMAKLIQICQQVEVNTAMHEAKLMEECDELVEIIQQRKQMIAVKIKETKVMKLRKLAQQVANCRQCLERSTVLINQAEHILKENDQARFLQSAKNIAERVAMATASSQVLIPDINFNDAFENFALDFSREKKLLEGLDYLTAPNPPSIREELCTASHDTITVHWISDDEFSISSYELQYTIFTGQANFISKSWCSWGLWPEIRKCKEAVSCSRLAGAPRGLYNSVDSWMIVPNIKQNHYTVHGLQSGTRYIFIVKAINQAGSRNSEPTRLKTNSQPFKLDPKMTHKKLKISNDGLQMEKDESSLKKSHTPERFSGTGCYGAAGNIFIDSGCHYWEVVMGSSTWYAIGIAYKSAPKNEWIGKNASSWVFSRCNSNFVVRHNNKEMLVDVPPHLKRLGVLLDYDNNMLSFYDPANSLHLHTFDVTFILPVCPTFTIWNKSLMILSGLPAPDFIDYPERQECNCRPQESPYVSGMKTCH

SEQ ID NO: 2603 - protein, 705 aa, Homo sapiens
MGESPASVVLNASGGLFSLKMETLESELTCPICLELFEDPLLLPCAHSLCFSCAHRILVSSCSSGESIEPITAFQCPTCRYVISLNHRGLDGLKRNVTLQNIIDRFQKASVSGPNSPSESRRERTYRPTTAMSSERIACQFCEQDPPRDAVKTCITCEVSYCDRCLRATHPNKKPFTSHRLVEPVPDTHLRGITCLDHENEKVNMYCVSDDQLICALCKLVGRHRDHQVASLNDRFEKLKQTLEMNLTNLVKRNSELENQMAKLIQICQQVEVNTAMHEAKLMEECDELVEIIQQRKQMIAVKIKETKVMKLRKLAQQVANCRQCLERSTVLINQAEHILKENDQARFLQSAKNIAERVAMATASSQVLIPDINFNDAFENFALDFSREKKLLEGLDYLTAPNPPSIREELCTASHDTITVHWISDDEFSISSYELQYTIFTGQANFISLYNSVDSWMIVPNIKQNHYTVHGLQSGTRYIFIVKAINQAGSRNSEPTRLKTNSQPFKLDPKMTHKKLKISNDGLQMEKDESSLKKSHTPERFSGTGCYGAAGNIFIDSGCHYWEVVMGSSTWYAIGIAYKSAPKNEWIGKNASSWVFSRCNSNFVVRHNNKEMLVDVPPHLKRLGVLLDYDNNMLSFYDPANSLHLHTFDVTFILPVCPTFTIWNKSLMILSGLPAPDFIDYPERQECNCRPQESPYVSGMKTCH

SEQ ID NO: 2604 - protein, 1690 aa, Homo sapiens
MATGSAQGNFTGHTKKTNGNNGTNGALVQSPSNQSALGAGGANSNGSAARVWGVATGSSSGLAHCSVSGGDGKMDTMIGDGRSQNCWGASNSNAGINLNLNPNANPAAWPVLGHEGTVATGNPSSICSPVSAIGQNMGNQNGNPTGTLGAWGNLLPQESTEPQTSTSQNVSFSAQPQNLNTDGPNNTNPMNSSPNPINAMQTNGLPNWGMAVGMGAIIPPHLQGLPGANGSSVSQVSGGSAEGISNSVWGLSPGNPATGNSNSGFSQGNGDTVNSALSAKQNGSSSAVQKEGSGGNAWDSGPPAGPGILAWGRGSGNNGVGNIHSGAWGHPSRSTSNGVNGEWGKPPNQHSNSDINGKGSTGWESPSVTSQNPTVQPGGEHMNSWAKAASSGTTASEGSSDGSGNHNEGSTGREGTGEGRRRDKGIIDQGHIQLPRNDLDPRVLSNTGWGQTPVKQNTAWEFEESPRSERKNDNGTEAWGCAATQASNSGGKNDGSIMNSTNTSSVSGWVNAPPAAVPANTGWGDSNNKAPSGPGVWGDSISSTAVSTAAAAKSGHAWSGAANQEDKSPTWGEPPKPKSQHWGDGQRSNPAWSAGGGDWADSSSVLGHLGDGKKNGSGWDADSNRSGSGWNDTTRSGNSGWGNSTNTKANPGTNWGETLKPGPQQNWASKPQDNNVSNWGGAASVKQTGTGWIGGPVPVKQKDSSEATGWEEPSPPSIRRKMEIDDGTSAWGDPSNYNNKTVNMWDRNNPVIQSSTTTNTTTTTTTTTSNTTHRVETPPPHQAGTQLNRSPLLGPGRKVSSGWGEMPNVHSKTENSWGEPSSPSTLVDNGTAAWGKPPSSGSGWGDHPAEPPVAFGRAGAPVAASALCKPASKSMQEGWGSGGDEMNLSTSQWEDEEGDVWNNAASQESTSSCSSWGNAPKKGLQKGMKTSGKQDEAWIMSRLIKQLTDMGFPREPAEEALKSNNMNLDQAMSALLEKKVDVDKRGLGVTDHNGMAAKPLGCRPPISKESSVDRPTFLDKDGGLVEEPTPSPFLPSPSLKLPLSHSALPSQALGGIASGLGMQNLNSSRQIPSGNLGMFGNSGAAQARTMQQPPQPPVQPLNSSQPSLRAQVPQFLSPQVQAQLLQFAAKNIGLNPALLTSPINPQHMTMLNQLYQLQLAYQRLQIQQQMLQAQRNVSGSMRQQEQQVARTITNLQQQIQQHQRQLAQALLVKQPPPPPPPPHLSLHPSAGKSAMDSFPSHPQTPGLPDLQTKEQQSSPNTFAPYPLAGLNPNMNVNSMDMTGGLSVKDPSQSQSRLPQWTHPNSMDNLPSAASPLEQNPSKHGAIPGGLSIGPPGKSSIDDSYGRYDLIQNSESPASPPVAVPHSWSRAKSDSDKISNGSSINWPPEFHPGVPWKGLQNIDPENDPDVTPGSVPTGPTINTTIQDVNRYLLKSGGKLSDIKSTWSSGPTSHTQASLSHELWKVPRNSTAPTRPPPGLTNPKPSSTWGASPLGWTSSYSSGSAWSTDTSGRTSSWLVLRNLTPQIDGSTLRTLCLQHGPLITFHLNLTQGNAVVRYSSKEEAAKAQKSLHMCVLGNTTILAEFAGEEEVNRFLAQGQALPPTSSWQSSSASSQPRLSAAGSSHGLVRSDAGHWNAPCLGGKGSSELLWGGVPQYSSSLWGPPSADDSRVIGSPTPLTTLLPGDLLSGESL

SEQ ID NO: 2605 - protein, 1726 aa, Homo sapiens
MATGSAQGNFTGHTKKTNGNNGTNGALVQSPSNQSALGAGGANSNGSAARVWGVATGSSSGLAHCSVSGGDGKMDTMIGDGRSQNCWGASNSNAGINLNLNPNANPAAWPVLGHEGTVATGNPSSICSPVSAIGQNMGNQNGNPTGTLGAWGNLLPQESTEPQTSTSQNVSFSAQPQNLNTDGPNNTNPMNSSPNPINAMQTNGLPNWGMAVGMGAIIPPHLQGLPGANGSSVSQVSGGSAEGISNSVWGLSPGNPATGNSNSGFSQGNGDTVNSALSAKQNGSSSAVQKEGSGGNAWDSGPPAGPGILAWGRGSGNNGVGNIHSGAWGHPSRSTSNGVNGEWGKPPNQHSNSDINGKGSTGWESPSVTSQNPTVQPGGEHMNSWAKAASSGTTASEGSSDGSGNHNEGSTGREGTGEGRRRDKGIIDQGHIQLPRNDLDPRVLSNTGWGQTPVKQNTAWEFEESPRSERKNDNGTEAWGCAATQASNSGGKNDGSIMNSTNTSSVSGWVNAPPAAVPANTGWGDSNNKAPSGPGVWGDSISSTAVSTAAAAKSGHAWSGAANQEDKSPTWGEPPKPKSQHWGDGQRSNPAWSAGGGDWADSSSVLGHLGDGKKNGSGWDADSNRSGSGWNDTTRSGNSGWGNSTNTKANPGTNWGETLKPGPQQNWASKPQDNNVSNWGGAASVKQTGTGWIGGPVPVKQKDSSEATGWEEPSPPSIRRKMEIDDGTSAWGDPSNYNNKTVNMWDRNNPVIQSSTTTNTTTTTTTTTSNTTHRVETPPPHQAGTQLNRSPLLGPVSSGWGEMPNVHSKTENSWGEPSSPSTLVDNGTAAWGKPPSSGSGWGDHPAEPPVAFGRAGAPVAASALCKPASKSMQEGWGSGGDEMNLSTSQWEDEEGDVWNNAASQESTSSCSSWGNAPKKGLQKGMKTSGKQDEAWIMSRLIKQLTDMGFPREPAEEALKSNNMNLDQAMSALLEKKVDVDKRGLGVTDHNGMAAKPLGCRPPISKESSVDRPTFLDKDGGLVEEPTPSPFLPSPSLKLPLSHSALPSQALGGIASGLGMQNLNSSRQIPSGNLGMFGNSGAAQARTMQQPPQPPVQPLNSSQPSLRAQVPQFLSPQVQAQLLQFAAKNIGLNPALLTSPINPQHMTMLNQLYQLQLAYQRLQIQQQMLQAQRNVSGSMRQQEQQVARTITNLQQQIQQHQRQLAQALLVKQPPPPPPPPHLSLHPSAGKSAMDSFPSHPQTPGLPDLQTKEQQSSPNTFAPYPLAGLNPNMNVNSMDMTGGLSVKDPSQSQSRLPQWTHPNSMDNLPSAASPLEQNPSKHGAIPGGLSIGPPGKSSIDDSYGRYDLIQNSESPASPPVAVPHSWSRAKSDSDKISNGSSINWPPEFHPGVPWKGLQNIDPENDPDVTPGSVPTGPTINTTIQDVNRYLLKSGGSSPPSSQNATLPSSSAWPLSASGYSSSFSSIASAPSVAGKLSDIKSTWSSGPTSHTQASLSHELWKVPRNSTAPTRPPPGLTNPKPSSTWGASPLGWTSSYSSGSAWSTDTSGRTSSWLVLRNLTPQIDGSTLRTLCLQHGPLITFHLNLTQGNAVVRYSSKEEAAKAQKSLHMCVLGNTTILAEFAGEEEVNRFLAQGQALPPTSSWQSSSASSQPRLSAAGSSHGLVRSDAGHWNAPCLGGKGSSELLWGGVPQYSSSLWGPPSADDSRVIGSPTPLTTLLPGDLLSGESL

SEQ ID NO: 2606 - protein, 1104 aa, Homo sapiens
MSFRAARLSMRNRRNDTLDSTRTLYSSASRSTDLSYSESDLVNFIQANFKKRECVFFTKDSKATENVCKCGYAQSQHMEGTQINQSEKWNYKKHTKEFPTDAFGDIQFETLGKKGKYIRLSCDTDAEILYELLTQHWHLKTPNLVISVTGGAKNFALKPRMRKIFSRLIYIAQSKGAWILTGGTHYGLMKYIGEVVRDNTISRSSEENIVAIGIAAWGMVSNRDTLIRNCDAEGYFLAQYLMDDFTRDPLYILDNNHTHLLLVDNGCHGHPTVEAKLRNQLEKYISERTIQDSNYGGKIPIVCFAQGGGKETLKAINTSIKNKIPCVVVEGSGQIADVIASLVEVEDALTSSAVKEKLVRFLPRTVSRLPEEETESWIKWLKEILECSHLLTVIKMEEAGDEIVSNAISYALYKAFSTSEQDKDNWNGQLKLLLEWNQLDLANDEIFTNDRRWESADLQEVMFTALIKDRPKFVRLFLENGLNLRKFLTHDVLTELFSNHFSTLVYRNLQIAKNSYNDALLTFVWKLVANFRRGFRKEDRNGRDEMDIELHDVSPITRHPLQALFIWAILQNKKELSKVIWEQTRGCTLAALGASKLLKTLAKVKNDINAAGESEELANEYETRAVELFTECYSSDEDLAEQLLVYSCEAWGGSNCLELAVEATDQHFIAQPGVQNFLSKQWYGEISRDTKNWKIILCLFIIPLVGCGFVSFRKKPVDKHKKLLWYYVAFFTSPFVVFSWNVVFYIAFLLLFAYVLLMDFHSVPHPPELVLYSLVFVLFCDEVRQWYVNGVNYFTDLWNVMDTLGLFYFIAGIVFRLHSSNKSSLYSGRVIFCLDYIIFTLRLIHIFTVSRNLGPKIIMLQRMLIDVFFFLFLFAVWMVAFGVARQGILRQNEQRWRWIFRSVIYEPYLAMFGQVPSDVDGTTYDFAHCTFTGNESKPLCVELDEHNLPRFPEWITIPLVCIYMLSTNILLVNLLVAMFGYTVGTVQENNDQVWKFQRYFLVQEYCSRLNIPFPFIVFAYFYMVVKKCFKCCCKEKNMESSVCCFKNEDNETLAWEGVMKENYLVKINTKANDTSEEMRHRFRQLDTKLNDLKGLLKEIANKIK

SEQ ID NO: 2607 - protein, 54 aa, Homo sapiens
MKYIGEVVRDNTISRSSEENIVAIGIAAWGMVSNRDTLIRNCDAEVPVGQEEVC

SEQ ID NO: 2608 - protein, 165 aa, Homo sapiens
MEGTQINQSEKWNYKKHTKEFPTDAFGDIQFETLGKKGKYIRLSCDTDAEILYELLTQHWHLKTPNLVISVTGGAKNFALKPRMRKIFSRLIYIAQSKGAWILTGGTHYGLMKYIGEVVRDNTISRSSEENIVAIGIAAWGMVSNRDTLIRNCDAEVPVGQEEVC

SEQ ID NO: 2609 - protein, 682 aa, Homo sapiens
MQAINTSIKNKIPCVVVEGSGQIADVIASLVEVEDALTSSAVKEKLVRFLPRTVSRLPEEETESWIKWLKEILECSHLLTVIKMEEAGDEIVSNAISYALYKAFSTSEQDKDNWNGQLKLLLEWNQLDLANDEIFTNDRRWESADLQEVMFTALIKDRPKFVRLFLENGLNLRKFLTHDVLTELFSNHFSTLVYRNLQIAKNSYNDALLTFVWKLVANFRRGFRKEDRNGRDEMDIELHDVSPITRHPLQALFIWAILQNKKELSKVIWEQTRGCTLAALGASKLLKTLAKVKNDINAAGESEELANEYETRAVELFTECYSSDEDLAEQLLVYSCEAWGGSNCLELAVEATDQHFIAQPGVQWYVNGVNYFTDLWNVMDTLGLFYFIAGIVFRLHSSNKSSLYSGRVIFCLDYIIFTLRLIHIFTVSRNLGPKIIMLQRMLIDVFFFLFLFAVWMVAFGVARQGILRQNEQRWRWIFRSVIYEPYLAMFGQVPSDVDGTTYDFAHCTFTGNESKPLCVELDEHNLPRFPEWITIPLVCIYMLSTNILLVNLLVAMFGYTVGTVQENNDQVWKFQRYFLVQEYCSRLNIPFPFIVFAYFYMVVKKCFKCCCKEKNMESSVCCFKNEDNETLAWEGVMKENYLVKINTKANDTSEEMRHRFRQLDTKLNDLKGLLKEIANKIK

SEQ ID NO: 2610 - protein, 242 aa, Homo sapiens
MLLLAPQMLSLLLLALPVLASPAYVAPAPGQALQQTGIVGGQEAPRSKWPWQVSLRVRGPYWMHFCGGSLIHPQWVLTAAHCVEPDIKDLAALRVQLREQHLYYQDQLLPVSRIIVHPQFYIIQTGADIALLELEEPVNISSHIHTVTLPPASETFPPGMPCWVTGWGDVDNNVHLPPPYPLKEVEVPVVENHLCNAEYHTGLHTGHSFQIVRDDMLCAGSENHDSCQGDSGGPLVCKVNGT

SEQ ID NO: 2611 - protein, 233 aa, Homo sapiens
MLLLAPQMLSLLLLALPVLASPAYVAPAPGQALQQTGIVGGQEAPRSKWPWQVSLRVRGPYWMHFCGGSLIHPQWVLTAAHCVEPVQLREQHLYYQDQLLPVSRIIVHPQFYIIQTGADIALLELEEPVNISSHIHTVTLPPASETFPPGMPCWVTGWGDVDNNVHLPPPYPLKEVEVPVVENHLCNAEYHTGLHTGHSFQIVRDDMLCAGSENHDSCQGDSGGPLVCKVNGT

SEQ ID NO: 2612 - protein, 1119 aa, Homo sapiens
MKRSLRKMWRPGEKKEPQGVVYEDVPDDTEDFKESLKVVFEGSAYGLQNFNKQKKLKRCDDMDTFFLHYAAAEGQIELMEKITRDSSLEVLHEMDDYGNTPLHCAVEKNQIESVKFLLSRGANPNLRNFNMMAPLHIAVQGMNNEVMKVLLEHRTIDVNLEGENGNTAVIIACTTNNSEALQILLKKGAKPCKSNKWGCFPIHQAAFSGSKECMEIILRFGEEHGYSRQLHINFMNNGKATPLHLAVQNGDLEMIKMCLDNGAQIDPVEKGRCTAIHFAATQGATEIVKLMISSYSGSVDIVNTTDGCHETMLHRASLFDHHELADYLISVGADINKIDSEGRSPLILATASASWNIVNLLLSKGAQVDIKDNFGRNFLHLTVQQPYGLKNLRPEFMQMQQIKELVMDEDNDGCTPLHYACRQGGPGSVNNLLGFNVSIHSKSKDKKSPLHFAASYGRINTCQRLLQDISDTRLLNEGDLHGMTPLHLAAKNGHDKVVQLLLKKGALFLSDHNGWTALHHASMGGYTQTMKVILDTNLKCTDRLDEDGNTALHFAAREGHAKAVALLLSHNADIVLNKQQASFLHLALHNKRKEVVLTIIRSKRWDECLKIFSHNSPGNKCPITEMIEYLPECMKVLLDFCMLHSTEDKSCRDYYIEYNFKYLQCPLEFTKKTPTQDVIYEPLTALNAMVQNNRIELLNHPVCKEYLLMKWLAYGFRAHMMNLGSYCLGLIPMTILVVNIKPGMAFNSTGIINETSDHSEILDTTNSYLIKTCMILVFLSSIFGYCKEAGQIFQQKRNYFMDISNVLEWIIYTTGIIFVLPLFVEIPAHLQWQCGAIAVYFYWMNFLLYLQRFENCGIFIVMLEVILKTLLRSTVVFIFLLLAFGLSFYILLNLQDPFSSPLLSIIQTFSMMLGDINYRESFLEPYLRNELAHPVLSFAQLVSFTIFVPIVLMNLLIGLAVGDIAEVQKHASLKRIAMQVELHTSLEKKLPLWFLRKVDQKSTIVYPNKPRSGGMLFHIFCFLFCTGEIRQEIPNADKSLEMEILKQKYRLKDLTFLLEKQHELIKLIIQKMEIISETEDDDSHCSFQDRFKKEQMEQRNSRWNTVLRAVKAKTHHLEP

SEQ ID NO: 2613 - protein, 592 aa, Homo sapiens
MRGRDLCSSTQSQALGSLRTTTPAFTLNIPSEANHTEQPPAGLGARLQEAGVSIPPRRGRPTPTLEKKKKPHLMAEDEPSGALLKPLVFRVDETTPAVVQSVLLERGWNKFDKQEQNAEDWNLYWRTSSFRMTEHNSVKPWQQLNHHPGTTKLTRKDCLAKHLKHMRRMYGTSLYQFIPLTFVMPNDYTKFVAEYFQERQMLGTKHSYWICKPAELSRGRGILIFSDFKDFIFDDMYIVQKYISNPLLIGRYKCDLRIYVCVTGFKPLTIYVYQEGLVRFATEKFDLSNLQNNYAHLTNSSINKSGASYEKIKEVIGHGCKWTLSRFFSYLRSWDVDDLLLWKKIHRMVILTILAIAPSVPFAANCFELFGFDILIDDNLKPWLLEVNYSPALTLDCSTDVLVKRKLVHDIIDLIYLNGLRNEGREASNATHGNSNIDAAKSDRGGLDAPDCLPYDSLSFTSRMYNEDDSVVEKAVSVRPEAAPASQLEGEMSGQDFHLSTREMPQSKPKLRSRHTPHKTLMPYASLFQSHSCKTKTSPCVLSDRGKAPDPQAGNFVLVFPFNEATLGASRNGLNVKRIIQELQKLMNKQHS

SEQ ID NO: 2614 - protein, 245 aa, Homo sapiens
MASPSRRLQTKPVITCFKSVLLIYTFIFWITGVILLAVGIWGKVSLENYFSLLNEKATNVPFVLIATGTVIILLGTFGCFATCRASAWMLKLYAMFLTLVFLVELVAAIVGFVFRHEIKNSFKNNYEKALKQYNSTGDYRSHAVDKIQNTLHCCGVTDYRDWTDTNYYSEKGFPKSCCKLEDCTPQRDADKVNNEGCFIKVMTIIESEMGVVAGISFGVACFQLIGIFLAYCLSRAITNNQYEIV

SEQ ID NO: 2615 - protein, 97 aa, Homo sapiens
MKIEKCGWSEGLTSIKGNCHNFYTAISKDVTYKELKNLLNSKNIMLIDVREIWEILEYQKIPESINVPLDEVGEALQMNPRDFKEKYNEVKPSKSDS

SEQ ID NO: 2616 - protein, 2025 aa, Homo sapiens
MDNFAEGDFTVADYALLEDCPHVDDCVFAAEFMSNDYVRVTQLYCDGVGVQYKDYIQSERNLEFDICSIWCSKPISVLQDYCDAIKINIFWPLLFQHQNSSVISRLHPCVDANNSRASEINLKKLQHLELMEDIVDLAKKVANDSFLIGGLLRIGCKIENKILAMEEALNWIKYAGDVTILTKLGSIDNCWPMLSIFFTEYKYHITKIVMEDCNLLEELKTQSCMDCIEEGELMKMKGNEEFSKERFDIAIIYYTRAIEYRPENYLLYGNRALCFLRTGQFRNALGDGKRATILKNTWPKGHYRYCDALSMLGEYDWALQANIKAQKLCKNDPEGIKDLIQQHVKLQKQIEDLQGRTANKDPIKAFYENRAYTPRSLSAPIFTTSLNFVEKERDFRKINHEMANGGNQNLKVADEALKVDDCDCHPEFSPPSSQPPKHKGKQKSRNNESEKFSSSSPLTLPADLKNILEKQFSKSSRAAHQDFANIMKMLRSLIQDGYMALLEQRCRSAAQAFTELLNGLDPQKIKQLNLAMINYVLVVYGLAISLLGIGQPEELSEAENQFKRIIEHYPSEGLDCLAYCGIGKVYLKKNRFLEALNHFEKARTLIYRLPGVLTWPTSNVIIEESQPQKIKMLLEKFVEECKFPPVPDAICCYQKCHGYSKIQIYITDPDFKGFIRISCCQYCKIEFHMNCWKKLKTTTFNDKIDKDFLQGICLTPDCEGVISKIIIFSSGGEVKCEFEHKVIKEKVPPRPILKQKCSSLEKLRLKEDKKLKRKIQKKEAKKLAQERMEEDLRESNPPKNEEQKETVDNVQRCQFLDDRILQCIKQYADKIKSGIQNTAMLLKELLSWKVLSTEDYTTCFSSRNFLNEAVDYVIRHLIQENNRVKTRIFLHVLSELKEVEPKLAAWIQKLNSFGLDATGTFFSRYGASLKLLDFSIMTFLWNEKYGHKLDSIEGKQLDYFSEPASLKEARCLIWLLEEHRDKFPALHSALDEFFDIMDSRCTVLRKQDSGEAPFSSTKVKNKSKKKKPKDSKPMLVGSGTTSVTSNNEIITSSEDHSNRNSDSAGPFAVPDHLRQDVEEFEALYDQHSNEYVVRNKKLWDMNPKQKCSTLYDYFSQFLEEHGPLDMSNKMFSAEYEFFPEETRQILEKAGGLKPFLLGCPRFVVIDNCIALKKVASRLKKKRKKKNIKTKVEEISKAGEYVRVKLQLNPAAREFKPDVKSKPVSDSSSAPAFENVKPKPVSANSPKPACEDVKAKPVSDNSSRQVSEDGQPKGVSSNSPKPGSEDANYKRVSCNSPKPVLEDVKPTYWAQSHLVTGYCTYLPFQRFDITQTPPAYINVLPGLPQYTSIYTPLASLSPEYQLPRSVPVVPSFVANDRADKNAAAYFEGHHLNAENVAGHQIASETQILEGSLGISVKSHCSTGDAHTVLSESNRNDEHCGNSNNKCEVIPESTSAVTNIPHVQMVAIQVSWNIIHQEVNTEPYNPFEERQGEISRIEKEHQVLQDQLQEVYENYEQIKLKGLEETRDLEEKLKRHLEENKISKTELDWFLQDLEREIKKWQQEKKEIQERLKSLKKKIKKVSNASEMYTQKNDGKEKEHELHLDQSLEISNTLTNEKMKIEEYIKKGKEDYEESHQRAVAAEVSVLENWKESEVYKLQIMESQAEAFLKKLGLISRDPAAYPDMESDIRSWELFLSNVTKEIEKAKSQFEEQIKAIKNGSRLSELSKVQISELSFPACNTVHPELLPESSGDDGQGLVTSASDVTGNHAALHRDPSVFSAGDSPGEAPSALLPGPPPGQPEATQLTGPKRAGQAALSERSPVADRKQPVPPGRAARSSQSPKKPFNSIIEHLSVVFPCYNSTELAGFIKKVRSKNKNSLSGLSIDEIVQRVTEHILDEQKKKKPNPGKDKRTYEPSSATPVTRSSQGSPSVVVAPSPKTKGQKAEDVPVRIALGASSCEICHEVFKSKNVRVLKCGHKYHKGCFKQWLKGQSACPACQGRDLLTEESPSGRGWPSQNQELPSCSSR

SEQ ID NO: 2617 - protein, 1792 aa, Homo sapiens
MKMKGNEEFSKERFDIAIIYYTRAIEYRPENYLLYGNRALCFLRTGQFRNALGDGKRATILKNTWPKGHYRYCDALSMLGEYDWALQANIKAQKLCKNDPEGIKDLIQQHVKLQKQIEDLQGRTANKDPIKAFYENRAYTPRSLSAPIFTTSLNFVEKERDFRKINHEMANGGNQNLKVADEALKVDDCDCHPEFSPPSSQPPKHKGKQKSRNNESEKFSSSSPLTLPADLKNILEKQFSKSSRAAHQDFANIMKMLRSLIQDGYMALLEQRCRSAAQAFTELLNGLDPQKIKQLNLAMINYVLVVYGLAISLLGIGQPEELSEAENQFKRIIEHYPSEGLDCLAYCGIGKVYLKKNRFLEALNHFEKARTLIYRLPGVLTWPTSNVIIEESQPQKIKMLLEKFVEECKFPPVPDAICCYQKCHGYSKIQIYITDPDFKGFIRISCCQYCKIEFHMNCWKKLKTTTFNDKIDKDFLQGICLTPDCEGVISKIIIFSSGGEVKCEFEHKVIKEKVPPRPILKQKCSSLEKLRLKEDKKLKRKIQKKEAKKLAQERMEEDLRESNPPKNEEQKETVDNVQRCQFLDDRILQCIKQYADKIKSGIQNTAMLLKELLSWKVLSTEDYTTCFSSRNFLNEAVDYVIRHLIQENNRVKTRIFLHVLSELKEVEPKLAAWIQKLNSFGLDATGTFFSRYGASLKLLDFSIMTFLWNEKYGHKLDSIEGKQLDYFSEPASLKEARCLIWLLEEHRDKFPALHSALDEFFDIMDSRCTVLRKQDSGEAPFSSTKVKNKSKKKKPKDSKPMLVGSGTTSVTSNNEIITSSEDHSNRNSDSAGPFAVPDHLRQDVEEFEALYDQHSNEYVVRNKKLWDMNPKQKCSTLYDYFSQFLEEHGPLDMSNKMFSAEYEFFPEETRQILEKAGGLKPFLLGCPRFVVIDNCIALKKVASRLKKKRKKKNIKTKVEEISKAGEYVRVKLQLNPAAREFKPDVKSKPVSDSSSAPAFENVKPKPVSANSPKPACEDVKAKPVSDNSSRQVSEDGQPKGVSSNSPKPGSEDANYKRVSCNSPKPVLEDVKPTYWAQSHLVTGYCTYLPFQRFDITQTPPAYINVLPGLPQYTSIYTPLASLSPEYQLPRSVPVVPSFVANDRADKNAAAYFEGHHLNAENVAGHQIASETQILEGSLGISVKSHCSTGDAHTVLSESNRNDEHCGNSNNKCEVIPESTSAVTNIPHVQMVAIQVSWNIIHQEVNTEPYNPFEERQGEISRIEKEHQVLQDQLQEVYENYEQIKLKGLEETRDLEEKLKRHLEENKISKTELDWFLQDLEREIKKWQQEKKEIQERLKSLKKKIKKVSNASEMYTQKNDGKEKEHELHLDQSLEISNTLTNEKMKIEEYIKKGKEDYEESHQRAVAAEVSVLENWKESEVYKLQIMESQAEAFLKKLGLISRDPAAYPDMESDIRSWELFLSNVTKEIEKAKSQFEEQIKAIKNGSRLSELSKVQISELSFPACNTVHPELLPESSGDDGQGLVTSASDVTGNHAALHRDPSVFSAGDSPGEAPSALLPGPPPGQPEATQLTGPKRAGQAALSERSPVADRKQPVPPGRAARSSQSPKKPFNSIIEHLSVVFPCYNSTELAGFIKKVRSKNKNSLSGLSIDEIVQRVTEHILDEQKKKKPNPGKDKRTYEPSSATPVTRSSQGSPSVVVAPSPKTKGQKAEDVPVRIALGASSCEICHEVFKSKNVRVLKCGHKYHKGCFKQWLKGQSACPACQGRDLLTEESPSGRGWPSQNQELPSCSSR

SEQ ID NO: 2618 - protein, 1715 aa, Homo sapiens
MLGEYDWALQANIKAQKLCKNDPEGIKDLIQQHVKLQKQIEDLQGRTANKDPIKAFYENRAYTPRSLSAPIFTTSLNFVEKERDFRKINHEMANGGNQNLKVADEALKVDDCDCHPEFSPPSSQPPKHKGKQKSRNNESEKFSSSSPLTLPADLKNILEKQFSKSSRAAHQDFANIMKMLRSLIQDGYMALLEQRCRSAAQAFTELLNGLDPQKIKQLNLAMINYVLVVYGLAISLLGIGQPEELSEAENQFKRIIEHYPSEGLDCLAYCGIGKVYLKKNRFLEALNHFEKARTLIYRLPGVLTWPTSNVIIEESQPQKIKMLLEKFVEECKFPPVPDAICCYQKCHGYSKIQIYITDPDFKGFIRISCCQYCKIEFHMNCWKKLKTTTFNDKIDKDFLQGICLTPDCEGVISKIIIFSSGGEVKCEFEHKVIKEKVPPRPILKQKCSSLEKLRLKEDKKLKRKIQKKEAKKLAQERMEEDLRESNPPKNEEQKETVDNVQRCQFLDDRILQCIKQYADKIKSGIQNTAMLLKELLSWKVLSTEDYTTCFSSRNFLNEAVDYVIRHLIQENNRVKTRIFLHVLSELKEVEPKLAAWIQKLNSFGLDATGTFFSRYGASLKLLDFSIMTFLWNEKYGHKLDSIEGKQLDYFSEPASLKEARCLIWLLEEHRDKFPALHSALDEFFDIMDSRCTVLRKQDSGEAPFSSTKVKNKSKKKKPKDSKPMLVGSGTTSVTSNNEIITSSEDHSNRNSDSAGPFAVPDHLRQDVEEFEALYDQHSNEYVVRNKKLWDMNPKQKCSTLYDYFSQFLEEHGPLDMSNKMFSAEYEFFPEETRQILEKAGGLKPFLLGCPRFVVIDNCIALKKVASRLKKKRKKKNIKTKVEEISKAGEYVRVKLQLNPAAREFKPDVKSKPVSDSSSAPAFENVKPKPVSANSPKPACEDVKAKPVSDNSSRQVSEDGQPKGVSSNSPKPGSEDANYKRVSCNSPKPVLEDVKPTYWAQSHLVTGYCTYLPFQRFDITQTPPAYINVLPGLPQYTSIYTPLASLSPEYQLPRSVPVVPSFVANDRADKNAAAYFEGHHLNAENVAGHQIASETQILEGSLGISVKSHCSTGDAHTVLSESNRNDEHCGNSNNKCEVIPESTSAVTNIPHVQMVAIQVSWNIIHQEVNTEPYNPFEERQGEISRIEKEHQVLQDQLQEVYENYEQIKLKGLEETRDLEEKLKRHLEENKISKTELDWFLQDLEREIKKWQQEKKEIQERLKSLKKKIKKVSNASEMYTQKNDGKEKEHELHLDQSLEISNTLTNEKMKIEEYIKKGKEDYEESHQRAVAAEVSVLENWKESEVYKLQIMESQAEAFLKKLGLISRDPAAYPDMESDIRSWELFLSNVTKEIEKAKSQFEEQIKAIKNGSRLSELSKVQISELSFPACNTVHPELLPESSGDDGQGLVTSASDVTGNHAALHRDPSVFSAGDSPGEAPSALLPGPPPGQPEATQLTGPKRAGQAALSERSPVADRKQPVPPGRAARSSQSPKKPFNSIIEHLSVVFPCYNSTELAGFIKKVRSKNKNSLSGLSIDEIVQRVTEHILDEQKKKKPNPGKDKRTYEPSSATPVTRSSQGSPSVVVAPSPKTKGQKAEDVPVRIALGASSCEICHEVFKSKNVRVLKCGHKYHKGCFKQWLKGQSACPACQGRDLLTEESPSGRGWPSQNQELPSCSSR

SEQ ID NO: 2619 - protein, 1141 aa, Homo sapiens
MAAAVGVRGRYELPPCSGPGWLLSLSALLSVAARGAFATTHWVVTEDGKIQQQVDSPMNLKHPHDLVILMRQEATVNYLKELEKQLVAQKIHIEENEDRDTGLEQRHNKEDPDCIKAKVPLGDLDLYDGTYITLESKDISPEDYIDTESPVPPDPEQPDCTKILELPYSIHAFQHLRGVQERVNLSAPLLPKEDPIFTYLSKRLGRSIDDIGHLIHEGLQKNTSSWVLYNMASFYWRIKNEPYQVVECAMRALHFSSRHNKDIALVNLANVLHRAHFSADAAVVVHAALDDSDFFTSYYTLGNIYAMLGEYNHSVLCYDHALQARPGFEQAIKRKHAVLCQQKLEQKLEAQHRSLQRTLNELKEYQKQHDHYLRQQEILEKHKLIQEEQILRNIIHETQMAKEAQLGNHQICRLVNQQHSLHCQWDQPVRYHRGDIFENVDYVQFGEDSSTSSMMSVNFDVQSNQSDINDSVKSSPVAHSILWIWGRDSDAYRDKQHILWPKRADCTESYPRVPVGGELPTYFLPPENKGLRIHELSSDDYSTEEEAQTPDCSITDFRKSHTLSYLVKELEVRMDLKAKMPDDHARKILLSRINNYTIPEEEIGSFLFHAINKPNAPIWLILNEAGLYWRAVGNSTFAIACLQRALNLAPLQYQDVPLVNLANLLIHYGLHLDATKLLLQALAINSSEPLTFLSLGNAYLALKNISGALEAFRQALKLTTKCPECENSLKLIRCMQFYPFLYNITSSVCSGTVVEESNGSDEMENSDETKMSEEILALVDEFQQAWPLEGFGGALEMKGRRLDLQGIRVLKKGPQDGVARSSCYGDCRSEDDEATEWITFQVKRVKKPKGDHKKTPGKKVETGQIENGHRYQANLEITGPKVASPGPQGKKRDYQRLGWPSPDECLKLRWVELTAIVSTWLAVSSKNIDITEHIDFATPIQQPAMEPLCNGNLPTSMHTLDHLHGVSNRASLHYTGESQLTEVLQNLGKDQYPQQSLEQIGTRIAKVLEKNQTSWVLSSMAALYWRVKGQGKKAIDCLRQALHYAPHQMKDVPLISLANILHNAKLWNDAVIVATMAVEIAPHFAVNHFTLGNVYVAMEEFEKALVWYESTLKLQPEFVPAKNRIQTIQCHLMLKKGRRSP

SEQ ID NO: 2620 - protein, 956 aa, Homo sapiens
MAAAVGVRGRYELPPCSGPGWLLSLSALLSVAARGAFATTHWVVTEDGKIQQQVDSPMNLKHPHDLVILMRQEATVNYLKELEKQLVAQKIHIEENEDRDTGLEQRHNKEDPDCIKAKVPLGDLDLYDGTYITLESKDISPEDYIDTESPVPPDPEQPDCTKILELPYSIHAFQHLRGVQERVNLSAPLLPKEDPIFTYLSKRLGRSIDDIGHLIHEGLQKNTSSWVLYNMASFYWRIKNEPYQVVECAMRALHFSSRHNKDIALVNLANVLHRAHFSADAAVVVHAALDDSDFFTSYYTLGNIYAMLGEYNHSVLCYDHALQARPGFEQAIKRKHAVLCQQKLEQKLEAQHRSLQRTLNELKEYQKQHDHYLRQQEILEKHKLIQEEQILRNIIHETQMAKEAQLGNHQICRLVNQQHSLHCQWDQPVRYHRGDIFENVDYVQFGEDSSTSSMMSVNFDVQSNQSDINDSVKSSPVAHSILWIWGRDSDAYRDKQHILWPKRADCTESYPRVPVGGELPTYFLPPENKGLRIHELSSDDYSTEEEAQTPDCSITDFRKSHTLSYLVKELEVRMDLKAKMPDDHARKILLSRINNYTIPEEEIGSFLFHAINKPNAPIWLILNEAGLYWRAVGNSTFAIACLQRALNLAPLQYQDVPLVNLANLLIHYGLHLDATKLLLQALAINSSEPLTFLSLGNAYLALKNISGALEAFRQALKLTTKCPECENSLKLIRCMQFYPFLYNITSSVCSGNCHEKTLDNSHDKQKYFDNSQSLDAAEEEPSERGTEEDPVFSVENSGRDSDALRLESTVVEESNGSDEMENSDETKMSEEILALVDEFQQAWPLEGFGGALEMKGRRLDLQGIRVLKKGPQDGVARSSCYGDCRSEDDEATEWITFQVKRVKKPKGDHKKTPGKKVETGQIENGHRYQANLEITGPKVASPGPQGLLDWKTRKVP

SEQ ID NO: 2621 - protein, 440 aa, Homo sapiens
MMADEEEEVKPILQKLQELVDQLYSFRDCYFETHSVEDAGRKQQDVQKEMEKTLQQMEEVVGSVQGKAQVLMLTGKALNVTPDYSPKAEELLSKAVKLEPELVEAWNQLGEVYWKKGDVAAAHTCFSGALTHCRNKVSLQNLSMVLRQLRTDTEDEHSHHVMDSVRQAKLAVQMDVHDGRSWYILGNSYLSLYFSTGQNPKISQQALSAYAQAEKVDRKASSNPDLHLNRATLHKYEESYGEALEGFSRAAALDPAWPEPRQREQQLLEFLDRLTSLLESKGKVKTKKLQSMLGSLRPAHLGPCSDGHYQSASGQKVTLELKPLSTLQPGVNSGAVILGKVVFSLTTEEKVPFTFGLVDSDGPCYAVMVYNIVQSWGVLIGDSVAIPEPNLRLHRIQHKGKDYSFSSVRVETPLLLVVNGKPQGSSSQAVATVASRPQCE

SEQ ID NO: 2622 - protein, 661 aa, Homo sapiens
MAAGETQLYAKVSNKLKSRSSPSLLEPLLAMGFPVHTALKALAATGRKTAEEALAWLHDHCNDPSLDDPIPQEYALFLCPTGPLLEKLQEFWRESKRQCAKNRAHEVFPHVTLCDFFTCEDQKVECLYEALKRAGDRLLGSFPTAVPLALHSSISYLGFFVSGSPADVIREFAMTFATEASLLAGTSVSRFWIFSQVPGHGPNLRLSNLTRASFVSHYILQKYCSVKPCTKQLHLTLAHKFYPHHQRTLEQLARAIPLGHSCQWTAALYSRDMRFVHYQTLRALFQYKPQNVDELTLSPGDYIFVDPTQQDEASEGWVIGISQRTGCRGFLPENYTDRASESDTWVKHRMYTFSLATDLNSRKDGEASSRCSGEFLPQTARSLSSLQALQATVARKSVLVVRHGERVDQIFGKAWLQQCSTPDGKYYRPDLNFPCSLPRRSRGIKDFENDPPLSSCGIFQSRIAGDALLDSGIRISSVFASPALRCVQTAKLILEELKLEKKIKIRVEPGIFEWTKWEAGKTTPTLMSLEELKEANFNIDTDYRPAFPLSALMPAESYQEYMDRCTASMVQIVNTCPQDTGVILIVSHGSTLDSCTRPLLGLPPRECGDFAQLVRKIPSLGMCFCEENKEEGKWELVNPPVKTLTHGANAAFNWRNWISGN

SEQ ID NO: 2623 - protein, 623 aa, Homo sapiens
MAAGETQLYAKVSNKLKSRSSPSLLEPLLAMGFPVHTALKALAATGRKTAEEALAWLHDHCNDPSLDDPIPQEYALFLCPTGPLLEKLQEFWRESKRQCAKNRAHEVFPHVTLCDFFTCEDQKVECLYEALKRAGDRLLGSFPTAVPLALHSSISYLGFFVSGSPADVIREFAMTFATEASLLADCSVKPCTKQLHLTLAHKFYPHHQRTLEQLARAIPLGHSCQWTAALYSRDMRFVHYQTLRALFQYKPQNVDELTLSPGDYIFVDPTQQDEASEGWVIGISQRTGCRGFLPENYTDRASESDTWVKHRMYTFSLATDLNSRKDGEASSRCSGEFLPQTARSLSSLQALQATVARKSVLVVRHGERVDQIFGKAWLQQCSTPDGKYYRPDLNFPCSLPRRSRGIKDFENDPPLSSCGIFQSRIAGDALLDSGIRISSVFASPALRCVQTAKLILEELKLEKKIKIRVEPGIFEWTKWEAGKTTPTLMSLEELKEANFNIDTDYRPAFPLSALMPAESYQEYMDRCTASMVQIVNTCPQDTGVILIVSHGSTLDSCTRPLLGLPPRECGDFAQLVRKIPSLGMCFCEENKEEGKWELVNPPVKTLTHGANAAFNWRNWISGN

SEQ ID NO: 2624 - protein, 526 aa, Homo sapiens
MAAGETQLYAKVSNKLKSRSSPSLLEPLLAMGFPVHTALKALAATGRKTAEEALAWLHDHCNDPSLDDPIPQEYALFLCPTGPLLEKLQEFWRESKRQCAKNRAHEVFPHVTLCDFFTCEDQKVECLYEALKRAGDRLLGSFPTAVPLALHSSISYLGFFVSGSPADVIREFAMTFATEASLLADCSVKPCTKQLHLTLAHKFYPHHQRTLEQLARAIPLGHSCQWTAALYSRDMRFVHYQTLRALFQYKPQNVDELTLSPGDYIFVDPTQQDEASEGWVIGISQRTGCRGFLPENYTDRASESDTWVKHRMYTFSLATDLNSRKDGEASSRCSGEFLPQTARSLSSLQALQATVARKSVLVVRHGERVDQIFGKAWLQQCSTPDGKYYRPDLNFPCSLPRRSRGIKDFENDPPLSSCGIFQSRIAGDALLDSGIRISSVFASPALRCVQTAKLILEELKLEKKIKIRVEPGIFEWTKWEAGKTTPTLMSLEELKEANFNIDTDYRSLPWACASVKKIKRKENGSW

SEQ ID NO: 2625 - protein, 299 aa, Homo sapiens
MSSAAGPDPSEAPEERHFLRALELQPPLADMGRAELSSNATTSLVQRRKQAWGRQSWLEQIWNAGPVCQSTAEAAALERELLEDYRFGRQQLVELCGHASAVAVTKAFPLPALSRKQRTVLVVCGPEQNGAVGLVCARHLRVFEYEPTIFYPTRSLDLLHRDLTTQCEKMDIPFLSYLPTEVQLINEAYGLVVDAVLGPGVEPGEVGGPCTRALATLKLLSIPLVSLDIPSGWDAETGSDSEDGLRPDVLVSLAAPKRCAGRFSGRHHFVAGRFVPDDVRRKFALRLPGYTGTDCVAAL

SEQ ID NO: 2626 - protein, 249 aa, Homo sapiens
MSSAAGPDPSEAPEERHFLSTAEAAALERELLEDYRFGRQQLVELCGHASAVAVTKAFPLPALSRKQRTVLVVCGPEQNGAVGLVCARHLRVFEYEPTIFYPTRSLDLLHRDLTTQCEKMDIPFLSYLPTEVQLINEAYGLVVDAVLGPGVEPGEVGGPCTRALATLKLLSIPLVSLDIPSGWDAETGSDSEDGLRPDVLVSLAAPKRCAGRFSGRHHFVAGRFVPDDVRRKFALRLPGYTGTDCVAAL

SEQ ID NO: 2627 - protein, 169 aa, Homo sapiens
MAGAELGAALEQRLGALAIHTEVVEHPEVFTVEEMMPHIQHLKGAHSKNLFLKDKKKKNYWLVTVLHDRQINLNELAKQLGVGSGNLRFADETAMLEKLKVGQGCATPLALFCDGGDVKFVLDSAFLEGGHEKVYFHPMTNAATMGLSPEDFLTFVKMTGHDPIILNFD

SEQ ID NO: 2628 - protein, 111 aa, Homo sapiens
MSDAAVDTSSEITTKDLKEKKEVVEEAENGRDAPANGNAENEENGEQEADNEVDEEEEEGGEEEEEEEEGDGEEEDGDEDEEAESATGKRAAEDDEDDDVDTKKQKTDEDD

SEQ ID NO: 2629 - protein, 110 aa, Homo sapiens
MSDAAVDTSSEITTKDLKEKKEVVEEAENGRDAPANGNANEENGEQEADNEVDEEEEEGGEEEEEEEEGDGEEEDGDEDEEAESATGKRAAEDDEDDDVDTKKQKTDEDD

SEQ ID NO: 2630 - protein, 559 aa, Homo sapiens
MATATIALQVNGQQGGGSEPAAAAAVVAAGDKWKPPQGTDSIKMENGQSTAAKLGLPPLTPEQQEALQKAKKYAMEQSIKSVLVKQTIAHQQQQLTNLQMAAVTMGFGDPLSPLQSMAAQRQRALAIMCRVYVGSIYYELGEDTIRQAFAPFGPIKSIDMSWDSVTMKHKGFAFVEYEVPEAAQLALEQMNSVMLGGRNIKVGRPSNIGQAQPIIDQLAEEARAFNRIYVASVHQDLSDDDIKSVFEAFGKIKSCTLARDPTTGKHKGYGFIEYEKAQSSQDAVSSMNLFDLGGQYLRVGKAVTPPMPLLTPATPGGLPPAAAVAAAAATAKITAQEAVAGAAVLGTLGTPGLVSPALTLAQPLGTLPQAVMAAQAPGVITGVTPARPPIPVTIPSVGVVNPILASPPTLGLLEPKKEKEEEELFPESERPEMLSEQEHMSISGSSARHMVMQKLLRKQESTVMVLRNMVDPKDIDDDLEGEVTEECGKFGAVNRVIIYQEKQGEEEDAEIIVKIFVEFSIASETHKAIQALNGRWFAGRKVVAEVYDQERFDNSDLSA

SEQ ID NO: 2631 - protein, 542 aa, Homo sapiens
MATATIALQVNGQQGGGSEPAAAAAVVAAGDKWKPPQGTDSIKMENGQSTAAKLGLPPLTPEQQEALQKAKKYAMEQSIKSVLVKQTIAHQQQQLTNLQMAAQRQRALAIMCRVYVGSIYYELGEDTIRQAFAPFGPIKSIDMSWDSVTMKHKGFAFVEYEVPEAAQLALEQMNSVMLGGRNIKVGRPSNIGQAQPIIDQLAEEARAFNRIYVASVHQDLSDDDIKSVFEAFGKIKSCTLARDPTTGKHKGYGFIEYEKAQSSQDAVSSMNLFDLGGQYLRVGKAVTPPMPLLTPATPGGLPPAAAVAAAAATAKITAQEAVAGAAVLGTLGTPGLVSPALTLAQPLGTLPQAVMAAQAPGVITGVTPARPPIPVTIPSVGVVNPILASPPTLGLLEPKKEKEEEELFPESERPEMLSEQEHMSISGSSARHMVMQKLLRKQESTVMVLRNMVDPKDIDDDLEGEVTEECGKFGAVNRVIIYQEKQGEEEDAEIIVKIFVEFSIASETHKAIQALNGRWFAGRKVVAEVYDQERFDNSDLSA

SEQ ID NO: 2632 - protein, 516 aa, Homo sapiens
MENGQSTAAKLGLPPLTPEQQEALQKAKKYAMEQSIKSVLVKQTIAHQQQQLTNLQMAAVTMGFGDPLSPLQSMAAQRQRALAIMCRVYVGSIYYELGEDTIRQAFAPFGPIKSIDMSWDSVTMKHKGFAFVEYEVPEAAQLALEQMNSVMLGGRNIKVGRPSNIGQAQPIIDQLAEEARAFNRIYVASVHQDLSDDDIKSVFEAFGKIKSCTLARDPTTGKHKGYGFIEYEKAQSSQDAVSSMNLFDLGGQYLRVGKAVTPPMPLLTPATPGGLPPAAAVAAAAATAKITAQEAVAGAAVLGTLGTPGLVSPALTLAQPLGTLPQAVMAAQAPGVITGVTPARPPIPVTIPSVGVVNPILASPPTLGLLEPKKEKEEEELFPESERPEMLSEQEHMSISGSSARHMVMQKLLRKQESTVMVLRNMVDPKDIDDDLEGEVTEECGKFGAVNRVIIYQEKQGEEEDAEIIVKIFVEFSIASETHKAIQALNGRWFAGRKVVAEVYDQERFDNSDLSA

SEQ ID NO: 2633 - protein, 499 aa, Homo sapiens
MENGQSTAAKLGLPPLTPEQQEALQKAKKYAMEQSIKSVLVKQTIAHQQQQLTNLQMAAQRQRALAIMCRVYVGSIYYELGEDTIRQAFAPFGPIKSIDMSWDSVTMKHKGFAFVEYEVPEAAQLALEQMNSVMLGGRNIKVGRPSNIGQAQPIIDQLAEEARAFNRIYVASVHQDLSDDDIKSVFEAFGKIKSCTLARDPTTGKHKGYGFIEYEKAQSSQDAVSSMNLFDLGGQYLRVGKAVTPPMPLLTPATPGGLPPAAAVAAAAATAKITAQEAVAGAAVLGTLGTPGLVSPALTLAQPLGTLPQAVMAAQAPGVITGVTPARPPIPVTIPSVGVVNPILASPPTLGLLEPKKEKEEEELFPESERPEMLSEQEHMSISGSSARHMVMQKLLRKQESTVMVLRNMVDPKDIDDDLEGEVTEECGKFGAVNRVIIYQEKQGEEEDAEIIVKIFVEFSIASETHKAIQALNGRWFAGRKVVAEVYDQERFDNSDLSA

SEQ ID NO: 2634 - protein, 530 aa, Homo sapiens
MATATIALGTDSIKMENGQSTAAKLGLPPLTPEQQEALQKAKKYAMEQSIKSVLVKQTIAHQQQQLTNLQMAAVTMGFGDPLSPLQSMAAQRQRALAIMCRVYVGSIYYELGEDTIRQAFAPFGPIKSIDMSWDSVTMKHKGFAFVEYEVPEAAQLALEQMNSVMLGGRNIKVGRPSNIGQAQPIIDQLAEEARAFNRIYVASVHQDLSDDDIKSVFEAFGKIKSCTLARDPTTGKHKGYGFIEYEKAQSSQDAVSSMNLFDLGGQYLRVGKAVTPPMPLLTPATPGGLPPAAAVAAAAATAKITAQEAVAGAAVLGTLGTPGLVSPALTLAQPLGTLPQAVMAAQAPGVITGVTPARPPIPVTIPSVGVVNPILASPPTLGLLEPKKEKEEEELFPESERPEMLSEQEHMSISGSSARHMVMQKLLRKQESTVMVLRNMVDPKDIDDDLEGEVTEECGKFGAVNRVIIYQEKQGEEEDAEIIVKIFVEFSIASETHKAIQALNGRWFAGRKVVAEVYDQERFDNSDLSA

SEQ ID NO: 2635 - protein, 513 aa, Homo sapiens
MATATIALGTDSIKMENGQSTAAKLGLPPLTPEQQEALQKAKKYAMEQSIKSVLVKQTIAHQQQQLTNLQMAAQRQRALAIMCRVYVGSIYYELGEDTIRQAFAPFGPIKSIDMSWDSVTMKHKGFAFVEYEVPEAAQLALEQMNSVMLGGRNIKVGRPSNIGQAQPIIDQLAEEARAFNRIYVASVHQDLSDDDIKSVFEAFGKIKSCTLARDPTTGKHKGYGFIEYEKAQSSQDAVSSMNLFDLGGQYLRVGKAVTPPMPLLTPATPGGLPPAAAVAAAAATAKITAQEAVAGAAVLGTLGTPGLVSPALTLAQPLGTLPQAVMAAQAPGVITGVTPARPPIPVTIPSVGVVNPILASPPTLGLLEPKKEKEEEELFPESERPEMLSEQEHMSISGSSARHMVMQKLLRKQESTVMVLRNMVDPKDIDDDLEGEVTEECGKFGAVNRVIIYQEKQGEEEDAEIIVKIFVEFSIASETHKAIQALNGRWFAGRKVVAEVYDQERFDNSDLSA

SEQ ID NO: 2636 - protein, 326 aa, Homo sapiens
MRTEAQVPALQPPEPGLEGAMGHRTLVLPWVLLTLCVTAGTPEVWVQVRMEATELSSFTIRCGFLGSGSISLVTVSWGGPNGAGGTTLAVLHPERGIRQWAPARQARWETQSSISLILEGSGASSPCANTTFCCKFASFPEGSWEACGSLPPSSDPGLSAPPTPAPILRADLAGILGVSGVLLFGCVYLLHLLRRHKHRPAPRLQPSRTSPQAPRARAWAPSQASQAALHVPYATINTSCRPATLDTAHPHGGPSWWASLPTHAAHRPQGPAAWASTPIPARGSFVSVENGLYAQAGERPPHTGPGLTLFPDPRGPRAMEGPLGVR

SEQ ID NO: 2637 - protein, 529 aa, Homo sapiens
MFPLTEENKHVAQLLLNTGTCPRCIFRFCGVDFHAPYKLPYKELLNELQKFLETEKDELILEVMNPPPKKIRLQELEDSIDNLSQNGEGRISVSHVGSTASKNSNLNVCNVCLGILQEFCEKDFIKKVCQKVEASGFEFTSLVFSVSFPPQLSVREHAAWLLVKQEMGKQSLSLGRDDIVQLKEAYKWITHPLFSEELGVPIDGKSLFEVSVVFAHPETVEDCHFLAAICPDCFKPAKNKQSVFTRMAVMKALNKIKEEDFLKQFPCPPNSPKAVCAVLEIECAHGAVFVAGRYNKYSRNLPQTPWIIDGERKLESSVEELISDHLLAVFKAESFNFSSSGREDVDVRTLGNGRPFAIELVNPHRVHFTSQEIKELQQKINNSSNKIQVRDLQLVTREAIGHMKEGEEEKTKTYSALIWTNKAIQKKDIEFLNDIKDLKIDQKTPLRVLHRRPLAVRARVIHFMETQYVDEHHFRLHLKTQAGTYIKEFVHGDFGRTKPNIGSLMNVTADILELDVESVDVDWPPALDD

SEQ ID NO: 2638 - protein, 407 aa, Homo sapiens
MLLSVTSRPGISTFGYNRNNKKPYVSLAQQMAPPSPSNSTPNSSSGSNGNDQLSKTNLYIRGLQPGTTDQDLVKLCQPYGKIVSTKAILDKTTNKCKGYGFVDFDSPSAAQKAVTALKASGVQAQMAKQQEQDPTNLYISNLPLSMDEQELEGMLKPFGQVISTRILRDTSGTSRGVGFARMESTEKCEAIITHFNGKYIKTPPGVPAPSDPLLCKFADGGPKKRQNQGKFVQNGRAWPRNADMGVMALTYDPTTALQNGFYPAPYNITPNRMLAQSALSPYLSSPVSSYQRVTQTSPLQVPNPSWMHHHSYLMQPSGSVLTPGMDHPISLQPASMMGPLTQQLGHLSLSSTGTYMPTAAAMQGAYISQYTPVPSSSVSVEESSGQQNQVAVDAPSEHGVYSFQFNK

SEQ ID NO: 2639 - protein, 834 aa, Homo sapiens
MAVEDEGLRVFQSVKIKIGEAKNLPSYPGPSKMRDCYCTVNLDQEEVFRTKIVEKSLCPFYGEDFYCEIPRSFRHLSFYIFDRDVFRRDSIIGKVAIQKEDLQKYHNRDTWFQLQHVDADSEVQGKVHLELRLSEVITDTGVVCHKLATRIVECQGLPIVNGQCDPYATVTLAGPFRSEAKKTKVKRKTNNPQFDEVFYFEVTRPCSYSKKSHFDFEEEDVDKLEIRVDLWNASNLKFGDEFLGELRIPLKVLRQSSSYEAWYFLQPRDNGSKSLKPDDLGSLRLNVVYTEDHVFSSDYYSPLRDLLLKSADVEPVSASAAHILGEVCREKQEAAVPLVRLFLHYGRVVPFISAIASAEVKRTQDPNTIFRGNSLASKCIDETMKLAGMHYLHVTLKPAIEEICQSHKPCEIDPVKLKDGENLENNMENLRQYVDRVFHAITESGVSCPTVMCDIFFSLREAAAKRFQDDPDVRYTAVSSFIFLRFFAPAILSPNLFQLTPHHTDPQTSRTLTLISKTVQTLGSLSKSKSASFKESYMATFYEFFNEQKYADAVKNFLDLISSSGRRDPKSVEQPIVLKEGFMIKRAQGRKRFGMKNFKKRWFRLTNHEFTYHKSKGDQPLYSIPIENILAVEKLEEESFKMKNMFQVIQPERALYIQANNCVEAKDWIDILTKVSQCNQKRLTVYHPSAYLSGHWLCCRAPSDSAPGCSPCTGGLPANIQLDIDGDRETERIYSLFNLYMSKLEKMQEACGSKSVYDGPEQEEYSTFVIDDPQETYKTLKQVIAGVGALEQEHAQYKRDKFKKTKYGSQEHPIGDKSFQNYIRQQSETSTHSI

SEQ ID NO: 2640 - protein, 802 aa, Homo sapiens
MRDCYCTVNLDQEEVFRTKIVEKSLCPFYGEDFYCEIPRSFRHLSFYIFDRDVFRRDSIIGKVAIQKEDLQKYHNRDTWFQLQHVDADSEVQGKVHLELRLSEVITDTGVVCHKLATRIVECQGLPIVNGQCDPYATVTLAGPFRSEAKKTKVKRKTNNPQFDEVFYFEVTRPCSYSKKSHFDFEEEDVDKLEIRVDLWNASNLKFGDEFLGELRIPLKVLRQSSSYEAWYFLQPRDNGSKSLKPDDLGSLRLNVVYTEDHVFSSDYYSPLRDLLLKSADVEPVSASAAHILGEVCREKQEAAVPLVRLFLHYGRVVPFISAIASAEVKRTQDPNTIFRGNSLASKCIDETMKLAGMHYLHVTLKPAIEEICQSHKPCEIDPVKLKDGENLENNMENLRQYVDRVFHAITESGVSCPTVMCDIFFSLREAAAKRFQDDPDVRYTAVSSFIFLRFFAPAILSPNLFQLTPHHTDPQTSRTLTLISKTVQTLGSLSKSKSASFKESYMATFYEFFNEQKYADAVKNFLDLISSSGRRDPKSVEQPIVLKEGFMIKRAQGRKRFGMKNFKKRWFRLTNHEFTYHKSKGDQPLYSIPIENILAVEKLEEESFKMKNMFQVIQPERALYIQANNCVEAKDWIDILTKVSQCNQKRLTVYHPSAYLSGHWLCCRAPSDSAPGCSPCTGGLPANIQLDIDGDRETERIYSLFNLYMSKLEKMQEACGSKSVYDGPEQEEYSTFVIDDPQETYKTLKQVIAGVGALEQEHAQYKRDKFKKTKYGSQEHPIGDKSFQNYIRQQSETSTHSI

SEQ ID NO: 2641 - protein, 593 aa, Homo sapiens
MTAEDSTAAMSSDSAAGSSAKVPEGVAGAPNEAALLALMERTGYSMVQENGQRKYGGPPPGWEGPHPQRGCEVFVGKIPRDVYEDELVPVFEAVGRIYELRLMMDFDGKNRGYAFVMYCHKHEAKRAVRELNNYEIRPGRLLGVCCSVDNCRLFIGGIPKMKKREEILEEIAKVTEGVLDVIVYASAADKMKNRGFAFVEYESHRAAAMARRKLMPGRIQLWGHQIAVDWAEPEIDVDEDVMETVKILYVRNLMIETTEDTIKKSFGQFNPGCVERVKKIRDYAFVHFTSREDAVHAMNNLNGTELEGSCLEVTLAKPVDKEQYSRYQKAARGGGAAEAAQQPSYVYSCDPYTLAYYGYPYNALIGPNRDYFVKAGSIRGRGRGAAGNRAPGPRGSYLGGYSAGRGIYSRYHEGKGKQQEKGYELVPNLEIPTVNPVAIKPGTVAIPAIGAQYSMFPAAPAPKMIEDGKIHTVEHMISPIAVQPDPASAAAAAAAAAAAAAAVIPTVSTPPPFQGRPITPVYTVAPNVQRIPTAGIYGASYVPFAAPATATIATLQKNAAAAAAMYGGYAGYIPQAFPAAAIQVPIPDVYQTY

SEQ ID NO: 2642 - protein, 524 aa, Homo sapiens
MTAEDSTAAMSSDSAAGSSAKVPEGVAGAPNEAALLALMERTGYSMVQENGQRKYGGPPPGWEGPHPQRGCEVFVGKIPRDVYEDELVPVFEAVGRIYELRLMMDFDGKNRGYAFVMYCHKHEAKRAVRELNNYEIRPGRLLGVCCSVDNCRLFIGGIPKMKKREEILEEIAKVTEGVLDVIVYASAADKMKNRGFAFVEYESHRAAAMARRKLMPGRIQLWGHQIAVDWAEPEIDVDEDVMETVKILYVRNLMIETTEDTIKKSFGQFNPGCVERVKKIRDYAFVHFTSREDAVHAMNNLNGTELEGSCLEVTLAKPVDKEQYSRYQKAARGGGAAEAAQQPSYVYSCDPYTLAYYGYPYNALIGPNRDYFVKVAIPAIGAQYSMFPAAPAPKMIEDGKIHTVEHMISPIAVQPDPASAAAAAAAAAAAAAAVIPTVSTPPPFQGRPITPVYTVAPNVQRIPTAGIYGASYVPFAAPATATIATLQKNAAAAAAMYGGYAGYIPQAFPAAAIQVPIPDVYQTY

SEQ ID NO: 2643 - protein, 815 aa, Homo sapiens
MGSDKRVSRTERSGRYGSIIDRDDRDERESRSRRRDSDYKRSSDDRRGDRYDDYRDYDSPERERERRNSDRSEDGYHSDGDYGEHDYRHDISDERESKTIMLRGLPITITESDIREMMESFEGPQPADVRLMKRKTGVSRGFAFVEFYHLQDATSWMEANQKKLVIQGKHIAMHYSNPRPKFEDWLCNKCCLNNFRKRLKCFRCGADKFDSEQEVPPGTTESVQSVDYYCDTIILRNIAPHTVVDSIMTALSPYASLAVNNIRLIKDKQTQQNRGFAFVQLSSAMDASQLLQILQSLHPPLKIDGKTIGVDFAKSARKDLVLSDGNRVSAFSVASTAIAAAQWSSTQSQSGEGGSVDYSYLQPGQDGYAQYAQYSQDYQQFYQQQAGGLESDASSASGTAVTTTSAAVVSQSPQLYNQTSNPPGSPTEEAQPSTSTSTQAPAASPTGVVPGTKYAVPDTSTYQYDESSGYYYDPTTGLYYDPNSQYYYNSLTQQYLYWDGEKETYVPAAESSSHQQSGLPPAKEGKEKKEKPKSKTAQQIAKDMERWAKSLNKQKENFKNSFQPVNSLREEERRESAAADAGFALFEKKGALAERQQLIPELVRNGDEENPLKRGLVAAYSGDSDNEEELVERLESEEEKLADWKKMACLLCRRQFPNKDALVRHQQLSDLHKQNMDIYRRSRLSEQELEALELREREMKYRDRAAERREKYGIPEPPEPKRKKQFDAGTVNYEQPTKDGIDHSNIGNKMLQAMGWREGSGLGRKCQGITAPIEAQVRLKGAGLGAKGSAYGLSGADSYKDAVRKAMFARFTEME

SEQ ID NO: 2644 - protein, 143 aa, Homo sapiens
MGSDKRVSRTERSGRYGSIIDRDDRDERESRSRRRDSDYKRSSDDRRGDRYDDYRDYDSPERERERRNSDRSEDGYHSDGDYGEHDYRHDISDERESKTIMLRGLPITITESDIREMMESFEGPQPADVRLMKRKTGESLLSS

SEQ ID NO: 2645 - protein, 126 aa, Homo sapiens
MGSDKRVSRTERSGRYGSIIDRDDRDERESRSRRRDSDYKRSSDDRRGDRYDDYRDYDSPERERYSRNDGVLRRPSACGCEADEEENRCKPWFRLRGVLSLARCYQLDGSQSEKVGDSRKAHCNAL

SEQ ID NO: 2646 - protein, 141 aa, Homo sapiens
MGSDKRVSRTERSGRYGSIIDRDDRDERESRSRRRDSDYKRSSDDRRGDRYDDYRDYDSPERERERRNSDRSEDGYHSDGDYGEHDYRHDISDERESKTIMLRGLPITITESDIREMMESFEGPQPADVRLMKRKTGVSRG

SEQ ID NO: 2647 - protein, 150 aa, Homo sapiens
MGSDKRVSRTERSGRYGSIIDRDDRDERESRSRRRDSDYKRSSDDRRGDRYDDYRDYDSPERERERRNSDRSEDGYHSDGDYGEHDYRHDISDERESKTIMLRGLPITITESDIREMMESFEGPQPADVRLMKRKTEKVGDSRKAHCNAL

SEQ ID NO: 2648 - protein, 215 aa, Homo sapiens
MTSRSTARPNGQPQASKICQFKLVLLGESAVGKSSLVLRFVKGQFHEYQESTIGAAFLTQSVCLDDTTVKFEIWDTAGQERYHSLAPMYYRGAQAAIVVYDITNQETFARAKTWVKELQRQASPSIVIALAGNKADLANKRMVEYEEAQAYADDNSLLFMETSAKTAMNVNDLFLAIAKKLPKSEPQNLGGAAGRSRGVDLHEQSQQNKSQCCSN

SEQ ID NO: 2649 - protein, 174 aa, Homo sapiens
MTSRSTARPNGQPQASKICQFKLVLLGESAVGKSSLVLRFVKGQFHEYQESTIGAAFLTQSVCLDDTTVKFEIWDTAGQERYHSLAPMYYRGAQAAIVVYDITNQEAQAYADDNSLLFMETSAKTAMNVNDLFLAIAKKLPKSEPQNLGGAAGRSRGVDLHEQSQQNKSQCCSN

SEQ ID NO: 2650 - protein, 440 aa, Homo sapiens
MALLCLDGVFLSSAENDFVHRIQEELDRFLLQKQLSKVLLFPPLSSRLRYLIHRTAENFDLLSSFSVGEGWKRRTVICHQDIRVPSSDGLSGPCRAPASCPSRYHGPRPISNQGAAAVPRGARAGRWYRGRKPDQPLYVPRVLRRQEEWGLTSTSVLKREAPAGRDPEEPGDVGAGDPNSDQGLPVLMTQGTEDLKGPGQRCENEPLLDPVGPEPLGPESQSGKGDMVEMATRFGSTLQLDLEKGKESLLEKRLVAEEEEDEEEVEEDGPSSCSEDDYSELLQEITDNLTKKEIQIEKIHLDTSSFVEELPGEKDLAHVVEIYDFEPALKTEDLLATFSEFQEKGFRIQWVDDTHALGIFPCLASAAEALTREFSVLKIRPLTQGTKQSKLKALQRPKLLRLVKERPQTNATVARRLVARALGLQHKKKERPAVRGPLPP

SEQ ID NO: 2651 - protein, 398 aa, Homo sapiens
MALLCLDGVFLSSAENDFVHRIQEELDRFLLQKQLSKVLLFPPLSSRLRYLIHRTAENFDLLSSFSVGEGWKRRTVICHQDIRVPSSDGLSGPCRAPASCPSRQEEWGLTSTSVLKREAPAGRDPEEPGDVGAGDPNSDQGLPVLMTQGTEDLKGPGQRCENEPLLDPVGPEPLGPESQSGKGDMVEMATRFGSTLQLDLEKGKESLLEKRLVAEEEEDEEEVEEDGPSSCSEDDYSELLQEITDNLTKKEIQIEKIHLDTSSFVEELPGEKDLAHVVEIYDFEPALKTEDLLATFSEFQEKGFRIQWVDDTHALGIFPCLASAAEALTREFSVLKIRPLTQGTKQSKLKALQRPKLLRLVKERPQTNATVARRLVARALGLQHKKKERPAVRGPLPP

SEQ ID NO: 2652 - protein, 491 aa, Homo sapiens
MSLKSERRGIHVDQSDLLCKKGCGYYGNPAWQGFCSKCWREEYHKARQKQIQEDWELAERLQREEEEAFASSQSSQGAQSLTFSKFEEKKTNEKTRKVTTVKKFFSASSRVGSKKEIQEAKAPSPSINRQTSIETDRVSKEFIEFLKTFHKTGQEIYKQTKLFLEGMHYKRDLSIEEQSECAQDFYHNVAERMQTRGKVPPERVEKIMDQIEKYIMTRLYKYVFCPETTDDEKKDLAIQKRIRALRWVTPQMLCVPVNEDIPEVSDMVVKAITDIIEMDSKRVPRDKLACITKCSKHIFNAIKITKNEPASADDFLPTLIYIVLKGNPPRLQSNIQYITRFCNPSRLMTGEDGYYFTNLCCAVAFIEKLDAQSLNLSQEDFDRYMSGQTSPRKQEAESWSPDACLGVKQMYKNLDLLSQLNERQERIMNEAKKLEKDLIDWTDGIAREVQDIVEKYPLEIKPPNQPLAAIDSENVENDKLPPPLQPQVYAG

SEQ ID NO: 2653 - protein, 531 aa, Homo sapiens
MSLKSERRGIHVDQSDLLCKKGCGYYGNPAWQGFCSKCWREEYHKARQKQIQEDWELAERALLCYPGWSAMVQFQLTATSASWAQVILLLQPPKWLGLQKLQREEEEAFASSQSSQGAQSLTFSKFEEKKTNEKTRKVTTVKKFFSASSRVGSKKEIQEAKAPSPSINRQTSIETDRVSKEFIEFLKTFHKTGQEIYKQTKLFLEGMHYKRDLSIEEQSECAQDFYHNVAERMQTRGKVPPERVEKIMDQIEKYIMTRLYKYVFCPETTDDEKKDLAIQKRIRALRWVTPQMLCVPVNEDIPEVSDMVVKAITDIIEMDSKRVPRDKLACITKCSKHIFNAIKITKNEPASADDFLPTLIYIVLKGNPPRLQSNIQYITRFCNPSRLMTGEDGYYFTNLCCAVAFIEKLDAQSLNLSQEDFDRYMSGQTSPRKQEAESWSPDACLGVKQMYKNLDLLSQLNERQERIMNEAKKLEKDLIDWTDGIAREVQDIVEKYPLEIKPPNQPLAAIDSENVENDKLPPPLQPQVYAG

SEQ ID NO: 2654 - protein, 505 aa, Homo sapiens
MMASSYHEVVSRKKMSLKSERRGIHVDQSDLLCKKGCGYYGNPAWQGFCSKCWREEYHKARQKQIQEDWELAERLQREEEEAFASSQSSQGAQSLTFSKFEEKKTNEKTRKVTTVKKFFSASSRVGSKKEIQEAKAPSPSINRQTSIETDRVSKEFIEFLKTFHKTGQEIYKQTKLFLEGMHYKRDLSIEEQSECAQDFYHNVAERMQTRGKVPPERVEKIMDQIEKYIMTRLYKYVFCPETTDDEKKDLAIQKRIRALRWVTPQMLCVPVNEDIPEVSDMVVKAITDIIEMDSKRVPRDKLACITKCSKHIFNAIKITKNEPASADDFLPTLIYIVLKGNPPRLQSNIQYITRFCNPSRLMTGEDGYYFTNLCCAVAFIEKLDAQSLNLSQEDFDRYMSGQTSPRKQEAESWSPDACLGVKQMYKNLDLLSQLNERQERIMNEAKKLEKDLIDWTDGIAREVQDIVEKYPLEIKPPNQPLAAIDSENVENDKLPPPLQPQVYAG

SEQ ID NO: 2655 - protein, 372 aa, Homo sapiens
MKQLPVLEPGDKPRKATWYTLTVPGDSPCARVGHSCSYLPPVGNAKRGKVFIVGGANPNRSFSDVHTMDLGKHQWDLDTCKGLLPRYEHASFIPSCTPDRIWVFGGANQSGNRNCLQVLNPETRTWTTPEVTSPPPSPRTFHTSSAAIGNQLYVFGGGERGAQPVQDTKLHVFDANTLTWSQPETLGNPPSPRHGHVMVAAGTKLFIHGGLAGDRFYDDLHCIDISDMKWQKLNPTGAAPAGCAAHSAVAMGKHVYIFGGMTPAGALDTMYQYHTEEQHWTLLKFDTLLPPGRLDHSMCIIPWPVTCASEKEDSNSLTLNHEAEKEDSADKVMSHSGDSHEESQTATLLCLVFGGMNTEGEIYDDCIVTVVD

SEQ ID NO: 2656 - protein, 321 aa, Homo sapiens
MKQLPVLEPGDKPRKATWYTLTVPGDSPCARVGHSCSYLPPVGNAKRGKVFIVGGANPNRSFSDVHTMDLETRTWTTPEVTSPPPSPRTFHTSSAAIGNQLYVFGGGERGAQPVQDTKLHVFDANTLTWSQPETLGNPPSPRHGHVMVAAGTKLFIHGGLAGDRFYDDLHCIDISDMKWQKLNPTGAAPAGCAAHSAVAMGKHVYIFGGMTPAGALDTMYQYHTEEQHWTLLKFDTLLPPGRLDHSMCIIPWPVTCASEKEDSNSLTLNHEAEKEDSADKVMSHSGDSHEESQTATLLCLVFGGMNTEGEIYDDCIVTVVD

SEQ ID NO: 2657 - protein, 211 aa, Homo sapiens
MQAPHKEHLYKLLVIGDLGVGKTSIIKRYVHQNFSSHYRATIGVDFALKVLHWDPETVVRLQLWDIAGQERFGNMTRVYYREAMGAFIVFDVTRPATFEAVAKWKNDLDSKLSLPNGKPVSVVLLANKCDQGKDVLMNNGLKMDQFCKEHGFVGWFETSAKENINIDEASRCLVKHILANECDLMESIEPDVVKPHLTSTKVASCSGCAKS

SEQ ID NO: 2658 - protein, 200 aa, Homo sapiens
MAKKTYDLLFKLLLIGDSGVGKTCVLFRFSDDAFNTTFISTIGIDFKIKTVELQGKKIKLQIWDTAGQERFHTITTSYYRGAMGIMLVYDITNGKSFENISKWLRNIDEHANEDVERMLLGNKCDMDDKRVVPKGKGEQIAREHGIRFFETSAKANINIEKAFLTLAEDILRKTPVKEPNSENVDISSGGGVTGWKSKCC

SEQ ID NO: 2659 - protein, 151 aa, Homo sapiens
MDSAACAAAATPVPALALALAPDLAQAPLALPGLLSPSCLLSSGQEVNGSERGTCLWRPWLSSTNDSPRQMRKLVDLAAGGATAAEVTKAESKFHHPVRLFWPKSRSFDYLYSAGEILLQNFPVQATINLYEDSDSEEEEEDEEQEDEEEK

SEQ ID NO: 2660 - protein, 104 aa, Homo sapiens
MDSAACAAAATPVPALALALAPDLAQAPLALPGLLSPSCLLSSGQEVNGSERLFWPKSRSFDYLYSAGEILLQNFPVQATINLYEDSDSEEEEEDEEQEDEEEK

SEQ ID NO: 2661 - protein, 214 aa, Homo sapiens [sequence omitted]

SEQ ID NO: 2662 - protein, 490 aa, Homo sapiens
MEDSASASLSSAAATGTSTSTPAAPTARKQLDKEQVRKAVDALLTHCKSRKNNYGLLLNENESLFLMVVLWKIPSKELRVRLTLPHSIRSDSEDICLFTKDEPNSTPEKTEQFYRKLLNKHGIKTVSQIISLQTLKKEYKSYEAKLRLLSSFDFFLTDARIRRLLPSLIGRHFYQRKKVPVSVNLLSKNLSREINDCIGGTVLNISKSGSCSAIRIGHVGMQIEHIIENIVAVTKGLSEKLPEKWESVKLLFVKTEKSAALPIFSSFVSNWDEATKRSLLNKKKKEARRKRRERNFEKQKERKKKRQQARKTASVLSKDDVAPESGDTTVKKPESKKEQTPEHGKKKRGRGKAQVKATNESEDEIPQLVPIGKKTPANEKVEIQKHATGKKSPAKSPNPSTPRGKKRKALPASETPKAAESETPGKSPEKKPKIKEEAVKEKSPSLGKKDARQTPKKPEAKFFTTPSKSVRKASHTPKKWPKKPKVPQST

SEQ ID NO: 2663 - protein, 270 aa, Homo sapiens
MQIEHIIENIVAVTKGLSEKLPEKWESVKLLFVKTEKSAALPIFSSFVSNWDEATKRSLLNKKKKEARRKRRERNFEKQKERKKKRQQARKTASVLSKDDVAPESGDTTVKKPESKKEQTPEHGKKKRGRGKAQVKATNESEDEIPQLVPIGKKTPANEKVEIQKHATGKKSPAKSPNPSTPRGKKRKALPASETPKAAESETPGKSPEKKPKIKEEAVKEKSPSLGKKDARQTPKKPEAKFFTTPSKSVRKASHTPKKWPKKPKVPQST

SEQ ID NO: 2664 - protein, 117 aa, Homo sapiens [sequence omitted]

SEQ ID NO: 2665 - protein, 444 aa, Homo sapiens
MWLFTVNQVLRKMQRRHSSNTDNIPPERNRSQALSSEASVDEGGVFESLKAEAASPPALFSGLSGSLPTSSFPSSLVLGSSAGGGDVFIQMPASREEGGGRGEGGAYHHRQPHHHFHHGGHRGGSLLQHVGGDHRGHSEEGGDEQPGTPAPALSELKAVICWLQKGLPFILILLAKLCFQHKLGIAVCIGMASTFAYANSTLREQVSLKEKRSVLVILWILAFLAGNTLYVLYTFSSQQLYNSLIFLKPNLEMLDFFDLLWIVGIADFVLKYITIALKCLIVALPKIILAVKSKGKFYLVIEELSQLFRSLVPIQLWYKYIMGDDSSNSYFLGGVLIVLYSLCKSFDICGRVGGVRKALKLLCTSQNYGVRATGQQCTEAGDICAICQAEFREPLILLCQHVFCEECLCLWLDRERTCPLCRSVAVDTLRCWKDGATSAHFQVY

SEQ ID NO: 2666 - protein, 321 aa, Homo sapiens
MWLFTVNQVLRKMQRRHSSNTDNIPPERNRSQALSSEASVDEGGVFESLKAEAASPPALFSGLSGSLPTSSFPSSLVLGSSAGGGDVFIQMPASREEGGGRGEGGAYHHRQPHHHFHHGGHRGGSLLQHVGGDHRGHSEEGGDEQPGTPAPALSELKAVICWLQKGLPFILILLAKLCFQHKLGIAVCIGMASTFAYANSTLREQVSLKEKRSVLVILWILAFLAGNTLYVLYTFSSEIAPQHSNLGDRVSETLSKKKKKERREGGRKEGRKERKKAQLWPRCGYPLVSCLYVFLLFLFCHLPHLSLRPVSSSCGHCHPLW

SEQ ID NO: 2667 - protein, 330 aa, Homo sapiens
MPASREEGGGRGEGGAYHHRQPHHHFHHGGHRGGSLLQHVGGDHRGHSEEGGDEQPGTPAPALSELKAVICWLQKGLPFILILLAKLCFQHKLGIAVCIGMASTFAYANSTLREQVSLKEKRSVLVILWILAFLAGNTLYVLYTFSSQQLYNSLIFLKPNLEMLDFFDLLWIVGIADFVLKYITIALKCLIVALPKIILAVKSKGKFYLVIEELSQLFRSLVPIQLWYKYIMGDDSSNSYFLGGVLIVLYSLCKSFDICGRVGGVRKALKLLCTSQNYGVRATGQQCTEAGDICAICQAEFREPLILLCQMLLKGHKKLELEKIDESAGV

SEQ ID NO: 2668 - protein, 192 aa, Homo sapiens
MLDFFDLLWIVGIADFVLKYITIALKCLIVALPKIILAVKSKGKFYLVIEELSQLFRSLVPIQLWYKYIMGDDSSNSYFLGGVLIVLYSLCKSFDICGRVGGVRKALKLLCTSQNYGVRATGQQCTEAGDICAICQAEFREPLILLCQHVFCEECLCLWLDRERTCPLCRSVAVDTLRCWKDGATSAHFQVY

SEQ ID NO: 2669 - protein, 420 aa, Homo sapiens
MWLFTVNQVLRKMQRRHSSNTDNIPPERNRSQALSSEASVDEGGVFESLKAEAASPPALFSGLSGSLPTSSFPSSLVLGSSAGGGDVFIQMPASREEGGGRGEGGAYHHRQPHHHFHHGGHRGGSLLQHVGGDHRGHSEEGGDEQPGTPAPALSELKAVICWLQKGLPFILILLAKLCFQHKLGIAVCIGMASTFAYANSTLREQVSLKEKRSVLVILWILAFLAGNTLYVLYTFSSQQLYNSLIFLKPNLEMLDFFDLLWIVGIADFVLKYITIALKCLIVALPKIILAVKSKGKFYLVIEELSQLFRSLVPIQLWYKYIMGDDSSNSYFLGGVLIVLYSLCKSFDICGRVGGVRKALKLLCTSQNYGVRATGQQCTEAGDICAICQAEFREPLILLCQMLLKGHKKLELEKIDESAGV

SEQ ID NO: 2670 - protein, 663 aa, Homo sapiens
MAAKEKLEAVLNVALRVPSIMLLDVLYRWDVSSFFQQIQRSSLSNNPLFQYKYLALNMHYVGYILSVVLLTLPRQHLVQLYLYFLTALLLYAGHQISRDYVRSELEFAYEGPMYLEPLSMNRFTTALIGQLVVCTLCSCVMKTKQIWLFSAHMLPLLARLCLVPLETIVIINKFAMIFTGLEVLYFLGSNLLVPYNLAKSAYRELVQVVEVYGLLALGMSLWNQLVVPVLFMVFWLVLFALQIYSYFSTRDQPASRERLLFLFLTSIAECCSTPYSLLGLVFTVSFVALGVLTLCKFYLQGYRAFMNDPAMNRGMTEGVTLLILAVQTGLIELQVVHRAFLLSIILFIVVASILQSMLEIADPIVLALGASRDKSLWKHFRAVSLCLFLLVFPAYMAYMICQFFHMDFWLLIIISSSILTSLQVLGTLFIYVLFMVEEFRKEPVENMDDVIYYVNGTYRLLEFLVALCVVAYGVSETIFGEWTVMGSMIIFIHSYYNVWLRAQLGWKSFLLRRDAVNKIKSLPIATKEQLEKHNDICAICYQDMKSAVITPCSHFFHAGCLKKWLYVQETCPLCHCHLKNSSQLPGLGTEPVLQPHAGAEQNVMFQEGTEPPGQEHTPGTRIQEGSRDNNEYIARRPDNQEGAFDPKEYPHSAKDEAHPVESA

SEQ ID NO: 2671 - protein, 691 aa, Homo sapiens
MMRNHRIASSLCGDQVFSKKKKKKKKNNMAAKEKLEAVLNVALRVPSIMLLDVLYRWDVSSFFQQIQRSSLSNNPLFQYKYLALNMHYVGYILSVVLLTLPRQHLVQLYLYFLTALLLYAGHQISRDYVRSELEFAYEGPMYLEPLSMNRFTTALIGQLVVCTLCSCVMKTKQIWLFSAHMLPLLARLCLVPLETIVIINKFAMIFTGLEVLYFLGSNLLVPYNLAKSAYRELVQVVEVYGLLALGMSLWNQLVVPVLFMVFWLVLFALQIYSYFSTRDQPASRERLLFLFLTSIAECCSTPYSLLGLVFTVSFVALGVLTLCKFYLQGYRAFMNDPAMNRGMTEGVTLLILAVQTGLIELQVVHRAFLLSIILFIVVASILQSMLEIADPIVLALGASRDKSLWKHFRAVSLCLFLLVFPAYMAYMICQFFHMDFWLLIIISSSILTSLQVLGTLFIYVLFMVEEFRKEPVENMDDVIYYVNGTYRLLEFLVALCVVAYGVSETIFGEWTVMGSMIIFIHSYYNVWLRAQLGWKSFLLRRDAVNKIKSLPIATKEQLEKHNDICAICYQDMKSAVITPCSHFFHAGCLKKWLYVQETCPLCHCHLKNSSQLPGLGTEPVLQPHAGAEQNVMFQEGTEPPGQEHTPGTRIQEGSRDNNEYIARRPDNQEGAFDPKEYPHSAKDEAHPVESA

SEQ ID NO: 2672 - protein, 680 aa, Homo sapiens
MAEVVFSKKKKKKKKNNMAAKEKLEAVLNVALRVPSIMLLDVLYRWDVSSFFQQIQRSSLSNNPLFQYKYLALNMHYVGYILSVVLLTLPRQHLVQLYLYFLTALLLYAGHQISRDYVRSELEFAYEGPMYLEPLSMNRFTTALIGQLVVCTLCSCVMKTKQIWLFSAHMLPLLARLCLVPLETIVIINKFAMIFTGLEVLYFLGSNLLVPYNLAKSAYRELVQVVEVYGLLALGMSLWNQLVVPVLFMVFWLVLFALQIYSYFSTRDQPASRERLLFLFLTSIAECCSTPYSLLGLVFTVSFVALGVLTLCKFYLQGYRAFMNDPAMNRGMTEGVTLLILAVQTGLIELQVVHRAFLLSIILFIVVASILQSMLEIADPIVLALGASRDKSLWKHFRAVSLCLFLLVFPAYMAYMICQFFHMDFWLLIIISSSILTSLQVLGTLFIYVLFMVEEFRKEPVENMDDVIYYVNGTYRLLEFLVALCVVAYGVSETIFGEWTVMGSMIIFIHSYYNVWLRAQLGWKSFLLRRDAVNKIKSLPIATKEQLEKHNDICAICYQDMKSAVITPCSHFFHAGCLKKWLYVQETCPLCHCHLKNSSQLPGLGTEPVLQPHAGAEQNVMFQEGTEPPGQEHTPGTRIQEGSRDNNEYIARRPDNQEGAFDPKEYPHSAKDEAHPVESA

SEQ ID NO: 2673 - protein, 677 aa, Homo sapiens
MVFSKKKKKKKKNNMAAKEKLEAVLNVALRVPSIMLLDVLYRWDVSSFFQQIQRSSLSNNPLFQYKYLALNMHYVGYILSVVLLTLPRQHLVQLYLYFLTALLLYAGHQISRDYVRSELEFAYEGPMYLEPLSMNRFTTALIGQLVVCTLCSCVMKTKQIWLFSAHMLPLLARLCLVPLETIVIINKFAMIFTGLEVLYFLGSNLLVPYNLAKSAYRELVQVVEVYGLLALGMSLWNQLVVPVLFMVFWLVLFALQIYSYFSTRDQPASRERLLFLFLTSIAECCSTPYSLLGLVFTVSFVALGVLTLCKFYLQGYRAFMNDPAMNRGMTEGVTLLILAVQTGLIELQVVHRAFLLSIILFIVVASILQSMLEIADPIVLALGASRDKSLWKHFRAVSLCLFLLVFPAYMAYMICQFFHMDFWLLIIISSSILTSLQVLGTLFIYVLFMVEEFRKEPVENMDDVIYYVNGTYRLLEFLVALCVVAYGVSETIFGEWTVMGSMIIFIHSYYNVWLRAQLGWKSFLLRRDAVNKIKSLPIATKEQLEKHNDICAICYQDMKSAVITPCSHFFHAGCLKKWLYVQETCPLCHCHLKNSSQLPGLGTEPVLQPHAGAEQNVMFQEGTEPPGQEHTPGTRIQEGSRDNNEYIARRPDNQEGAFDPKEYPHSAKDEAHPVESA

SEQ ID NO: 2674 - protein, 693 aa, Homo sapiens
MHRDRISPSNSPTWSLQVFSKKKKKKKKNNMAAKEKLEAVLNVALRVPSIMLLDVLYRWDVSSFFQQIQRSSLSNNPLFQYKYLALNMHYVGYILSVVLLTLPRQHLVQLYLYFLTALLLYAGHQISRDYVRSELEFAYEGPMYLEPLSMNRFTTALIGQLVVCTLCSCVMKTKQIWLFSAHMLPLLARLCLVPLETIVIINKFAMIFTGLEVLYFLGSNLLVPYNLAKSAYRELVQVVEVYGLLALGMSLWNQLVVPVLFMVFWLVLFALQIYSYFSTRDQPASRERLLFLFLTSIAECCSTPYSLLGLVFTVSFVALGVLTLCKFYLQGYRAFMNDPAMNRGMTEGVTLLILAVQTGLIELQVVHRAFLLSIILFIVVASILQSMLEIADPIVLALGASRDKSLWKHFRAVSLCLFLLVFPAYMAYMICQFFHMDFWLLIIISSSILTSLQVLGTLFIYVLFMVEEFRKEPVENMDDVIYYVNGTYRLLEFLVALCVVAYGVSETIFGEWTVMGSMIIFIHSYYNVWLRAQLGWKSFLLRRDAVNKIKSLPIATKEQLEKHNDICAICYQDMKSAVITPCSHFFHAGCLKKWLYVQETCPLCHCHLKNSSQLPGLGTEPVLQPHAGAEQNVMFQEGTEPPGQEHTPGTRIQEGSRDNNEYIARRPDNQEGAFDPKEYPHSAKDEAHPVESA

SEQ ID NO: 2675 - protein, 400 aa, Homo sapiens
MAWRRREASVGARGVLALALLALALCVPGARGRALEWFSAVVNIEYVDPQTNLTVWSVSESGRFGDSSPKEGAHGLVGVPWAPGGDLEGCAPDTRFFVPEPGGRGAAPWVALVARGGCTFKDKVLVAARRNASAVVLYNEERYGNITLPMSHAGTGNIVVIMISYPKGREILELVQKGIPVTMTIGVGTRHVQEFISGQSVVFVAIAFITMMIISLAWLIFYYIQRFLYTGSQIGSQSHRKETKKVIGQLLLHTVKHGEKGIDVDAENCAVCIENFKVKDIIRILPCKHIFHRICIDPWLLDHRTCPMCKLDVIKALGYWGEPGDVQEMPAPESPPGRDPAANLSLALPDDDGSDDSSPPSASPAESEPQCDPSFKGDAGENTALLEAGRSDSRHGGPIS

SEQ ID NO: 2676 - protein, 866 aa, Homo sapiens
MEEGNNNEEVIHLNNFHCHRGQEWINLRDGPITISDSSDEERIPMLVTPAPQQHEEEDLDDDVILTEDDSEDDYGEFLDLGPPGISEFTKPSGQTEREPKPGPSHNQAANDIVNPRSEQKVIILEEGSLLYTESDPLETQNQSSEDSETELLSNLGESAALADDQAIEEDCWLDHPYFQSLNQQPREITNQVVPQERQPEAELGRLLFQHEFPGPAFPRPEPQQGGISGPSSPQPAHPLGEFEDQQLASDDEEPGPAFPMQESQEPNLENIWGQEAAEVDQELVELLVKETEARFPDVANGFIEEIIHFKNYYDLNVLCNFLLENPDYPKREDRIIINPSSSLLASQDETKLPKIDFFDYSKLTPLDQRCFIQAADLLMADFKVLSSQDIKWALHELKGHYAITRKALSDAIKKWQELSPETSGKRKKRKQMNQYSYIDFKFEQGDIKIEKRMFFLENKRRHCRSYDRRALLPAVQQEQEFYEQKIKEMAEHEDFLLALQMNEEQYQKDGQLIECRCCYGEFPFEELTQCADAHLFCKECLIRYAQEAVFGSGKLELSCMEGSCTCSFPTSELEKVLPQTILYKYYERKAEEEVAAAYADELVRCPSCSFPALLDSDVKRFSCPNPHCRKETCRKCQGLWKEHNGLTCEELAEKDDIKYRTSIEEKMTAARIRKCHKCGTGLIKSEGCNRMSCRCGAQMCYLCRVSINGYDHFCQHPRSPGAPCQECSRCSLWTDPTEDDEKLIEEIQKEAEEEQKRKNGENTFKRIGPPLEKPVEKVQRVEALPRPVPQNLPQPQMPPYAFAHPPFPLPPVRPVFNNFPLNMGPIPAPYVPPLPNVRVNYDFGPIHMPLEHNLPMHFGPQPRHRF

SEQ ID NO: 2677 - protein, 923 aa, Homo sapiens
MEEGNNNEEVIHLNNFHCHRGQEWINLRDGPITISDSSDEERIPMLVTPAPQQHEEEDLDDDVILTETNKPQRSRPNLIKPAAQWQDLKRLGEERPKKSRAAFESDKSSYFSVCNNPLFDSGAQDDSEDDYGEFLDLGPPGISEFTKPSGQTEREPKPGPSHNQAANDIVNPRSEQKVIILEEGSLLYTESDPLETQNQSSEDSETELLSNLGESAALADDQAIEEDCWLDHPYFQSLNQQPREITNQVVPQERQPEAELGRLLFQHEFPGPAFPRPEPQQGGISGPSSPQPAHPLGEFEDQQLASDDEEPGPAFPMQESQEPNLENIWGQEAAEVDQELVELLVKETEARFPDVANGFIEEIIHFKNYYDLNVLCNFLLENPDYPKREDRIIINPSSSLLASQDETKLPKIDFFDYSKLTPLDQRCFIQAADLLMADFKVLSSQDIKWALHELKGHYAITRKALSDAIKKWQELSPETSGKRKKRKQMNQYSYIDFKFEQGDIKIEKRMFFLENKRRHCRSYDRRALLPAVQQEQEFYEQKIKEMAEHEDFLLALQMNEEQYQKDGQLIECRCCYGEFPFEELTQCADAHLFCKECLIRYAQEAVFGSGKLELSCMEGSCTCSFPTSELEKVLPQTILYKYYERKAEEEVAAAYADELVRCPSCSFPALLDSDVKRFSCPNPHCRKETCRKCQGLWKEHNGLTCEELAEKDDIKYRTSIEEKMTAARIRKCHKCGTGLIKSEGCNRMSCRCGAQMCYLCRVSINGYDHFCQHPRSPGAPCQECSRCSLWTDPTEDDEKLIEEIQKEAEEEQKRKNGENTFKRIGPPLEKPVEKVQRVEALPRPVPQNLPQPQMPPYAFAHPPFPLPPVRPVFNNFPLNMGPIPAPYVPPLPNVRVNYDFGPIHMPLEHNLPMHFGPQPRHRF

SEQ ID NO: 2678 - protein, 488 aa, Homo sapiens
MADFKVLSSQDIKWALHELKGHYAITRKALSDAIKKWQELSPETSGKRKKRKQMNQYSYIDFKFEQGDIKIEKRMFFLENKRRHCRSYDRRALLPAVQQEQEFYEQKIKEMAEHEDFLLALQMNEEQYQKDGQLIECRCCYGEFPFEELTQCADAHLFCKECLIRYAQEAVFGSGKLELSCMEGSCTCSFPTSELEKVLPQTILYKYYERKAEEEVAAAYADELVRCPSCSFPALLDSDVKRFSCPNPHCRKETCRKCQGLWKEHNGLTCEELAEKDDIKYRTSIEEKMTAARIRKCHKCGTGLIKSEGCNRMSCRCGAQMCYLCRVSINGYDHFCQHPRSPGAPCQECSRCSLWTDPTEDDEKLIEEIQKEAEEEQKRKNGENTFKRIGPPLEKPVEKVQRVEALPRPVPQNLPQPQMPPYAFAHPPFPLPPVRPVFNNFPLNMGPIPAPYVPPLPNVRVNYDFGPIHMPLEHNLPMHFGPQPRHRF

SEQ ID NO: 2679 - protein, 399 aa, Homo sapiens
MAERRRHKKRIQEVGEPSKEEKAVAKYLRFNCPTKSTNMMGHRVDYFIASKAVDCLLDSKWAKAKKGEEALFTTRESVVDYCNRLLKKQFFHRALKVMKMKYDKDIKKEKDKGKAESGKEEDKKSKKENIKDEKTKKEKEKKKDGEKEESKKEETPGTPKKKETKKKFKLEPHDDQVFLDGNEVYVWIYDPVHFKTFVMGLILVIAVIAATLFPLWPAEMRVGVYYLSVGAGCFVASILLLAVARCILFLIIWLITGGRHHFWFLPNLTADVGFIDSFRPLYTHEYKGPKADLKKDEKSETKKQQKSDSEEKSDSEKKEDEEGKVGPGNHGTEGSGGERHSDTDSDRREDDRSQHSSGNGNDFEMITKEELEQQTDGDCEEDEEEENDGETPKSSHEKS

SEQ ID NO: 2680 - protein, 218 aa, Homo sapiens
MSSGAASGTGRGRPRGGGPGPGDPPPSETHKLVVVGGGGVGKSALTIQFIQSYFVSDYDPTIEDSYTKICSVDGIPARLDILDTAGQEEFGAMREQYMRAGHGFLLVFAINDRQSFNEVGKLFTQILRVKDRDDFPVVLVGNKADLESQRQVPRSEASAFGASHHVAYFEASAKLRLNVDEAFEQLVRAVRKYQEQELPPSPPSAPRKKGGGCPCVLL

SEQ ID NO: 2681 - protein, 1871 aa, Homo sapiens
MANLEESFPRGGTRKIHKPEKAFQQSVEQDNLFDISTEEGSTKRKKSQKGPAKTKKLKIEKRESSKSAREKFEILSVESLCEGMRILGCVKEVNELELVISLPNGLQGFVQVTEICDAYTKKLNEQVTQEQPLKDLLHLPELFSPGMLVRCVVSSLGITDRGKKSVKLSLNPKNVNRVLSAEALKPGMLLTGTVSSLEDHGYLVDIGVDGTRAFLPLLKAQEYIRQKNKGAKLKVGQYLNCIVEKVKGNGGVVSLSVGHSEVSTAIATEQQSWNLNNLLPGLVVKAQVQKVTPFGLTLNFLTFFTGVVDFMHLDPKKAGTYFSNQAVRACILCVHPRTRVVHLSLRPIFLQPGRPLTRLSCQNLGAVLDDVPVQGFFKKAGATFRLKDGVLAYARLSHLSDSKNVFNPEAFKPGNTHKCRIIDYSQMDELALLSLRTSIIEAQYLRYHDIEPGAVVKGTVLTIKSYGMLVKVGEQMRGLVPPMHLADILMKNPEKKYHIGDEVKCRVLLCDPEAKKLMMTLKKTLIESKLPVITCYADAKPGLQTHGFIIRVKDYGCIVKFYNNVQGLVPKHELSTEYIPDPERVFYTGQVVKVVVLNCEPSKERMLLSFKLSSDPEPKKEPAGHSQKKGKAINIGQLVDVKVLEKTKDGLEVAVLPHNIRAFLPTSHLSDHVANGPLLHHWLQAGDILHRVLCLSQSEGRVLLCRKPALVSTVEGGQDPKNFSEIHPGMLLIGFVKSIKDYGVFIQFPSGLSGLAPKAIMSDKFVTSTSDHFVEGQTVAAKVTNVDEEKQRMLLSLRLSDCGLGDLAITSLLLLNQCLEELQGVRSLMSNRDSVLIQTLAEMTPGMFLDLVVQEVLEDGSVVFSGGPVPDLVLKASRYHRAGQEVESGQKKKVVILNVDLLKLEVHVSLHQDLVNRKARKLRKGSEHQAIVQHLEKSFAIASLVETGHLAAFSLTSHLNDTFRFDSEKLQVGQGVSLTLKTTEPGVTGLLLAVEGPAAKRTMRPTQKDSETVDEDEEVDPALTVGTIKKHTLSIGDMVTGTVKSIKPTHVVVTLEDGIIGCIHASHILDDVPEGTSPTTKLKVGKTVTARVIGGRDMKTFKYLPISHPRFVRTIPELSVRPSELEDGHTALNTHSVSPMEKIKQYQAGQTVTCFLKKYNVVKKWLEVEIAPDIRGRIPLLLTSLSFKVLKHPDKKFRVGQALRATVVGPDSSKTLLCLSLTGPHKLEEGEVAMGRVVKVTPNEGLTVSFPFGKIGTVSIFHMSDSYSETPLEDFVPQKVVRCYILSTADNVLTLSLRSSRTNPETKSKVEDPEINSIQDIKEGQLLRGYVGSIQPHGVFFRLGPSVVGLARYSHVSQHSPSKKALYNKHLPEGKLLTARVLRLNHQKNLVELSFLPGDTGKPDVLSASLEGQLTKQEERKTEAEERDQKGEKKNQKRNEKKNQKGQEEVEMPSKEKQQPQKPQAQKRGGRECRESGSEQERVSKKPKKAGLSEEDDSLVDVYYREGKEEAEETNVLPKEKQTKPAEAPRLQLSSGFAWNVGLDSLTPALPPLAESSDSEEDEKPHQATIKKSKKERELEKQKAEKELSRIEEALMDPGRQPESADDFDRLVLSSPNSSILWLQYMAFHLQATEIEKARAVAERALKTISFREEQEKLNVWVALLNLENMYGSQESLTKVFERAVQYNEPLKVFLHLADIYAKSEKFQEAGELYNRMLKRFRQEKAVWIKYGAFLLRRSQAAASHRVLQRALECLPSKEHVDVIAKFAQLEFQLGDAERAKAIFENTLSTYPKRTDVWSVYIDMTIKHGSQKDVRDIFERVIHLSLAPKRMKFFFKRYLDYEKQHGTEKDVQAVKAKALEYVEAKSSVLED

SEQ ID NO: 2682 - protein, 365 aa, Homo sapiens
MEGQSVEELLAKAEQDEAEKLQRITVHKELELQFDLGNLLASDRNPPTGLRCAGPTPEAELQALARDNTQLLINQLWQLPTERVEEAIVARLPEPTTRLPREKPLPRPRPLTRWQQFARLKGIRPKKKTNLVWDEVSGQWRRRWGYQRARDDTKEWLIEVPGNADPLEDQFAKRIQAKKERVAKNELNRLRNLARAHKMQLPSAAGLHPTGHQSKEELGRAMQVAKVSTASVGRFQERLPKEKVPRGSGKKRKFQPLFGDFAAEKKNQLELLRVMNSKKPQLDVTRATNKQMREEDQEEAAKRRKMSQKGKRKGGRQGPGGKRKGGPPSQGGKRKGGLGGKMNSGPPGLGGKRKGGQRPGGKRRK

SEQ ID NO: 2683 - protein, 223 aa, Homo sapiens
MQWAVGRRWAWAALLLAVAAVLTQVVWLWLGTQSFVFQREEIAQLARQYAGLDHELAFSRLIVELRRLHPGHVLPDEELQWVFVNAGGWMGAMCLLHASLSEYVLLFGTALGSRGHSGRYWAEISDTIISGTFHQWREGTTKSEVFYPGETVVHGPGEATAVEWGPNTWMVEYGRGVIPSTLAFALADTVFSTQDFLTLFYTLRSYARGLRLELTTYLFGQDP

SEQ ID NO: 2684 - protein, 203 aa, Homo sapiens
MQWAVGRRWAWAALLLAVAAVLTQVVWLWLGLDHELAFSRLIVELRRLHPGHVLPDEELQWVFVNAGGWMGAMCLLHASLSEYVLLFGTALGSRGHSGRYWAEISDTIISGTFHQWREGTTKSEVFYPGETVVHGPGEATAVEWGPNTWMVEYGRGVIPSTLAFALADTVFSTQDFLTLFYTLRSYARGLRLELTTYLFGQDP

SEQ ID NO: 2685 - protein, 192 aa, Homo sapiens
MQWAVGRRWAWAALLLAVAAVLTQVVWLWLGTQSFVFQREEIAQLARQYAGLDHELAFSRLIVELRRLHPGHVLPDEELQWVFVNAGGWMGAMCLLHASLSEYVLLFGTALGSRGHSGETVVHGPGEATAVEWGPNTWMVEYGRGVIPSTLAFALADTVFSTQDFLTLFYTLRSYARGLRLELTTYLFGQDP

SEQ ID NO: 2686 - protein, 106 aa, Homo sapiens
MQWAVGRRWAWAALLLAVAAVLTQVVWLWLGTQSFVFQREEIAQLARQYAGLDHELAFSRLIVELRRLHPGHVLPDEELQWVFVNAGGWMGAMCLLHASLSEALLG

SEQ ID NO: 2687 - protein, 187 aa, Homo sapiens
MQWAVGRRWAWAALLLAVAAVLTQVVWLWLDHELAFSRLIEELQWVFVNAGGWMGAMCLLHASLSEYVLLFGTALGSRGHSGRYWAEISDTIISGTFHQWREGTTKSEVFYPGETVVHGPGEATAVEWGPNTWMVEYGRGVIPSTLAFALADTVFSTQDFLTLFYTLRSYARGLRLELTTYLFGQDP

SEQ ID NO: 2688 - protein, 220 aa, Homo sapiens
MKSVIYHALSQKEANDSDVQPSGAQRAEAFVRAFLKRSTPRMSPQAREDQLQRKAVVLEYFTRHKRKEKKKKAKGLSARQRRELRLFDIKPEQQRYSLFLPLHELWKQYIRDLCSGLKPDTQPQMIQAKLLKADLHGAIISVTKSKCPSYVGITGILLQETKHIFKIITKEDRLKVIPKLNCVFTVETDGFISYIYGSKFQLRSSERSAKKFKAKGTIDL

SEQ ID NO: 2689 - protein, 1034 aa, Homo sapiens
MAAATGAVAASAASGQAEGKKITDLRVIDLKSELKRRNLDITGVKTVLISRLKQAIEEEGGDPDNIELTVSTDTPNKKPTKGKGKKHEADELSGDASVEDDAFIKDCELENQEAHEQDGNDELKDSEEFGENEEENVHSKELLSAEENKRAHELIEAEGIEDIEKEDIESQEIEAQEGEDDTFLTAQDGEEEENEKDIAGSGDGTQEVSKPLPSEGSLAEADHTAHEEMEAHTTVKEAEDDNISVTIQAEDAITLDFDGDDLLETGKNVKITDSEASKPKDGQDAIAQSPEKESKDYEMNANHKDGKKEDCVKGDPVEKEARESSKKAESGDKEKDTLKKGPSSTGASGQAKSSSKESKDSKTSSKDDKGSTSSTSGSSGSSTKNIWVSGLSSNTKAADLKNLFGKYGKVLSAKVVTNARSPGAKCYGIVTMSSSTEVSRCIAHLHRTELHGQLISVEKVKGDPSKKEMKKENDEKSSSRSSGDKKNTSDRSSKTQASVKKEEKRSSEKSEKKESKDTKKIEGKDEKNDNGASGQTSESIKKSEEKKRISSKSPGHMVILDQTKGDHCRPSRRGRYEKIHGRSKEKERASLDKKRDKDYRRKEILPFEKMKEQRLREHLVRFERLRRAMELRRRREIAERERRERERIRIIREREERERLQRERERLEIERQKLERERMERERLERERIRIEQERRKEAERIAREREELRRQQQQLRYEQEKRNSLKRPRDVDHRRDDPYWSENKKLSLDTDARFGHGSDYSRQQNRFNDFDHRERGRFPESSAVQSSSFERRDRFVGQSEGKKARPTARREDPSFERYPKNFSDSRRNEPPPPRNELRESDRREVRGERDERRTVIIHDRPDITHPRHPREAGPNPSRPTSWKSEGSMSTDKRETRVERPERSGREVSGHSVRGAPPGNRSSASGYGSREGDRGVITDRGGGSQHYPEERHVVERHGRDTSGPRKEWHGPPSQGPSYHDTRRMGDGRAGAGMITQHSSNASPINRIVQISGNSMPRGSGSGFKPFKGGPPRRF

SEQ ID NO: 2690 - protein, 603 aa, Homo sapiens
MSSSTEVSRCIAHLHRTELHGQLISVEKVKGDPSKKEMKKENDEKSSSRSSGDKKNTSDRSSKTQASVKKEEKRSSEKSEKKESKDTKKIEGKDEKNDNGASGQTSESIKKSEEKKRISSKSPGHMVILDQTKGDHCRPSRRGRYEKIHGRSKEKERASLDKKRDKDYRRKEILPFEKMKEQRLREHLVRFERLRRAMELRRRREIAERERRERERIRIIREREERERLQRERERLEIERQKLERERMERERLERERIRIEQERRKEAERIAREREELRRQQQQLRYEQEKRNSLKRPRDVDHRRDDPYWSENKKLSLDTDARFGHGSDYSRQQNRFNDFDHRERGRFPESSAVQSSSFERRDRFVGQSEGKKARPTARREDPSFERYPKNFSDSRRNEPPPPRNELRESDRREVRGERDERRTVIIHDRPDITHPRHPREAGPNPSRPTSWKSEGSMSTDKRETRVERPERSGREVSGHSVRGAPPGNRSSASGYGSREGDRGVITDRGGGSQHYPEERHVVERHGRDTSGPRKEWHGPPSQGPSYHDTRRMGDGRAGAGMITQHSSNASPINRIVQISGNSMPRGSGSGFKPFKGGPPRRF

SEQ ID NO: 2691 - protein, 684 aa, Homo sapiens
MFAEAAKTTRPCGMAEFKEKPEAPTEQLDVACGQENLPVGAWPPGAAPAPFQYTPDHVVGPGADIDPTQITFPGCICVKTPCLPGTCSCLRHGENYDDNSCLRDIGSGGKYAEPVFECNVLCRCSDHCRNRVVQKGLQFHFQVFKTHKKGWGLRTLEFIPKGRFVCEYAGEVLGFSEVQRRIHLQTKSDSNYIIAIREHVYNGQVMETFVDPTYIGNIGRFLNHSCEPNLLMIPVRIDSMVPKLALFAAKDIVPEEELSYDYSGRYLNLTVSEDKERLDHGKLRKPCYCGAKSCTAFLPFDSSLYCPVEKSNISCGNEKEPSMCGSAPSVFPSCKRLTLETMKMMLDKKQIRAIFLFEFKMGRKAAETTRNINNAFGPGTANERTVQWWFKKFCKGDESLEDEERSGRPSEVDNDQLRAIIEADPLTTTREVAEELNVNHSTVVRHLKQIGKVKKLDKWVPHELTENQKNRRFEVSSSLILRNHNEPFLDRIVTCDEKWILYDNRRRSAQWLDQEEAPKHFPKPILHPKKVMVTIWWSAAGLIHYSFLNPGETITSEKYAQEIDEMNQKLQRLQLALVNRKGPILLHDNARPHVAQPTLQKLNELGYEVLPHPPYSPDLLPTNYHVFKHLNNFLQGKRFHNQQDAENAFQEFVESQSTDFYATGINQLISRWQKCVDCNGSYFD

SEQ ID NO: 2692 - protein, 365 aa, Homo sapiens
MFAEAAKTTRPCGMAEFKEKPEAPTEQLDVACGQENLPVGAWPPGAAPAPFQYTPDHVVGPGADIDPTQITFPGCICVKTPCLPGTCSCLRHGENYDDNSCLRDIGSGGKYAEPVFECNVLCRCSDHCRNRVVQKGLQFHFQVFKTHKKGWGLRTLEFIPKGRFVCEYAGEVLGFSEVQRRIHLQTKSDSNYIIAIREHVYNGQVMETFVDPTYIGNIGRFLNHSCEPNLLMIPVRIDSMVPKLALFAAKDIVPEEELSYDYSGRYLNLTVSEDKERLDHGKLRKPCYCGAKSCTAFLPFDSSLYCPVEKSNISCGNEKEPSMCGSAPSVFPSCKRLTLEVSLFSDKQLAPPYSGRQWLASFTSA

SEQ ID NO: 2693 - protein, 545 aa, Homo sapiens
MFAEAAKTTRPCGMAEFKEKPEAPTEQLDVACGQENLPVGAWPPGAAPAPFQYTPDHVVGPGADIDPTQITFPGCICVKTPCLPGTCSCLRHGENYDDNSCLRDIGSGGKYAEPVFECNVLCRCSDHCRNRVVQKGLQFHFQVFKTHKKGWGLRTLEFIPKGSSLYCPVEKSNISCGNEKEPSMCGSAPSVFPSCKRLTLETMKMMLDKKQIRAIFLFEFKMGRKAAETTRNINNAFGPGTANERTVQWWFKKFCKGDESLEDEERSGRPSEVDNDQLRAIIEADPLTTTREVAEELNVNHSTVVRHLKQIGKVKKLDKWVPHELTENQKNRRFEVSSSLILRNHNEPFLDRIVTCDEKWILYDNRRRSAQWLDQEEAPKHFPKPILHPKKVMVTIWWSAAGLIHYSFLNPGETITSEKYAQEIDEMNQKLQRLQLALVNRKGPILLHDNARPHVAQPTLQKLNELGYEVLPHPPYSPDLLPTNYHVFKHLNNFLQGKRFHNQQDAENAFQEFVESQSTDFYATGINQLISRWQKCVDCNGSYFD

SEQ ID NO: 2694 - protein, 522 aa, Homo sapiens
MAFLDNPTIILAHIRQSHVTSDDTGMCEMVLIDHDVDLEKIHPPSMPGDSGSEIQGSNGETQGYVYAQSVDITSSWDFGIRRRSNTAQRLERLRKERQNQIKCKNIQWKERNSKQSAQELKSLFEKKSLKEKPPISGKQSILSVRLEQCPLQLNNPFNEYSKFDGKGHVGTTATKKIDVYLPLHSSQDRLLPMTVVTMASARVQDLIGLICWQYTSEGREPKLNDNVSAYCLHIAEDDGEVDTDFPPLDSNEPIHKFGFSTLALVEKYSSPGLTSKESLFVRINAAHGFSLIQVDNTKVTMKEILLKAVKRRKGSQKVSGPQYRLEKQSEPNVAVDLDSTLESQSAWEFCLVRENSSRADGVFEEDSQIDIATVQDMLSSHHYKSFKVSMIHRLRFTTDVQLGISGDKVEIDPVTNQKASTKFWIKQKPISIDSDLLCACDLAEEKSPSHAIFKLTYLSNHDYKHLYFESDAATVNEIVLKVNYILESRASTARADYFAQKQRKLNRRTSFSFQKEKKSGQQ

SEQ ID NO: 2695 - protein, 486 aa, Homo sapiens
MAFLDNPTIILAHIRQSHVTSDDTGMCEMVLIDHDVDLEKIHPPSMPGDSGSEIQGSNGETQGYVYAQSVDITSSWDFGIRRRSNTAQRLERLRKERQNQIKCKNIQWKERNSKQSAQELKSLFEKKSLKEKPPISGKQSILSVRLEQCPLQLNNPFNEYSKFDGKGHVGTTATKKIDVYLPLHSSQDRLLPMTVVTMASARVQDLIGLICWQYTSEGREPKLNDNVSAYCLHIAEDDGEVDTDFPPLDSNEPIHKFGFSTLALVEKYSSPGLTSKESLFVRINAAHGFSLIQVDNTKVTMKEILLKAVKRRKGSQKVSGSRADGVFEEDSQIDIATVQDMLSSHHYKSFKVSMIHRLRFTTDVQLGISGDKVEIDPVTNQKASTKFWIKQKPISIDSDLLCACDLAEEKSPSHAIFKLTYLSNHDYKHLYFESDAATVNEIVLKVNYILESRASTARADYFAQKQRKLNRRTSFSFQKEKKSGQQ

SEQ ID NO: 2696 - protein, 475 aa, Homo sapiens
MAFLDNPTIILAHIRQSHVTSDDTGMCEMVLIDHDVDLEKIHPPSMPGDSGSEIQGSNGETQGYVYAQSVDITSSWDFGIRRRSNTAQRLERLRKERQNQIKCKNIQWKERNSKQSAQELKSLFEKKSLKEKPPISGKQSILSVRLEQCPLQLNNPFNEYSKFDGKGHVGTTATKKIDVYLPLHSSQDRLLPMTVVTMASARVQDLIGLICWQYTSEGREPKLNDNVSAYCLHIAEDDGEVDTDFPPLDSNEPIHKFGFSTLALVEKYSSPGLTSKESLFVRINAAHGFSLIQVDNTKVTMKEILLKAVKRRKGSQKVSGPQYRLEKQSEPNVAVDLDSTLESQSAWEFCLVRENSISGDKVEIDPVTNQKASTKFWIKQKPISIDSDLLCACDLAEEKSPSHAIFKLTYLSNHDYKHLYFESDAATVNEIVLKVNYILESRASTARADYFAQKQRKLNRRTSFSFQKEKKSGQQ

SEQ ID NO: 2697 - protein, 330 aa, Homo sapiens
MTVVTMASARVQDLIGLICWQYTSEGREPKLNDNVSAYCLHIAEDDGEVDTDFPPLDSNEPIHKFGFSTLALVEKYSSPGLTSKESLFVRINAAHGFSLIQVDNTKVTMKEILLKAVKRRKGSQKVSGPQYRLEKQSEPNVAVDLDSTLESQSAWEFCLVRENSSRADGVFEEDSQIDIATVQDMLSSHHYKSFKVSMIHRLRFTTDVQLGISGDKVEIDPVTNQKASTKFWIKQKPISIDSDLLCACDLAEEKSPSHAIFKLTYLSNHDYKHLYFESDAATVNEIVLKVNYILESRASTARADYFAQKQRKLNRRTSFSFQKEKKSGQQ

SEQ ID NO: 2698 - protein, 323 aa, Homo sapiens
MAFLDNPTIILAHIRQSHVTSDDTGMCEMVLIDHDVDLEKIHPPSMPGDSGSEIQGSNGETQGYVYAQSVDITSSWDFGIRRRSNTAQRLERLRKERQNQIKCKNIQWKERNSKQSAQELKSLFEKKSLKEKPPISGKQSILSVRLEQCPLQLNNPFNEYSKFDGKGHVGTTATKKIDVYLPLHSSQDRLLPMTVVTMASARVQDLIGLICWQYTSEGREPKLNDNVSAYCLHIAEDDGEVDTDFPPLDSNEPIHKFGFSTLALVEKYSSPGLTSKESLFVRINAAHGFSLIQVDNTKVTMKEILLKAVKRRKGSQKVSGACD

SEQ ID NO: 2699 - protein, 372 aa, Homo sapiens
MAFLDNPTIILAHIRQSHVTSDDTGMCEMVLIDHDVDLEKIHPPSMPGDSGSEIQGSNGETQGYVYAQSVDITSSWDFGIRRRSNTAQRLERLRKERQNQIKCKNIQWKERNSKQSAQELKSLFEKKSLKEKPPISGKQSILSVRLEQCPLQLNNPFNEYSKFDGKGHVGTTATKKIDVYLPLHSSQDRLLPMTVVTMASARVQDLIGLICWQYTSEGREPKLNDNVSAYCLHIAEDDGEVDTDFPPLDSNEPIHKFGFSTLALVEKYSSPGLTSKESLFVRINAAHGFSLIQVDNTKVTMKEILLKAVKRRKGSQKVSGPQYRLEKQSEPNVAVDLDSTLESQSAWEFCLVRENSTLAASLHARFVRCKLA

SEQ ID NO: 2700 - protein, 947 aa, Homo sapiens
MSQPPIGGAAPATAAASPAAAATEARLHPEGSSRKQQRAQSPARPRDSSLRQTIAATRSPVGAGTKLNSVRQQQLQQQQQQGNKTGSRTGPPASIRGGGGGAEKATPLAPKGAAPGAVQPVAGAEAAPAATLAALGGRRPGPPEEPPRELESVPSKLGEPPPLGEGGGGGGEGGGAGGGSGEREGGAPQPPPPRGWRGKGVRAQQRGGSGGEGASPSPSSSSAGKTPGTGSRNSGSGVAGGGSGGGGSYWKEGCLQSELIQFHLKKERAAAAAAAAQMHAKNGGGSSSRSSPVSGPPAVCETLAVASASPMAAAAEGPQQSAEGSASGGGMQAAAPPSSQPHPQQLQEQEEMQEEMEKLREENETLKNEIDELRTEMDEMRDTFFEEDACQLQEMRHELERANKNCRILQYRLRKAERKRLRYAQTGEIDGELLRSLEQDLKVAKDVSVRLHHELENVEEKRTTTEDENEKLRQQLIEVEIAKQALQNELEKMKELSLKRRGSKDLPKSEKKAQQTPTEEDNEDLKCQLQFVKEEAALMRKKMAKIDKEKDRFEHELQKYRSFYGDLDSPLPKGEAGGPPSTREAELKLRLRLVEEEANILGRKIVELEVENRGLKAELDDLRGDDFNGSANPLMREQSESLSELRQHLQLVEDETELLRRNVADLEEQNKRITAELNKYKYKSGGHDSARHHDNAKTEALQEELKAARLQINELSGKVMQLQYENRVLMSNMQRYDLASHLGIRGSPRDSDAESDAGKKESDDDSRPPHRKREGPIGGESDSEEVRNIRCLTPTRSFYPAPGPWPKSFSDRQQMKDIRSEAERLGKTIDRLIADTSTIITEARIYVANGDLFGLMDEEDDGSRIREHELLYRINAQMKAFRKELQTFIDRLEVPKSADDRGAEEPISVSQMFQPIILLILILVLFSSLSYTTIFKLVFLFTLFFVL

SEQ ID NO: 2701 - protein, 425 aa, Homo sapiens
MASSIICQEHCQISGQAKIDILLVGDVTVGYLADTVQKLFANIAEVTITISDTKEAAALLDDCIFNMVLLKVPSSLSAEELEAIKLIRFGKKKNTHSLFVFIIPENFKGCISGHGMDIALTEPLTMEKMSNVVKYWTTCPSNTVKTENATGPEELGLPLQRSYSEHLGYFPTDLFACSESLRNGNGLELNASLSEFEKNKKISLLHSSKEKLRRERIKYCCEQLRTLLPYVKGRKNDAASVLEATVDYVKYIREKISPAVMAQITEALQSNMRFCKKQQTPIELSLPGTVMAQRENSVMSTYSPERGLQFLTNTCWNGCSTPDAESSLDEAVRVPSSSASENAIGDPYKTHISSAALSLNSLHTVRYYSKVTPSYDATAVTNQNISIHLPSAMPPVSKLLPRHCTSGLGQTCTTHPNCLQQFWAY

SEQ ID NO: 2702 - protein, 225 aa, Homo sapiens
MASSIICQEHCQISGQAKIDILLVGDVTVGYLADTVQKLFANIAEVTITISDTKEAAALLDDCIFNMVLLKVPSSLSAEELEAIKLIRFGKKKNTHSLFVFIIPENFKGCISGHGMDIALTEPLTMEKMSNVVKYWTTCPSNTVKTENATGPEELGLPLQRSYSEHLGYFPTDLFACSESLRNGNGLELNASLSEFEKNKKISLLHSSKEKLRRLYRKHSSFCFW

SEQ ID NO: 2703 - protein, 502 aa, Homo sapiens
METLQESLNTLLKQLEEEKKTLESQVKYYALKLEQESKAYQKINNERRTYLAEMSQGSGLHQVSKRQQVDQLPRMQENLVKTLLLKEELDPLKAKIDILLVGDVTVGYLADTVQKLFANIAEVTITISDTKEAAALLDDCIFNMVLLKVPSSLSAEELEAIKLIRFGKKKNTHSLFVFIIPENFKGCISGHGMDIALTEPLTMEKMSNVVKYWTTCPSNTVKTENATGPEELGLPLQRSYSEHLGYFPTDLFACSESLRNGNGLELNASLSEFEKNKKISLLHSSKEKLRRERIKYCCEQLRTLLPYVKGRKNDAASVLEATVDYVKYIREKISPAVMAQITEALQSNMRFCKKQQTPIELSLPGTVMAQRENSVMSTYSPERGLQFLTNTCWNGCSTPDAESSLDEAVRVPSSSASENAIGDPYKTHISSAALSLNSLHTVRYYSKVTPSYDATAVTNQNISIHLPSAMPPVSKLLPRHCTSGLGQTCTTHPNCLQQFWAY

SEQ ID NO: 2704 - protein, 528 aa, Homo sapiens
MGDAPSPEEKLHLITRNLQEVLGEEKLKEILKERELKIYWGTATTGKPHVAYFVPMSKIADFLKAGCEVTILFADLHAYLDNMKAPWELLELRVSYYENVIKAMLESIGVPLEKLKFIKGTDYQLSKEYTLDVYRLSSVVTQHDSKKAGAEVVKQVEHPLLSGLLYPGLQALDEEYLKVDAQFGGIDQRKIFTFAEKYLPALGYSKRVHLMNPMVPGLTGSKMSSSEEESKIDLLDRKEDVKKKLKKAFCEPGNVENNGVLSFIKHVLFPLKSEFVILRDEKWGGNKTYTAYVDLEKDFAAEVVHPGDLKNSVEVALNKLLDPIREKFNTPALKKLASAAYPDPSKQKPMAKGPAKNSEPEEVIPSRLDIRVGKIITVEKHPDADSLYVEKIDVGEAEPRTVVSGLVQFVPKEELQDRLVVVLCNLKPQKMRGVESQGMLLCASIEGINRQVEPLDPPAGSAPGEHVFVKGYEKGQPDEELKPKKKVFEKLQADFKISEECIAQWKQTNFMTKLGSISCKSLKGGNIS

SEQ ID NO: 2705 - protein, 461 aa, Homo sapiens
MEDLDALLSDLETTTSHMPRSGAPKERPAEPLTPPPSYGHQPQTGSGESSGASGDKDHLYSTVCKPRSPKPAAPAAPPFSSSSGVLGTGLCELDRLLQELNATQFNITDEIMSQFPSSKVASGEQKEDQSEDKKRPSLPSSPSPGLPKASATSATLELDRLMASLSDFRVQNHLPASGPTQPPVVSSTNEGSPSPPEPTGKGSLDTMLGLLQSDLSRRGVPTQAKGLCGSCNKPIAGQVVTALGRAWHPEHFVCGGCSTALGGSSFFEKDGAPFCPECYFERFSPRCGFCNQPIRHKMVTALGTHWHPEHFCCVSCGEPFGDEGFHEREGRPYCRRDFLQLFAPRCQGCQGPILDNYISALSALWHPDCFVCRECFAPFSGGSFFEHEGRPLCENHFHARRGSLCATCGLPVTGRCVSALGRRFHPDHFTCTFCLRPLTKGSFQERAGKPYCQPCFLKLFG

SEQ ID NO: 2706 - protein, 444 aa, Homo sapiens
MPRSGAPKERPAEPLTPPPSYGHQPQTGSGESSGASGDKDHLYSTVCKPRSPKPAAPAAPPFSSSSGVLGTGLCELDRLLQELNATQFNITDEIMSQFPSSKVASGEQKEDQSEDKKRPSLPSSPSPGLPKASATSATLELDRLMASLSDFRVQNHLPASGPTQPPVVSSTNEGSPSPPEPTGKGSLDTMLGLLQSDLSRRGVPTQAKGLCGSCNKPIAGQVVTALGRAWHPEHFVCGGCSTALGGSSFFEKDGAPFCPECYFERFSPRCGFCNQPIRHKMVTALGTHWHPEHFCCVSCGEPFGDEGFHEREGRPYCRRDFLQLFAPRCQGCQGPILDNYISALSALWHPDCFVCRECFAPFSGGSFFEHEGRPLCENHFHARRGSLCATCGLPVTGRCVSALGRRFHPDHFTCTFCLRPLTKGSFQERAGKPYCQPCFLKLFG

SEQ ID NO: 2707 - protein, 4 aa, Homo sapiens
GTGG

SEQ ID NO: 2708 - protein, 447 aa, Homo sapiens
MGEPRAGAALDDGSGWTGSEEGSEEGTGGSEGAGGDGGPDAEGVWSPDIEQSFQEALAIYPPCGRRKIILSDEGKMYGRNELIARYIKLRTGKTRTRKQVSSHIQVLARRKSREIQSKLKDQVSKDKAFQTMATMSSAQLISAPSLQAKLGPTGPQASELFQFWSGGSGPPWNVPDVKPFSQTPFTLSLTPPSTDLPGYEPPQALSPLPPPTPSPPAWQARGLGTARLQLVEFSAFVEPPDAVDSYQRHLFVHISQHCPSPGAPPLESVDVRQIYDKFPEKKGGLRELYDRGPPHAFFLVKFWADLNWGPSGEEAGAGGSISSGGFYGVSSQYESLEHMTLTCSSKVCSFGKQVVEKVETERAQLEDGRFVYRLLRSPMCEYLVNFLHKLRQLPERYMMNSVLENFTILQVVTNRDTQELLLCTAYVFEVSTSERGAQHHIYRLVRD

SEQ ID NO: 2709 - protein, 450 aa, Homo sapiens
MGEPRAGAALDDGSGWTGSEEGSEEGTGGSEGAGGDGGPDAEGVWSPDIEQSFQEALAIYPPCGRRKIILSDEGKMYGRNELIARYIKLRTGKTRTRKQVSSHIQVLARRKSREIQSKLKDQVSKDKAFQTMATMSSAQLISAPSLQAKLGPTGPQVVQASELFQFWSGGSGPPWNVPDVKPFSQTPFTLSLTPPSTDLPGYEPPQALSPLPPPTPSPPAWQARGLGTARLQLVEFSAFVEPPDAVDSYQRHLFVHISQHCPSPGAPPLESVDVRQIYDKFPEKKGGLRELYDRGPPHAFFLVKFWADLNWGPSGEEAGAGGSISSGGFYGVSSQYESLEHMTLTCSSKVCSFGKQVVEKVETERAQLEDGRFVYRLLRSPMCEYLVNFLHKLRQLPERYMMNSVLENFTILQVVTNRDTQELLLCTAYVFEVSTSERGAQHHIYRLVRD

SEQ ID NO: 2710 - protein, 319 aa, Homo sapiens
MATMSSAQLISAPSLQAKLGPTGPQVVQASELFQFWSGGSGPPWNVPDVKPFSQTPFTLSLTPPSTDLPGYEPPQALSPLPPPTPSPPAWQARGLGTARLQLVEFSAFVEPPDAVDSYQRHLFVHISQHCPSPGAPPLESVDVRQIYDKFPEKKGGLRELYDRGPPHAFFLVKFWADLNWGPSGEEAGAGGSISSGGFYGVSSQYESLEHMTLTCSSKVCSFGKQVVEKVETERAQLEDGRFVYRLLRSPMCEYLVNFLHKLRQLPERYMMNSVLENFTILQVVTNRDTQELLLCTAYVFEVSTSERGAQHHIYRLVRD

SEQ ID NO: 2711 - protein, 451 aa, Homo sapiens
MGEPRAGAALDDGSGWTGSEEGSEEGTGGSEGAGGDGGPDAEGVWSPDIEQSFQEALAIYPPCGRRKIILSDEGKMYGRNELIARYIKLRTGKTRTRKQVSSHIQVLARRKSREIQSKLKALNVDQVSKDKAFQTMATMSSAQLISAPSLQAKLGPTGPQASELFQFWSGGSGPPWNVPDVKPFSQTPFTLSLTPPSTDLPGYEPPQALSPLPPPTPSPPAWQARGLGTARLQLVEFSAFVEPPDAVDSYQRHLFVHISQHCPSPGAPPLESVDVRQIYDKFPEKKGGLRELYDRGPPHAFFLVKFWADLNWGPSGEEAGAGGSISSGGFYGVSSQYESLEHMTLTCSSKVCSFGKQVVEKVETERAQLEDGRFVYRLLRSPMCEYLVNFLHKLRQLPERYMMNSVLENFTILQVVTNRDTQELLLCTAYVFEVSTSERGAQHHIYRLVRD

SEQ ID NO: 2712 - protein, 1120 aa, Homo sapiens
MWLKPEEVLLKNALKLWLMERSNDYFVLQRRRGYGEEGGGGLTGLLVGTLDSVLDSTAKVAPFRILHQTPDSQVYLSIACGANREEITKHWDWLEQNIMKTLSVFDSNEDITNFVQGKIRGLIAEEGKHCFAKEDDPEKFREALLKFEKCFGLPEKEKLVTYYSCSYWKGRVPCQGWLYLSTNFLSFYSFLLGSEIKLIISWDEVSKLEKTSNVILTESIHVCSQGENHYFSMFLHINQTYLLMEQLANYAIRRLFDKETFDNDPVLYNPLQITKRGLENRAHSEQFNAFFRLPKGESLKEVHECFLWVPFSHFNTHGKMCISENYICFASQDGNQCSVIIPLREVLAIDKTNDSSKSVIISIKGKTAFRFHEVKDFEQLVAKLRLRCGAASTQYHDISTELAISSESTEPSDNFEVQSLTSQRECSKTVNTEALMTVFHPQNLETLNSKMLKEKMKEQSWKILFAECGRGVSMFRTKKTRDLVVRGIPETLRGELWMLFSGAVNDMATNPDYYTEVVEQSLGTCNLATEEIERDLRRSLPEHPAFQSDTGISALRRVLTAYAYRNPKIGYCQAMNILTSVLLLYAKEEEAFWLLVAVCERMLPDYFNRRIIGALVDQAVFEELIRDHLPQLTEHMTDMTFFSSVSLSWFLTLFISVLPIESAVNVVDCFFYDGIKAILQLGLAILDYNLDKLLTCKDDAEAVTALNRFFDNVTNKDSPLPSNVQQGSNVSDEKTSHTRVDITDLIRESNEKYGNIRYEDIHSMRCRNRLYVIQTLEETTKQNVLRVVSQDVKLSLQELDELYVIFKKELFLSCYWCLGCPVLKHHDPSLPYLEQYQIDCQQFRALYHLLSPWAHSANKDSLALWTFRLLDENSDCLINFKEFSSAIDIMYNGSFTEKLKLLFKLHIPPAYTEVKSKDASKGDELSKEELLYFSQLHVSKPANEKEAESAKHSPEKGKGKIDIQAYLSQWQDELFKKEENIKDLPRMNQSQFIQFSKTLYNLFHEDPEEESLYQAIAVVTSLLLRMEEVGRKLHSPTSSAKGFSGTVCGSGGPSEEKTGSHLEKDPCSFREEPQWSFAFEQILASLLNEPALVRFFEKPIDVKAKLENARISQLRSRTKM

SEQ ID NO: 2713 - protein, 630 aa, Homo sapiens
MWLKPEEVLLKNALKLWLMERSNDYFVLQRRRGYGEEGGGGLTGLLVGTLDSVLDSTAKVAPFRILHQTPDSQVYLSIACGANREEITKHWDWLEQNIMKTLSVFDSNEDITNFVQGKIRGLIAEEGKHCFAKEDDPEKFREALLKFEKCFGLPEKEKLVTYYSCSYWKGRVPCQGWLYLSTNFLSFYSFLLGSEIKLIISWDEVSKLEKTSNVILTESIHVCSQGENHYFSMFLHINQTYLLMEQLANYAIRRLFDKETFDNDPVLYNPLQITKRGLENRAHSEQFNAFFRLPKGESLKEVHECFLWVPFSHFNTHGKMCISENYICFASQDGNQCSVIIPLREVLAIDKTNDSSKSVIISIKGKTAFRFHEVKDFEQLVAKLRLRCGAASTQYHDISTELAISSESTEPSDNFEVQSLTSQRECSKTVNTEALMTVFHPQNLETLNSKMLKEKMKEQSWKILFAECGRGVSMFRTKKTRDLVVRGIPETLRGELWMLFSGAVNDMATNPDYYTEVVEQSLGTCNLATEEIERDLRRSLPEHPAFQSDTGISALRRVLTAYAYRNPKIGYCQAMNILTSVLLLYAKEEEAFWLLVAVCERMLPDYFNRRIIGSDDFMPLVRIQGQCVIG

SEQ ID NO: 2714 - protein, 632 aa, Homo sapiens
MWLKPEEVLLKNALKLWLMERSNDYFVLQRRRGYGEEGGGGLTGLLVGTLDSVLDSTAKVAPFRILHQTPDSQVYLSIACGANREEITKHWDWLEQNIMKTLSVFDSNEDITNFVQGKIRGLIAEEGKHCFAKEDDPEKFREALLKFEKCFGLPEKEKLVTYYSCSYWKGRVPCQGWLYLSTNFLSFYSFLLGSEIKLIISWDEVSKLEKTSNVILTESIHVCSQGENHYFSMFLHINQTYLLMEQLANYAIRRLFDKETFDNDPVLYNPLQITKRGLENRAHSEQFNAFFRLPKGESLKEVHECFLWVPFSHFNTHGKMCISENYICFASQDGNQCSVIIPLREVLAIDKTNDSSKSVIISIKGKTAFRFHEVKDFEQLVAKLRLRCGAASTQYHDISTELAISSESTEPSDNFEVQSLTSQRECSKTVNTEALMTVFHPQNLETLNSKMLKEKMKEQSWKILFAECGRGVSMFRTKKTRDLVVRGIPETLRGELWMLFSGAVNDMATNPDYYTEVVEQSLGTCNLATEEIERDLRRSLPEHPAFQSDTGISALRRVLTAYAYRNPKIGYCQAMNILTSVLLLYAKEEEAFWLLVAVCERMLPDYFNRRIIGSDDFMPLVRIQGQCVIGEK

SEQ ID NO: 2715 - protein, 559 aa, Homo sapiens
MDSPGYNCFVDKDKMDAAIQDLGPKELSCTELQELKQLARQGYWAQSHALRGKVYQRLIRDIPCRTVTPDASVYSDIVGKIVGKHSSSCLPLPEFVDNTQVPSYCLNARGEGAVRKILLCLANQFPDISFCPALPAVVALLLHYSIDEAECFEKACRILACNDPGRRLIDQSFLAFESSCMTFGDLVNKYCQAAHKLMVAVSEDVLQVYADWQRWLFGELPLCYFARVFDVFLVEGYKVLYRVALAILKFFHKVRAGQPLESDSVKQDIRTFVRDIAKTVSPEKLLEKAFAIRLFSRKEIQLLQMANEKALKQKGITVKQKSVSLSKRQFVHLAVHAENFRSEIVSVREMRDIWSWVPERFALCQPLLLFSSLQHGYSLARFYFQCEGHEPTLLLIKTTQKEVCGAYLSTDWSERNKFGGKLGFFGTGECFVFRLQPEVQRYEWVVIKHPELTKPPPLMAAEPTAPLSHSASSDPADRLSPFLAARHFNLPSKTESMFMAGGSDCLIVGGGGGQALYIDGDLNRGRTSHCDTFNNQPLCSENFLIAAVEAWGFQDPDTQ

SEQ ID NO: 2716 - protein, 553 aa, Homo sapiens
MDSPGYNCFVDKDKMDAAIQDLGPKELSCTELQELKQLARQGYWAQSHALRGKVYQRLIRDIPCRTVTPDASVYSDIVGKIVGKHSSSCLPLPEFVDNTQVPSYCLNARGEGAVRKILLCLANQFPDISFCPALPAVVALLLHYSIDEAECFEKACRILACNDPGRRLIDQSFLAFESSCMTFGDLVNKYCQAAHKLMVAVSEDVLQVYADWQRWLFGELPLCYFARVFDVFLVEGYKVLYRVALAILKFFHKVRAGQPLESDSVKQDIRTFVRDIAKTVSPEKLLEKAFAIRLFSRKEIQLLQMANEKALKQKGITVKQKRQFVHLAVHAENFRSEIVSVREMRDIWSWVPERFALCQPLLLFSSLQHGYSLARFYFQCEGHEPTLLLIKTTQKEVCGAYLSTDWSERNKFGGKLGFFGTGECFVFRLQPEVQRYEWVVIKHPELTKPPPLMAAEPTAPLSHSASSDPADRLSPFLAARHFNLPSKTESMFMAGGSDCLIVGGGGGQALYIDGDLNRGRTSHCDTFNNQPLCSENFLIAAVEAWGFQDPDTQ

SEQ ID NO: 2717 - protein, 667 aa, Homo sapiens
METLESELTCPICLELFEDPLLLPCAHSLCFNCAHRILVSHCATNESVESITAFQCPTCRHVITLSQRGLDGLKRNVTLQNIIDRFQKASVSGPNSPSETRRERAFDANTMTSAEKVLCQFCDQDPAQDAVKTCVTCEVSYCDECLKATHPNKKPFTGHRLIEPIPDSHIRGLMCLEHEDEKVNMYCVTDDQLICALCKLVGRHRDHQVAALSERYDKLKQNLESNLTNLIKRNTELETLLAKLIQTCQHVEVNASRQEAKLTEECDLLIEIIQQRRQIIGTKIKEGKVMRLRKLAQQIANCKQCIERSASLISQAEHSLKENDHARFLQTAKNITERVSMATASSQVLIPEINLNDTFDTFALDFSREKKLLECLDYLTAPNPPTIREELCTASYDTITVHWTSDDEFSVVSYELQYTIFTGQANVVSLCNSADSWMIVPNIKQNHYTVHGLQSGTKYIFMVKAINQAGSRSSEPGKLKTNSQPFKLDPKSAHRKLKVSHDNLTVERDESSSKKSHTPERFTSQGSYGVAGNVFIDSGRHYWEVVISGSTWYAIGLAYKSAPKHEWIGKNSASWALCRCNNNWVVRHNSKEIPIEPAPHLRRVGILLDYDNGSIAFYDALNSIHLYTFDVAFAQPVCPTFTVWNKCLTIITGLPIPDHLDCTEQLP

SEQ ID NO: 2718 - protein, 552 aa, Homo sapiens
METLESELTCPICLELFEDPLLLPCAHSLCFNCAHRILVSHCATNESVESITAFQCPTCRHVITLSQRGLDGLKRNVTLQNIIDRFQKASVSGPNSPSETRRERAFDANTMTSAEKVLCQFCDQDPAQDAVKTCVTCEVSYCDECLKATHPNKKPFTGHRLIEPIPDSHIRGLMCLEHEDEKVNMYCVTDDQLICALCKLVGRHRDHQVAALSERYDKLKQNLESNLTNLIKRNTELETLLAKLIQTCQHVEVNASRQEAKLTEECDLLIEIIQQRRQIIGTKIKEGKVMRLRKLAQQIANCKQCIERSASLISQAEHSLKENDHARFLQTAKNITERVSMATASSQVLIPEINLNDTFDTFALDFSREKKLLECLDYLTAPNPPTIREELCTASYDTITVHWTSDDEFSVVSYELQYTIFTGQANVVSLCNSADSWMIVPNIKQNHYTVHGLQSGTKYIFMVKAINQAGSRSSEPGKLKTNSQPFKLDPKSAHRKLKVSHDNLTVERDESSSKKSHTPERFTSQGSYGVAGNVFIDSGRHYWEVVISGSTW

SEQ ID NO: 2719 - protein, 254 aa, Homo sapiens
MEYASDASLDPEAPWPPAPRARACRVLPWALVAGLLLLLLLAAACAVFLACPWAVSGARASPGSAASPRLREGPELSPDDPAGLLDLRQGMFAQLVAQNVLLIDGPLSWYSDPGLAGVSLTGGLSYKEDTKELVVAKAGVYYVFFQLELRRVVAGEGSGSVSLALHLQPLRSAAGAAALALTVDLPPASSEARNSAFGFQGRLLHLSAGQRLGVHLHTEARARHAWQLTQGATVLGLFRVTPEIPAGLPSPRSE

SEQ ID NO: 2720 - protein, 336 aa, Homo sapiens
MTTLSPENSLSARQSASFILVKRKPPIDKTEWDSFFDESGHLAKSRDFICVNILERGLHPFVRTEAWKFLTGYFSWQSSQDERLTVDSMRRKNYKALCQMYEKIQPLLENLHRNFTETRNNIARDIQKIYDKDPLGNVLIDKKRLEKILLLSYVCNTQAEYQQGFHEMMMLFQLMVEHDHETFWLFQFFLQKTEHSCVINIGVAKNLDMLSTLITFLDPVFAEHLKGKGAGAVQSLFPWFCFCFQRAFKSFDDVWRLWEVLLTGKPCRNFQVLVAYSMLQMVREQVLQESMGGDDILLACNNLIDLDADELISAACVVYAELIQKDVPQTLKDFFL

SEQ ID NO: 2721 - protein, 300 aa, Homo sapiens
MTTLSPENSLSARQSASFILGLHPFVRTEAWKFLTGYFSWQSSQDERLTVDSMRRKNYKALCQMYEKIQPLLENLHRNFTETRNNIARDIQKIYDKDPLGNVLIDKKRLEKILLLSYVCNTQAEYQQGFHEMMMLFQLMVEHDHETFWLFQFFLQKTEHSCVINIGVAKNLDMLSTLITFLDPVFAEHLKGKGAGAVQSLFPWFCFCFQRAFKSFDDVWRLWEVLLTGKPCRNFQVLVAYSMLQMVREQVLQESMGGDDILLACNNLIDLDADELISAACVVYAELIQKDVPQTLKDFFL

SEQ ID NO: 2722 - protein, 296 aa, Homo sapiens
MTKTALLKLFVAIVITFILILPEYFKTPKERTLELSCLEVCLQSNFTYSLSSLNFSFVTFLQPVRETQIIMRIFLNPSNFRNFTRTCQDITGEFKMCSSCLVCESKGNMDFISQEQTSKVLIRRGSMEVKANDFHSPCQHFNFSVAPLVDHLEEYNTTCHLKNHTGRSTIMEDEPSKEKSINYTCRIMEYPNDCIHISLHLEMDIKNITCSMKITWYILVLLVFIFLIILTIRKILEGQRRVQKWQSHRDKPTSVLLRGSDSEKLRALNVQVLSAETTQRLPLDQVQEVLPPIPEL

SEQ ID NO: 2723 - protein, 139 aa, Homo sapiens
MIIFQDLISHNEMFSDIYKIWEITNGLCLEVEQKMLSKTTGNTDDSLIGRNSSSESTEDEVTESTIITSVDIVTNHHLQESIFTKEAYKKYIKDYMKSINEKLEEQRPERVKLFITGMKNKSSTSLLIFKTTSSLLVKT

SEQ ID NO: 2724 - protein, 744 aa, Homo sapiens
MAKREDSPGPEVQPMDKQFLVCSICLDRYQCPKVLPCLHTFCERCLQNYIPAQSLTLSCPVCRQTSILPEQGVSALQNNFFISSLMEAMQQAPDGAHDPEDPHPLSVVAGRPLSCPNHEGKTMEFYCEACETAMCGECRAGEHREHGTVLLRDVVEQHKAALQRQLEAVRGRLPQLSAAIALVGGISQQLQERKAEALAQISAAFEDLEQALQQRKQALVSDLETICGAKQKVLQSQLDTLRQGQEHIGSSCSFAEQALRLGSAPEVLLVRKHMRERLAALAAQAFPERPHENAQLELVLEVDGLRRSVLNLGALLTTSATAHETVATGEGLRQALVGQPASLTVTTKDKDGRLVRTGSAELRAEITGPDGTRLPVPVVDHKNGTYELVYTARTEGELLLSVLLYGQPVRGSPFRVRALRPGDLPPSPDDVKRRVKSPGGPGSHVRQKAVRRPSSMYSTGGKRKDNPIEDELVFRVGSRGREKGEFTNLQGVSAASSGRIVVADSNNQCIQVFSNEGQFKFRFGVRGRSPGQLQRPTGVAVDTNGDIIVADYDNRWVSIFSPEGKFKTKIGAGRLMGPKGVAVDRNGHIIVVDNKSCCVFTFQPNGKLVGRFGGRGATDRHFAGPHFVAVNNKNEIVVTDFHNHSVKVYSADGEFLFKFGSHGEGNGQFNAPTGVAVDSNGNIIVADWGNSRIQVFDSSGSFLSYINTSAEPLYGPQGLALTSDGHVVVADAGNHCFKAYRYLQ

SEQ ID NO: 2725 - protein, 733 aa, Homo sapiens
MAKREDSPGPEVQPMDKQFLVCSICLDRYQCPKVLPCLHTFCERCLQNYIPAQSLTLSCPVCRQTSILPEQGVSALQNNFFISSLMEAMQQAPDGAHDPEDPHPLSVVAGRPLSCPNHEGKTMEFYCEACETAMCGECRAGEHREQHKAALQRQLEAVRGRLPQLSAAIALVGGISQQLQERKAEALAQISAAFEDLEQALQQRKQALVSDLETICGAKQKVLQSQLDTLRQGQEHIGSSCSFAEQALRLGSAPEVLLVRKHMRERLAALAAQAFPERPHENAQLELVLEVDGLRRSVLNLGALLTTSATAHETVATGEGLRQALVGQPASLTVTTKDKDGRLVRTGSAELRAEITGPDGTRLPVPVVDHKNGTYELVYTARTEGELLLSVLLYGQPVRGSPFRVRALRPGDLPPSPDDVKRRVKSPGGPGSHVRQKAVRRPSSMYSTGGKRKDNPIEDELVFRVGSRGREKGEFTNLQGVSAASSGRIVVADSNNQCIQVFSNEGQFKFRFGVRGRSPGQLQRPTGVAVDTNGDIIVADYDNRWVSIFSPEGKFKTKIGAGRLMGPKGVAVDRNGHIIVVDNKSCCVFTFQPNGKLVGRFGGRGATDRHFAGPHFVAVNNKNEIVVTDFHNHSVKVYSADGEFLFKFGSHGEGNGQFNAPTGVAVDSNGNIIVADWGNSRIQVFDSSGSFLSYINTSAEPLYGPQGLALTSDGHVVVADAGNHCFKAYRYLQ

SEQ ID NO: 2726 - protein, 665 aa, Homo sapiens
MAKREDSPGPEVQPMDKQFLVCSICLDRYQCPKVLPCLHTFCERCLQNYIPAQSLTLSCPVCRQTSILPEQGVSALQNNFFISSLMEAMQQAPDGAHDPEDPHPLSVVAGRPLSCPNHEGKTMEFYCEACETAMCGECRAGEHREHGTVLLRDVVEQHKAALQRQLEAVRGRLPQLSAAIALVGGISQQLQERKAEALAQISAAFEDLEQALQQRKQALVSDLDGLRRSVLNLGALLTTSATAHETVATGEGLRQALVGQPASLTVTTKDKDGRLVRTGSAELRAEITGPDGTRLPVPVVDHKNGTYELVYTARTEGELLLSVLLYGQPVRGSPFRVRALRPGDLPPSPDDVKRRVKSPGGPGSHVRQKAVRRPSSMYSTGGKRKDNPIEDELVFRVGSRGREKGEFTNLQGVSAASSGRIVVADSNNQCIQVFSNEGQFKFRFGVRGRSPGQLQRPTGVAVDTNGDIIVADYDNRWVSIFSPEGKFKTKIGAGRLMGPKGVAVDRNGHIIVVDNKSCCVFTFQPNGKLVGRFGGRGATDRHFAGPHFVAVNNKNEIVVTDFHNHSVKVYSADGEFLFKFGSHGEGNGQFNAPTGVAVDSNGNIIVADWGNSRIQVFDSSGSFLSYINTSAEPLYGPQGLALTSDGHVVVADAGNHCFKAYRYLQ

SEQ ID NO: 2727 - protein, 625 aa, Homo sapiens
MKTMEFYCEACETAMCGECRAGEHREHGTVLLRDVVEQHKAALQRQLEAVRGRLPQLSAAIALVGGISQQLQERKAEALAQISAAFEDLEQALQQRKQALVSDLETICGAKQKVLQSQLDTLRQGQEHIGSSCSFAEQALRLGSAPEVLLVRKHMRERLAALAAQAFPERPHENAQLELVLEVDGLRRSVLNLGALLTTSATAHETVATGEGLRQALVGQPASLTVTTKDKDGRLVRTGSAELRAEITGPDGTRLPVPVVDHKNGTYELVYTARTEGELLLSVLLYGQPVRGSPFRVRALRPGDLPPSPDDVKRRVKSPGGPGSHVRQKAVRRPSSMYSTGGKRKDNPIEDELVFRVGSRGREKGEFTNLQGVSAASSGRIVVADSNNQCIQVFSNEGQFKFRFGVRGRSPGQLQRPTGVAVDTNGDIIVADYDNRWVSIFSPEGKFKTKIGAGRLMGPKGVAVDRNGHIIVVDNKSCCVFTFQPNGKLVGRFGGRGATDRHFAGPHFVAVNNKNEIVVTDFHNHSVKVYSADGEFLFKFGSHGEGNGQFNAPTGVAVDSNGNIIVADWGNSRIQVFDSSGSFLSYINTSAEPLYGPQGLALTSDGHVVVADAGNHCFKAYRYLQ

SEQ ID NO: 2728 - protein, 370 aa, Homo sapiens
MAFRRRTKSYPLFSQEFVIHNHADIGFCLVLCVLIGLMFEVTAKTAFLFILPQYNISVPTADSETVHYHYGPKDLVTILFYIFITIILHAVVQEYILDKISKRLHLSKVKHSKFNESGQLVVFHFTSVIWCFYVVVTEGYLTNPRSLWEDYPHVHLPFQVKFFYLCQLAYWLHALPELYFQKVRKEEIPRQLQYICLYLVHIAGAYLLNLSRLGLILLLLQYSTEFLFHTARLFYFADENNEKLFSAWAAVFGVTRLFILTLAVLAIGFGLARMENQAFDPEKGNFNTLFCRLCVLLLVCAAQAWLMWRFIHSQLRHWREYWNEQSAKRRVPATPRLPARLIKRESGYHENGVVKAENGTSPRTKKLKSP

SEQ ID NO: 2729 - protein, 168 aa, Homo sapiens
MRLTEKSEGEQQLKPNNSNAPNEDQEEEIQQSEQHTPARQRTQRADTQPSRCRLPSRRTPTTSSDRTINLLEVLPWPTEWIFNPYRLPALFELYPEFLLVFKEAFHDISHCLKAQMEKIGLPIILHLFALSTLYFYKFFLPTILSLSFFILLVLLLLLFIIVFILIFF

SEQ ID NO: 2730 - protein, 421 aa, Homo sapiens
MWYHRLSHLHSRLQDLLKGGVIYPALPQPNFKSLLPLAVHWHHTASKSLTCAWQQHEDHFELKYANTVMRFDYVWLRDHCRSASCYNSKTHQRSLDTASVDLCIKPKTIRLDETTLFFTWPDGHVTKYDLNWLVKNSYEGQKQKVIQPRILWNAEIYQQAQVPSVDCQSFLETNEGLKKFLQNFLLYGIAFVENVPPTQEHTEKLAERISLIRETIYGRMWYFTSDFSRGDTAYTKLALDRHTDTTYFQEPCGIQVFHCLKHEGTGGRTLLVDGFYAAEQVLQKAPEEFELLSKVPLKHEYIEDVGECHNHMIGIGPVLNIYPWNKELYLIRYNNYDRAVINTVPYDVVHRWYTAHRTLTIELRRPENEFWVKLKPGRVLFIDNWRVLHGRECFTGYRQLCGCYLTRDDVLNTARLLGLQA

SEQ ID NO: 2731 - protein, 399 aa, Homo sapiens
MWYHRLSHLHSRLQDLLKGGVIYPALPQPNFKSLLPLAVHWHHTASKSLTCAWQQHEDHFELKYANTVMRFDYVWLRDHCRSASCYNSKTHQRSLDTASVDLCIKPKTIRLDETTLFFTWPDGHVTKYDLNWLVKNSYEGQKQKVIQPRILWNAEIYQQAQVPSVDCQSFLETNEGLKKFLQNFLLYGIAFVENVPPTQEHTEKLAERISLIRETIYGRMWYFTSDFSRGDTAYTKLALDRHTDTTYFQEPCGIQVFHCLKHEGTGGRTLLVDGFYAAEQVLQKAPEEFELLSKVPLKHEYIEDVGECHNHMIGIGPVLNIYPWNKELYLIRVLRSWCSTRTIEATSKEIKLYIVCRYSYFGETLFPRSKETVTSLPHMCAYKAAATNRPWLSGVFYTI

SEQ ID NO: 2732 - protein, 332 aa, Homo sapiens
MWYHRLSHLHSRLQDLLKGGVIYPALPQPNFKSLLPLAVHWHHTASKSLTCAWQQHEDHFELKYANTVMRFDYVWLRDHCRSASCYNSKTHQRSLDTASVDLCIKPKTIRLDETTLFFTWPDGHVTKYDLNWLVKNSYEGQKQKVIQPRILWNAEIYQQAQVPSVDCQSFLETNEGLKKFLQNFLLYGIAFVENVPPTQEHTEKLAERISLIRETIYGRMWYFTSDFSRGDTAYTKLALDRHTDTTYFQEPCGIQVFHCLKHEGTGGRTLLVDGFYAAEQVLQKAPEEFELLSKVPLKHEYIEDVGECHNHMIGIGPVLNIYPWNKELYLIR

SEQ ID NO: 2733 - protein, 376 aa, Homo sapiens
MWYHRLSHLHSRLQDLLKGGVIYPALPQPNFKSLLPLAVHWHHTASKSLTCAWQQHEDHFELKYANTVMRFDYVWLRDHCRSASCYNSKTHQRSLDTASVDLCIKPKTIRLDETTLFFTWPDGHVTKYDLNWLVKNSYEGQKQKVIQPRILWNAEIYQQAQVPSVDCQSFLETNEGLKKFLQNFLLYGIAFVENVPPTQEHTEKLAERISLIRETIYGRMWYFTSDFSRGDTAYTKLALDRHTDTTYFQEPCGIQVFHCLKHEGTGGRTLLVDGFYAAEQVLQKAPEEFELLSKVPLKHEYIEDVGECHNHMIGIGPVLNIYPWNKELYLIRLFKEKQNTVNRQWNSSLQCDIPERILTYRHFVSGTSIEHRGSLI

SEQ ID NO: 2734 - protein, 382 aa, Homo sapiens
MWYHRLSHLHSRLQDLLKGGVIYPALPQPNFKSLLPLAVHWHHTASKSLTCAWQQHEDHFELKYANTVMRFDYVWLRDHCRSASCYNSKTHQRSLDTASVDLCIKPKTIRLDETTLFFTWPDGHVTKYDLNWLVKNSYEGQKQKVIQPRILWNAEIYQQAQVPSVDCQSFLETNEGLKKFLQNFLLYGIAFVENVPPTQEHTEKLAERISLIRETIYGRMWYFTSDFSRGDTAYTKLALDRHTDTTYFQEPCGIQVFHCLKHEGTGGRTLLVDGFYAAEQVLQKAPEEFELLSKVPLKHEYIEDVGECHNHMIGIGPVLNIYPWNKELYLIRYNNYDRAVINTVPYDVVHRWYTAHRTLTIELRRPENEFWVKLKPGRVGPN

SEQ ID NO: 2735 - protein, 362 aa, Homo sapiens
MWYHRLSHLHSRLQDLLKGGVIYPALPQPNFKSLLPLAVHWHHTASKSLTCAWQQHEDHFGPDGHVTKYDLNWLVKNSYEGQKQKVIQPRILWNAEIYQQAQVPSVDCQSFLETNEGLKKFLQNFLLYGIAFVENVPPTQEHTEKLAERISLIRETIYGRMWYFTSDFSRGDTAYTKLALDRHTDTTYFQEPCGIQVFHCLKHEGTGGRTLLVDGFYAAEQVLQKAPEEFELLSKVPLKHEYIEDVGECHNHMIGIGPVLNIYPWNKELYLIRYNNYDRAVINTVPYDVVHRWYTAHRTLTIELRRPENEFWVKLKPGRVLFIDNWRVLHGRECFTGYRQLCGCYLTRDDVLNTARLLGLQA

SEQ ID NO: 2736 - protein, 353 aa, Homo sapiens
MRFDYVWLRDHCRSASCYNSKTHQRSLDTASVDLCIKPKTIRLDETTLFFTWPDGHVTKYDLNWLVKNSYEGQKQKVIQPRILWNAEIYQQAQVPSVDCQSFLETNEGLKKFLQNFLLYGIAFVENVPPTQEHTEKLAERISLIRETIYGRMWYFTSDFSRGDTAYTKLALDRHTDTTYFQEPCGIQVFHCLKHEGTGGRTLLVDGFYAAEQVLQKAPEEFELLSKVPLKHEYIEDVGECHNHMIGIGPVLNIYPWNKELYLIRYNNYDRAVINTVPYDVVHRWYTAHRTLTIELRRPENEFWVKLKPGRVLFIDNWRVLHGRECFTGYRQLCGCYLTRDDVLNTARLLGLQA

SEQ ID NO: 2737 - protein, 432 aa, Homo sapiens
MKIDSFLPILRMWYHRLSHLHSRLQDLLKGGVIYPALPQPNFKSLLPLAVHWHHTASKSLTCAWQQHEDHFELKYANTVMRFDYVWLRDHCRSASCYNSKTHQRSLDTASVDLCIKPKTIRLDETTLFFTWPDGHVTKYDLNWLVKNSYEGQKQKVIQPRILWNAEIYQQAQVPSVDCQSFLETNEGLKKFLQNFLLYGIAFVENVPPTQEHTEKLAERISLIRETIYGRMWYFTSDFSRGDTAYTKLALDRHTDTTYFQEPCGIQVFHCLKHEGTGGRTLLVDGFYAAEQVLQKAPEEFELLSKVPLKHEYIEDVGECHNHMIGIGPVLNIYPWNKELYLIRYNNYDRAVINTVPYDVVHRWYTAHRTLTIELRRPENEFWVKLKPGRVLFIDNWRVLHGRECFTGYRQLCGCYLTRDDVLNTARLLGLQA

SEQ ID NO: 2738 - protein, 247 aa, Homo sapiens
MNLLLILTFVAAAVAAPFDDDDKIVGGYICEENSVPYQVSLNSGYHFCGGSLISEQWVVSAGHCYKSRIQVRLGEHNIEVLEGNEQFINAAKIIRHPKYNSRTLDNDILLIKLSSPAVINSRVSAISLPTAPPAAGTESLISGWGNTLSSGADYPDELQCLDAPVLSQAECEASYPGKITNNMFCVGFLEGGKDSCQGDSGGPVVSNGELQGIVSWGYGCAQKNRPGVYTKVYNYVDWIKDTIAANS

SEQ ID NO: 2739 - protein, 520 aa, Homo sapiens
MSQDNDTLMRDILGHELAAMRLQKLEQQRRLFEKKQRQKRQELLMVQANPDASPWLWRSCLREERLLGDRGLGNPFLRKKVSEAHLPSGIHSALGTVSCGGDGRGERGLPTPRTEAVFRNLGLQSPFLSWLPDNSDAELEEVSVENGSVSPPPFKQSPRIRRKGWQAHQRPGTRAEGESDSQDMGDAHKSPNMGPNPGMDGDCVYENLAFQKEEDLEKKREASESTGTNSSAAHNEELSKALKGEGGTDSDHMRHEASLAIRSPCPGLEEDMEAYVLRPALPGTMMQCYLTRDKHGVDKGLFPLYYLYLETSDSLQRFLLAGRKRRRSKTSNYLISLDPTHLSRDGDNFVGKVRSNVFSTKFTIFDNGVNPDREHLTRNTARIRQELGAVCYEPNVLGYLGPRKMTVILPGTNSQNQRINVQPLNEQESLLSRYQRGDKQGLLLLHNKTPSWDKENGVYTLNFHGRVTRASVKNFQIVDPKHQEHLVLQFGRVGPDTFTMDFCFPFSPLQAFSICLSSFN

SEQ ID NO: 2740 - protein, 457 aa, Homo sapiens
MDRSLRNVLVVSFGFLLLFTAYGGLQSLQSSLYSEEGLGVTALSTLYGGMLLSSMFLPPLLIERLGCKGTIILSMCGYVAFSVGNFFASWYTLIPTSILLGLGAAPLWSAQCTYLTITGNTHAEKAGKRGKDMVNQYFGIFFLIFQSSGVWGNLISSLVFGQTPSQETLPEEQLTSCGASDCLMATTTTNSTQRPSQQLVYTLLGIYTGSGVLAVLMIAAFLQPIRDVQRESEGEKKSVPFWSTLLSTFKLYRDKRLCLLILLPLYSGLQQGFLSSEYTRSYVTCTLGIQFVGYVMICFSATDALCSVLYGKVSQYTGRAVLYVLGAVTHVSCMIALLLWRPRADHLAVFFVFSGLWGVADAVWQTQNNALYGVLFEKSKEAAFANYRLWEALGFVIAFGYSMFLCVHVKLYILLGVLSLTMVAYGLVECVESKNPIRPHAPGQVNQAEDEEIQTKM

SEQ ID NO: 2741 - protein, 415 aa, Homo sapiens
MDRSLRNVLVVSFGFLLLFTAYGGLQSLQSSLYSEEGLGVTALSTLYGGMLLSSMFLPPLLIERLGCKGTIILSMCGYVAFSVGNFFASWYTLIPTSILLGLGAAPLWSAQCTYLTITGNTHAEKAGKRGKDMVNQYFGIFFLIFQSSGVWGNLISSLVFGQTPSQGSGVLAVLMIAAFLQPIRDVQRESEGEKKSVPFWSTLLSTFKLYRDKRLCLLILLPLYSGLQQGFLSSEYTRSYVTCTLGIQFVGYVMICFSATDALCSVLYGKVSQYTGRAVLYVLGAVTHVSCMIALLLWRPRADHLAVFFVFSGLWGVADAVWQTQNNALYGVLFEKSKEAAFANYRLWEALGFVIAFGYSMFLCVHVKLYILLGVLSLTMVAYGLVECVESKNPIRPHAPGQVNQAEDEEIQTKM

SEQ ID NO: 2742 - protein, 1543 aa, Homo sapiens
MYAAVEHGPVLCSDSNILCLSWKGRVPKSEKEKPVCRRRYYEEGWLATGNGRGVVGVTFTSSHCRRDRSTPQRINFNLRGHNSEVVLVRWNEPYQKLATCDADGGIFVWIQYEGRWSVELVNDRGAQVSDFTWSHDGTQALISYRDGFVLVGSVSGQRHWSSEINLESQITCGIWTPDDQQVLFGTADGQVIVMDCHGRMLAHVLLHESDGVLGMSWNYPIFLVEDSSESDTDSDDYAPPQDGPAAYPIPVQNIKPLLTVSFTSGDISLMNNYDDLSPTVIRSGLKEVVAQWCTQGDLLAVAGMERQTQLGELPNGPLLKSAMVKFYNVRGEHIFTLDTLVQRPIISICWGHRDSRLLMASGPALYVVRVEHRVSSLQLLCQQAIASTLREDKDVSKLTLPPRLCSYLSTAFIPTIKPPIPDPNNMRDFVSYPSAGNERLHCTMKRTEDDPEVGGPCYTLYLEYLGGLVPILKGRRISKLRPEFVIMDPRTDSKPDEIYGNSLISTVIDSCNCSDSSDIELSDDWAAKKSPKISRASKSPKLPRISIEARKSPKLPRAAQELSRSPRLPLRKPSVGSPSLTRREFPFEDITQHNYLAQVTSNIWGTKFKIVGLAAFLPTNLGAVIYKTSLLHLQPRQMTIYLPEVRKISMDYINLPVFNPNVFSEDEDDLPVTGASGVPENSPPCTVNIPIAPIHSSAQAMSPTQSIGLVQSLLANQNVQLDVLTNQTTAVGTAEHAGDSATQYPVSNRYSNPGQVIFGSVEMGRIIQNPPPLSLPPPPQGPMQLSTVGHGDRDHEHLQKSAKALRPTPQLAAEGDAVVFSAPQEVQVTKINPPPPYPGTIPAAPTTAAPPPPLPPPQPPVDVCLKKGDFSLYPTSVHYQTPLGYERITTFDSSGNVEEVCRPRTRMLCSQNTYTLPGPGSSATLRLTATEKKVPQPCSSATLNRLTVPRYSIPTGDPPPYPEIASQLAQGRGAAQRSDNSLIHATLRRNNREATLKMAQLADSPRAPLQPLAKSKGGPGGVVTQLPARPPPALYTCSQCSGTGPSSQPGASLAHTASASPLASQSSYSLLSPPDSARDRTDYVNSAFTEDEALSQHCQLEKPLRHPPLPEAAVTLKRPPPYQWDPMLGEDVWVPQERTAQTSGPNPLKLSSLMLSQGQHLDVSRLPFISPKSPASPTATFQTGYGMGVPYPGSYNNPPLPGVQAPCSPKDALSPTQFAQQEPAVVLQPLYPPSLSYCTLPPMYPGSSTCSSLQLPPVALHPWSSYSACPPMQNPQGTLPPKPHLVVEKPLVSPPPADLQSHLGTEVMVETADNFQEVLSLTESPVPQRTEKFGKKNRKRLDSRAEEGSVQAITEGKVKKEARTLSDFNSLISSPHLGREKKKVKSQKDQLKSKKLNKTNEFQDSSESEPELFISGDELMNQSQGSRKGWKSKRSPRAAGELEEAKCRRASEKEDGRLGSQGFVYVMANKQPLWNEATQVYQLDFGGRVTQESAKNFQIELEGRQVMQFGRIDGSAYILDFQYPFSAVQAFAVALANVTQRLK

SEQ ID NO: 2743 - protein, 678 aa, Homo sapiens
MYAAVEHGPVLCSDSNILCLSWKGRVPKSEKEKPVCRRRYYEEGWLATGNGRGVVGVTFTSSHCRRDRSTPQRINFNLRGHNSEVVLVRWNEPYQKLATCDADGGIFVWIQYEGRWSVELVNDRGAQVSDFTWSHDGTQALISYRDGFVLVGSVSGQRHWSSEINLESQITCGIWTPDDQQVLFGTADGQVIVMDCHGRMLAHVLLHESDGVLGMSWNYPIFLVEDSSESDTDSDDYAPPQDGPAAYPIPVQNIKPLLTVSFTSGDISLMNNYDDLSPTVIRSGLKEVVAQWCTQGDLLAVAGMERQTQLGELPNGPLLKSAMVKFYNVRGEHIFTLDTLVQRPIISICWGHRDSRLLMASGPALYVVRVEHRVSSLQLLCQQAIASTLREDKDVSKLTLPPRLCSYLSTAFIPTIKPPIPDPNNMRDFVSYPSAGNERLHCTMKRTEDDPEVGGPCYTLYLEYLGGLVPILKGRRISKLRPEFVIMDPRTDSKPDEIYGNSLISTVIDSCNCSDSSDIELSDDWAAKKSPKISRASKSPKLPRISIEARKSPKLPRAAQELSRSPRLPLRKPSVGSPSLTRREFPFEDITQHNYLAQVTSNIWGTKFKIVGLAAFLPTNLGAVIYKTSLLHLQPRQMTIYLPEVRKISMDYINLPVFNPNVFSEDEDDLPGDAVWTD

SEQ ID NO: 2744 - protein, 117 aa, Homo sapiens
MSSNVPADMINLRLILVSGKTKEFLFSPNDSASDIAKHVYDNWPMDWEEEQVSSPNILRLIYQGRFLHGNVTLGALKLPFGKTTVMHLVARETLPEPNSQGQRNREKTGESNCCVIL

SEQ ID NO: 2745 - protein, 417 aa, Homo sapiens
MSGRSRGRKSSRAKNRGKGRAKARVRPAPDDAPRDPDPSQYQSLGEDTQAAQVQAGAGWGGLEAAASAQLLRLGEEAACRLPLDCGLALRARAAGDHGQAAARPGPGKAASLSERLAADTVFVGTAGTVGRPKNAPRVGNRRGPAGKKAPETCSTAGRGPQVIAGGRQKKGAAGENTSVSAGEEKKEERDAGSGPPATEGSMDTLENVQLKLENMNAQADRAYLRLSRKFGQLRLQHLERRNHLIQNIPGFWGQAFQNHPQLASFLNSQEKEVLSYLNSLEVEELGLARLGYKIKFYFDRNPYFQNKVLIKEYGCGPSGQVVSRSTPIQWLPGHDLQSLSQGNPENNRSFFGWFSNHSSIESDKIVEIINEELWPNPLQFYLLSEGARVEKGKEKEGRQGPGKQPMETTQPGVSQSN

SEQ ID NO: 2746 - protein, 494 aa, Homo sapiens
MPLYSVTVKWGKEKFEGVELNTDEPPMVFKAQLFALTGVQPARQKVMVKGGTLKDDDWGNIKIKNGMTLLMMGSADALPEEPSAKTVFVEDMTEEQLASAMELPCGLTNLGNTCYMNATVQCIRSVPELKDALKRYAGALRASGEMASAQYITAALRDLFDSMDKTSSSIPPIILLQFLHMAFPQFAEKGEQGQYLQQDANECWIQMMRVLQQKLEAIEDDSVKETDSSSASAATPSKKKSLIDQFFGVEFETTMKCTESEEEEVTKGKENQLQLSCFINQEVKYLFTGLKLRLQEEITKQSPTLQRNALYIKSSKISRLPAYLTIQMVRFFYKEKESVNAKVLKDVKFPLMLDMYELCTPELQEKMVSFRSKFKDLEDKKVNQQPNTSDKKSSPQKEVKYEPFSFADDIGSNNCGYYDLQAVLTHQGRSSSSGHYVSWVKRKQDEWIKFDDDKVSIVTPEDILRLSGGGDWHIAYVLLYGPRRVEIMEEESEQ

SEQ ID NO: 2747 - protein, 459 aa, Homo sapiens
MPLYSVTVKWGKEKFEGVELNTDEPPMVFKAQLFALTGVQPARQKVMVKGGTLKDDDWGNIKIKNMELPCGLTNLGNTCYMNATVQCIRSVPELKDALKRYAGALRASGEMASAQYITAALRDLFDSMDKTSSSIPPIILLQFLHMAFPQFAEKGEQGQYLQQDANECWIQMMRVLQQKLEAIEDDSVKETDSSSASAATPSKKKSLIDQFFGVEFETTMKCTESEEEEVTKGKENQLQLSCFINQEVKYLFTGLKLRLQEEITKQSPTLQRNALYIKSSKISRLPAYLTIQMVRFFYKEKESVNAKVLKDVKFPLMLDMYELCTPELQEKMVSFRSKFKDLEDKKVNQQPNTSDKKSSPQKEVKYEPFSFADDIGSNNCGYYDLQAVLTHQGRSSSSGHYVSWVKRKQDEWIKFDDDKVSIVTPEDILRLSGGGDWHIAYVLLYGPRRVEIMEEESEQ

SEQ ID NO: 2748 - protein, 483 aa, Homo sapiens
MPLYSVTVKWGKEKFEGVELNTDEPPMVFKAQLFALTGVQPARQKVMVKGGTLKGMTLLMMGSADALPEEPSAKTVFVEDMTEEQLASAMELPCGLTNLGNTCYMNATVQCIRSVPELKDALKRYAGALRASGEMASAQYITAALRDLFDSMDKTSSSIPPIILLQFLHMAFPQFAEKGEQGQYLQQDANECWIQMMRVLQQKLEAIEDDSVKETDSSSASAATPSKKKSLIDQFFGVEFETTMKCTESEEEEVTKGKENQLQLSCFINQEVKYLFTGLKLRLQEEITKQSPTLQRNALYIKSSKISRLPAYLTIQMVRFFYKEKESVNAKVLKDVKFPLMLDMYELCTPELQEKMVSFRSKFKDLEDKKVNQQPNTSDKKSSPQKEVKYEPFSFADDIGSNNCGYYDLQAVLTHQGRSSSSGHYVSWVKRKQDEWIKFDDDKVSIVTPEDILRLSGGGDWHIAYVLLYGPRRVEIMEEESEQ

SEQ ID NO: 2749 - protein, 810 aa, Homo sapiens
MSKGPGPGGSAASSAPPAATAQVLQAQPEKPQHYTYLKEFRTEQCPLFVQHKCTQHRPYTCFHWHFVNQRRRRSIRRRDGTFNYSPDVYCTKYDEATGLCPEGDECPFLHRTTGDTERRYHLRYYKTGICIHETDSKGNCTKNGLHCAFAHGPHDLRSPVYDIRELQAMEALQNGQTTVEGSIEGQSAGAASHAMIEKILSEEPRWQETAYVLGNYKTEPCKKPPRLCRQGYACPYYHNSKDRRRSPRKHKYRSSPCPNVKHGDEWGDPGKCENGDACQYCHTRTEQQFHPEIYKSTKCNDMQQSGSCPRGPFCAFAHVEQPPLSDDLQPSSAVSSPTQPGPVLYMPSAAGDSVPVSPSSPHAPDLSALLCRNSSLGSPSNLCGSPPGSIRKPPNLEGIVFPGESGLAPGSYKKAPGFEREDQVGAEYLKNFKCQAKLKPHSLEPRSQEQPLLQPKQDMLGILPAGSPLTSSISSSITSSLAATPPSPVGTSSVPGMNANALPFYPTSDTVESVIESALDDLDLNEFGVAALEKTFDNSTVPHPGSITIGGSLLQSSAPVNIPGSLGSSASFHSASPSPPVSLSSHFLQQPQGHLSQSENTFLGTSASHGSLGLNGMNSSIWEHFASGSFSPGTSPAFLSGPGAAELARLRQELDEANSTIKQWEESWKQAKQACDAWKKEAEEAGERASAAGAECELAREQRDALEVQVKKLQEELERLHAGPEPQALPAFSDLEALSLSTLYSLQKQLRAHLEQVDKAVFHMQSVKCLKCQEQKRAVLPCQHAALCELCAEGSECPICQPGRAHTLQS

SEQ ID NO: 2750 - protein, 981 aa, Homo sapiens
MAEGGAADLDTQRSDIATLLKTSLRKGDTWYLVDSRWFKQWKKYVGFDSWDKYQMGDQNVYPGPIDNSGLLKDGDAQSLKEHLIDELDYILLPTEGWNKLVSWYTLMEGQEPIARKVVEQGMFVKHCKVEVYLTELKLCENGNMNNVVTRRFSKADTIDTIEKEIRKIFSIPDEKETRLWNKYMSNTFEPLNKPDSTIQDAGLYQGQVLVIEQKNEDGTWPRGPSTPKSPGASNFSTLPKISPSSLSNNYNNMNNRNVKNSNYCLPSYTAYKNYDYSEPGRNNEQPGLCGLSNLGNTCFMNSAIQCLSNTPPLTEYFLNDKYQEELNFDNPLGMRGEIAKSYAELIKQMWSGKFSYVTPRAFKTQVGRFAPQFSGYQQQDCQELLAFLLDGLHEDLNRIRKKPYIQLKDADGRPDKVVAEEAWENHLKRNDSIIVDIFHGLFKSTLVCPECAKISVTFDPFCYLTLPLPMKKERTLEVYLVRMDPLTKPMQYKVVVPKIGNILDLCTALSALSGIPADKMIVTDIYNHRFHRIFAMDENLSSIMERDDIYVFEININRTEDTEHVIIPVCLREKFRHSSYTHHTGSSLFGQPFLMAVPRNNTEDKLYNLLLLRMCRYVKISTETEETEGSLHCCKDQNINGNGPNGIHEEGSPSEMETDEPDDESSQDQELPSENENSQSEDSVGGDNDSENGLCTEDTCKGQLTGHKKRLFTFQFNNLGNTDINYIKDDTRHIRFDDRQLRLDERSFLALDWDPDLKKRYFDENAAEDFEKHESVEYKPPKKPFVKLKDCIELFTTKEKLGAEDPWYCPNCKEHQQATKKLDLWSLPPVLVVHLKRFSYSRYMRDKLDTLVDFPINDLDMSEFLINPNAGPCRYNLIAVSNHYGGMGGGHYTAFAKNKDDGKWYYFDDSSVSTASEDQIVSKAAYVLFYQRQDTFSGTGFFPLDRETKGASAATGIPLESDEDSNDNDNDIENENCMHTN

SEQ ID NO: 2751 - protein, 952 aa, Homo sapiens
MAEGGAADLDTQRSDIATLLKTSLRKGDTWYLVDSRWFKQWKKYVGFDSWDKYQMGDQNVYPGPIDNSGLLKDGDAQSLKEHLIDELDYILLPTEGWNKLVSWYTLMEGQEPIARKVVEQGMFVKHCKVEVYLTELKLCENGNMNNVVTRRFSKADTIDTIEKEIRKIFSIPDEKETRLWNKYMSNTFEPLNKPDSTIQDAGLYQGQVLVIEQKNEDGTWPRGPSTPNVKNSNYCLPSYTAYKNYDYSEPGRNNEQPGLCGLSNLGNTCFMNSAIQCLSNTPPLTEYFLNDKYQEELNFDNPLGMRGEIAKSYAELIKQMWSGKFSYVTPRAFKTQVGRFAPQFSGYQQQDCQELLAFLLDGLHEDLNRIRKKPYIQLKDADGRPDKVVAEEAWENHLKRNDSIIVDIFHGLFKSTLVCPECAKISVTFDPFCYLTLPLPMKKERTLEVYLVRMDPLTKPMQYKVVVPKIGNILDLCTALSALSGIPADKMIVTDIYNHRFHRIFAMDENLSSIMERDDIYVFEININRTEDTEHVIIPVCLREKFRHSSYTHHTGSSLFGQPFLMAVPRNNTEDKLYNLLLLRMCRYVKISTETEETEGSLHCCKDQNINGNGPNGIHEEGSPSEMETDEPDDESSQDQELPSENENSQSEDSVGGDNDSENGLCTEDTCKGQLTGHKKRLFTFQFNNLGNTDINYIKDDTRHIRFDDRQLRLDERSFLALDWDPDLKKRYFDENAAEDFEKHESVEYKPPKKPFVKLKDCIELFTTKEKLGAEDPWYCPNCKEHQQATKKLDLWSLPPVLVVHLKRFSYSRYMRDKLDTLVDFPINDLDMSEFLINPNAGPCRYNLIAVSNHYGGMGGGHYTAFAKNKDDGKWYYFDDSSVSTASEDQIVSKAAYVLFYQRQDTFSGTGFFPLDRETKGASAATGIPLESDEDSNDNDNDIENENCMHTN

SEQ ID NO: 2752 - protein, 956 aa, Homo sapiens
MAEGGAADLDTQRSDIATLLKTSLRKGDTWYLVDSRWFKQWKKYVGFDSWDKYQMGDQNVYPGPIDNSGLLKDGDAQSLKEHLIDELDYILLPTEGWNKLVSWYTLMEGQEPIARKVVEQGMFVKHCKVEVYLTELKLCENGNMNNVVTRRFSKADTIDTIEKEIRKIFSIPDEKETRLWNKYMSNTFEPLNKPDSTIQDAGLYQGQVLVIEQKNEQKNEDGTWPRGPSTPNVKNSNYCLPSYTAYKNYDYSEPGRNNEQPGLCGLSNLGNTCFMNSAIQCLSNTPPLTEYFLNDKYQEELNFDNPLGMRGEIAKSYAELIKQMWSGKFSYVTPRAFKTQVGRFAPQFSGYQQQDCQELLAFLLDGLHEDLNRIRKKPYIQLKDADGRPDKVVAEEAWENHLKRNDSIIVDIFHGLFKSTLVCPECAKISVTFDPFCYLTLPLPMKKERTLEVYLVRMDPLTKPMQYKVVVPKIGNILDLCTALSALSGIPADKMIVTDIYNHRFHRIFAMDENLSSIMERDDIYVFEININRTEDTEHVIIPVCLREKFRHSSYTHHTGSSLFGQPFLMAVPRNNTEDKLYNLLLLRMCRYVKISTETEETEGSLHCCKDQNINGNGPNGIHEEGSPSEMETDEPDDESSQDQELPSENENSQSEDSVGGDNDSENGLCTEDTCKGQLTGHKKRLFTFQFNNLGNTDINYIKDDTRHIRFDDRQLRLDERSFLALDWDPDLKKRYFDENAAEDFEKHESVEYKPPKKPFVKLKDCIELFTTKEKLGAEDPWYCPNCKEHQQATKKLDLWSLPPVLVVHLKRFSYSRYMRDKLDTLVDFPINDLDMSEFLINPNAGPCRYNLIAVSNHYGGMGGGHYTAFAKNKDDGKWYYFDDSSVSTASEDQIVSKAAYVLFYQRQDTFSGTGFFPLDRETKGASAATGIPLESDEDSNDNDNDIENENCMHTN

SEQ ID NO: 2753 - protein, 235 aa, Homo sapiens
MAEGGAADLDTQRSDIATLLKTSLRKGDTWYLVDSRWFKQWKKYVGFDSWDKYQMGDQNVYPGPIDNSGLLKDGDAQSLKEHLIDELDYILLPTEGWNKLVSWYTLMEGQEPIARKVVEQGMFVKHCKVEVYLTELKLCENGNMNNVVTRRFSKADTIDTIEKEIRKIFSIPDEKETRLWNKYMSNTFEPLNKPDSTIQDAGLYQGQVLVIEQKNEDGTWPRGPSTPKKPLEQSC

SEQ ID NO: 2754 - protein, 522 aa, Homo sapiens
MNINDLKLTLSKAGQEHLLRFWNELEEAQQVELYAELQAMNFEELNFFFQKAIEGFNQSSHQKNVDARMEPVPREVLGSATRDQDQLQAWESEGLFQISQNKVAVLLLAGGQGTRLGVAYPKGMYDVGLPSRKTLFQIQAERILKLQQVAEKYYGNKCIIPWYIMTSGRTMESTKEFFTKHKYFGLKKENVIFFQQGMLPAMSFDGKIILEEKNKVSMAPDGNGGLYRALAAQNIVEDMEQRGIWSIHVYCVDNILVKVADPRFIGFCIQKGADCGAKVVEKTNPTEPVGVVCRVDGVYQVVEYSEISLATAQKRSSDGRLLFNAGNIANHFFTVPFLRDVVNVYEPQLQHHVAQKKIPYVDTQGQLIKPDKPNGIKMEKFVFDIFQFAKKFVVYEVLREDEFSPLKNADSQNGKDNPTTARHALMSLHHCWVLNAGGHFIDENGSRLPAIPRSATNGKSETITADVNHNLKDANDVPIQCEISPLISYAGEGLESYVADKEFHAPLIIDENGVHELVKNGI

SEQ ID NO: 2755 - protein, 505 aa, Homo sapiens
MNINDLKLTLSKAGQEHLLRFWNELEEAQQVELYAELQAMNFEELNFFFQKAIEGFNQSSHQKNVDARMEPVPREVLGSATRDQDQLQAWESEGLFQISQNKVAVLLLAGGQGTRLGVAYPKGMYDVGLPSRKTLFQIQAERILKLQQVAEKYYGNKCIIPWYIMTSGRTMESTKEFFTKHKYFGLKKENVIFFQQGMLPAMSFDGKIILEEKNKVSMAPDGNGGLYRALAAQNIVEDMEQRGIWSIHVYCVDNILVKVADPRFIGFCIQKGADCGAKVVEKTNPTEPVGVVCRVDGVYQVVEYSEISLATAQKRSSDGRLLFNAGNIANHFFTVPFLRDVVNVYEPQLQHHVAQKKIPYVDTQGQLIKPDKPNGIKMEKFVFDIFQFAKKFVVYEVLREDEFSPLKNADSQNGKDNPTTARHALMSLHHCWVLNAGGHFIDENGSRLPAIPRLKDANDVPIQCEISPLISYAGEGLESYVADKEFHAPLIIDENGVHELVKNGI

SEQ ID NO: 2756 - protein, 521 aa, Homo sapiens
MNINDLKLTLSKAGQEHLLRFWNELEEAQQVELYAELQAMNFEELNFFFQKAIEGFNQSSHQKNVDARMEPVPREVLGSATRDQDQLQAWESEGLFQISQNKVAVLLLAGGQGTRLGVAYPKGMYDVGLPSRKTLFQIQAERILKLQQVAEKYYGNKCIIPWYIMTSGRTMESTKEFFTKHKYFGLKKENVIFFQQGMLPAMSFDGKIILEEKNKVSMAPDGNGGLYRALAAQNIVEDMEQRGIWSIHVYCVDNILVKVADPRFIGFCIQKGADCGAKVVEKTNPTEPVGVVCRVDGVYQVVEYSEISLATAQKRSSDGRLLFNAGNIANHFFTVPFLRDVVNVYEPQLQHHVAQKKIPYVDTQGQLIKPDKPNGIKMEKFVFDIFQFAKKFVVYEVLREDEFSPLKNADSQNGKDNPTTARHALMSLHHCWVLNAGGHFIDENGSRLPAIPRATNGKSETITADVNHNLKDANDVPIQCEISPLISYAGEGLESYVADKEFHAPLIIDENGVHELVKNGI

SEQ ID NO: 2757 - protein, 147 aa, Homo sapiens
MALKRIQKELSDLQRDPPAHCSAGPVGDDLFHWQATIMGPPDSAYQGGVFFLTVHFPTDYPFKPPKIAFTTKIYHPNINSNGSICLDILRSQWSPALTVSKVLLSICSLLCDPNPDDPLVPDIAQIYKSDKEKYNRHAREWTQKYAM

SEQ ID NO: 2758 - protein, 655 aa, Homo sapiens
MAKGGEALPQGSPAPVQDPHLIKVTVKTPKDKEDFSVTDTCTIQQLKEEISQRFKAHPDQLVLIFAGKILKDPDSLAQCGVRDGLTVHLVIKRQHRAMGNECPAASVPTQGPSPGSLPQPSSIYPADGPPAFSLGLLTGLSRLGLAYRGFPDQPSSLMRQHVSVPEFVTQLIDDPFIPGLLSNTGLVRQLVLDNPHMQQLIQHNPEIGHILNNPEIMRQTLEFLRNPAMMQEMIRSQDRVLSNLESIPGGYNVLCTMYTDIMDPMLNAVQEQFGGNPFATATTDNATTTTSQPSRMENCDPLPNPWTSTHGGSGSRQGRQDGDQDAPDIRNRFPNFLGIIRLYDYLQQLHENPQSLGTYLQGTASALSQSQEPPPSVNRVPPSSPSSQEPGSGQPLPEESVAIKGRSSCPAFLRYPTENSTGQGGDQDGAGKSSTGHSTNLPDLVSGLGDSANRVPFAPLSFSPTAAIPGIPEPPWLPSPAYPRSLRPDGMNPAPQLQDEIQPQLPLLMHLQAAMANPRALQALRQIEQGLQVLATEAPRLLLWFMPCLAGTGSVAGGIESREDPLMSEDPLPNPPPEVFPALDSAELGFLSPPFLHMLQDLVSTNPQQLQPEAHFQVQLEQLRSMGFLNREANLQALIATGGDVDAAVEKLRQS

SEQ ID NO: 2759 - protein, 201 aa, Homo sapiens
MSTEAQRVDDSPSTSGGSSDGDQRESVQQEPEREQVQPKKKEGKISSKTAAKLSTSAKRIQKELAEITLDPPPNCSAGPKGDNIYEWRSTILGPPGSVYEGGVFFLDITFSPDYPFKPPKVTFRTRIYHCNINSQGVICLDILKDNWSPALTISKVLLSICSLLTDCNPADPLVGSIATQYMTNRAEHDRMARQWTKRYAT

SEQ ID NO: 2760 - protein, 158 aa, Homo sapiens [sequence omitted]

SEQ ID NO: 2761 - protein, 631 aa, Homo sapiens
MAAAAGDGTVKPLQSAMKLANGAIELDTGNRPREAYTEYLRSIHYISQVLLEEVETTKEAGETVPPDTSKMLKLAQQCLERAQSTAAKLGKTRLKPTMPAAAPIPQPAGRHRRVYSDEGGKLSPFLPPEIFQKLQGAESQSCKKELTPLEEASLQNQKLKAAYEARMARLDPSQAMQKTSLTLSLQRQMMENLVIAKAREETLQRKMEERRLRLQEAANRRFCSQVALTPEEREQRALYAAILEYEQDHDWPKHWKAKLKRNPGDLSLVTSLVSHLLSLPDHPIAQLLRRLQCSVYSALYPAVSRAAAPAPGCCPPTPNPGSRRLRPSQSLHCMLSPPEPSAAPRPQDSPPTPPLQPGPVGSPSPLGDTASGLPDKDSSFEDLEQFLGTSERQGRGRGVQPEPQLQQLKTAVEEIHNAVDRLLSLTLLAFEGLNTAASKDRCLACIEEPFFSPLWPLLLALYRSVHRAREAALSRSMELYRNAPPTAIGIPTKLLPQNPEAKGATGYPYCAAAQELGLLVLESCPQKKLECIVRTLRIICVCAEDYCPTPEATPQAGPPPIAAAAIGADDLLPILSFVVLRSGLPQLVSECAALEEFIHEGYLIGEEGYCLTSLQSALSYVELLPRGGLAK

SEQ ID NO: 2762 - protein, 662 aa, Homo sapiens
MLLCPAQKTVFRLQLTTAAQCLWVYLRDKQVVVFLAYPTRAPGRNNGVTSLHWPDPTLSLSWTQEAYTEYLRSIHYISQVLLEEVETTKEAGETVPPDTSKMLKLAQQCLERAQSTAAKLGKTRLKPTMPAAAPIPQPAGRHRRVYSDEGGKLSPFLPPEIFQKLQGAESQSCKKELTPLEEASLQNQKLKAAYEARMARLDPSQAMQKTSLTLSLQRQMMENLVIAKAREETLQRKMEERRLRLQEAANRRFCSQVALTPEEREQRALYAAILEYEQDHDWPKHWKAKLKRNPGDLSLVTSLVSHLLSLPDHPIAQLLRRLQCSVYSALYPAVSRAAAPAPGCCPPTPNPGSRRLRPSQSLHCMLSPPEPSAAPRPQDSPPTPPLQPGPVGSPSPLGDTASGLPDKDSSFEDLEQFLGTSERQGRGRGVQPEPQLQQLKTAVEEIHNAVDRLLSLTLLAFEGLNTAASKDRCLACIEEPFFSPLWPLLLALYRSVHRAREAALSRSMELYRNAPPTAIGIPTKLLPQNPEAKGATGYPYCAAAQELGLLVLESCPQKKLECIVRTLRIICVCAEDYCPTPEATPQAGPPPIAAAAIGADDLLPILSFVVLRSGLPQLVSECAALEEFIHEGYLIGEEGYCLTSLQSALSYVELLPRGGLAK

SEQ ID NO: 2763 - protein, 123 aa, Homo sapiens
MACRCLSFLLMGTFLSVSQTVLAQLDALLVFPGQVAQLSCTLSPQHVTIRDYGVSWYQQRAGSAPRYLLYYRSEEDHHRPADIPDRFSAAKDEAHNACVLTISPVQPEDDADYYCSVGYGFSP

SEQ ID NO: 2764 - protein, 786 aa, Homo sapiens
MVHFCGLLTLHREPVPLKSISVSVNIYEFVAGVSATLNYENEEKVPLEAFFVFPMDEDSAVYSFEALVDGKKIVAELQDKMKARTNYEKAISQGHQAFLLEGDSSSRDVFSCNVGNLQPGSKAAVTLKYVQELPLEADGALRFVLPAVLNPRYQFSGSSKDSCLNVKTPIVPVEDLPYTLSMVATIDSQHGIEKVQSNCPLSPTEYLGEDKTSAQVSLAAGHKFDRDVELLIYYNEVHTPSVVLEMGMPNMKPGHLMGDPSAMVSFYPNIPEDQPSNTCGEFIFLMDRSGSMQSPMSSQDTSQLRIQAAKETLILLLKSLPIGCYFNIYGFGSSYEACFPESVKYTQQTMEEALGRVKLMQADLGGTEILAPLQNIYRGPSIPGHPLQLFVFTDGEVTDTFSVIKEVRINRQKHRCFSFGIGEGTSTSLIKGIARASGGTSEFITGKDRMQSKALRTLKRSLQPVVEDVSLSWHLPPGLSAKMLSPEQTVIFRGQRLISYAQLTGRMPAAETTGEVCLKYTLQGKTFEDKVTFPLQPKPDVNLTIHRLAAKSLLQTKDMGLRETPASDKKDALNLSLESGVISSFTAFIAINKELNKPVQGPLAHRDVPRPILLGASAPLKIKCQSGFRKALHSDRPPSASQPRGELMCYKAKTFQMDDYSLCGLISHKDQHSPGFGENHLVQLIYHQNANGSWDLNEDLAKILGMSLEEIMAAQPAELVDSSGWATILAVIWLHSNGKDLKCEWELLERKAVAWMRAHAGSTMPSVVKAAITFLKSSVDPAIFAF

SEQ ID NO: 2765 - protein, 426 aa, Homo sapiens
MVHFCGLLTLHREPVPLKSISVSVNIYEFVAGVSATLNYENEEKVPLEAFFVFPMDEDSAVYSFEALVDGKKIVAELQDKMKARTNYEKAISQGHQAFLLEGDSSSRDVFSCNVGNLQPGSKAAVTLKYVQELPLEADGALRFVLPAVLNPRYQFSGSSKDSCLNVKTPIVPVEDLPYTLSMVATIDSQHGIEKVQSNCPLSPTEYLGEDKTSAQVSLAAGHKFDRDVELLIYYNEVHTPSVVLEMGMPNMKPGHLMGDPSAMVSFYPNIPEDQPSNTCGEFIFLMDRSGSMQSPMSSQDTSQLRIQAAKETLILLLKSLPIGCYFNIYGFGSSYEACFPESVKYTQQTMEEALGRVKLMQADLGGTEILAPLQNIYRGPSIPGHPLQVFERPYTLTVLLLHLSPEGNLCVIRPRHSRWTITVSVG

SEQ ID NO: 2766 - protein, 415 aa, Homo sapiens
MVHFCGLLTLHREPVPLKSISVSVNIYEFVAGVSATLNYENEEKVPLEAFFVFPMDEDSAVYSFEALVDGKKIVAELQDKMKARTNYEKAISQGHQAFLLEGDSSSRDVFSCNVGNLQPGSKAAVTLKYVQELPLEADGALRFVLPAVLNPRYQFSGSSKDSCLNVKTPIVPVEDLPYTLSMVATIDSQHGIEKVQSNCPLSPTEYLGEDKTSAQVSLAAGHKFDRDVELLIYYNEVHTPSVVLEMGMPNMKPGHLMGDPSAMVSFYPNIPEDQPSNTCGEFIFLMDRSGSMQSPMSSQDTSQLRIQAAKETLILLLKSLPIGCYFNIYGFGSSYEACFPESVKYTQQTMEEALGRVKLMQADLGGTEILAPLQNIYRGPSIPGHPLQLFVFTDGEVTDTFSVIKEVRINRQKHR

SEQ ID NO: 2767 - protein, 266 aa, Homo sapiens
MVHFCGLLTLHREPVPLKSISVSVNIYEFVAGVSATLNYENEEKVPLEAFFVFPMDEDSAVYSFEALVDGKKIVAELQDKMKARTNYEKAISQGHQAFLLEGDSSSRDVFSCNVGNLQPGSKAAVTLKYVQELPLEADGALRFVLPAVLNPRYQFSGSSKDSCLNVKTPIVPVEDLPYTLSMVATIDSQHGIEKVQSNCPLSPTEYLGEDKTSAQVSLAAGHKFDRDVELLIYYNEVHTPSVVLEMGMPNMKPGHLMGDPSAMVRT

SEQ ID NO: 2768 - protein, 579 aa, Homo sapiens
MAAKSDGAAASASPDPEGAAGGARGSAGGRGEAAAAAGPPGVVGAGGPGPRYELRDCCWVLCALLVFFSDGATDLWLAASYYLQNQHTYFSLTLLFVLLPSLVVQLLSFRWFVYDYSEPAGSPGPAVSTKDSVAGGAAISTKDSAGAFRTKEGSPEPGPQPAPSSASAYRRRCCRLCIWLLQTLVHLLQLGQVWRYLRALYLGLQSRWRGERLRRHFYWQMLFESADVSMLRLLETFLRSAPQLVLQLSLLVHRGGAPDLLPALSTSASLVSLAWTLASYQKVLRDSRDDKRPLSYKGAVAQVLWHLFSIAARGLAFALFASVYKLYFGIFIVAHWCVMTFWVIQGETDFCMSKWEEIIYNMVVGIIYIFCWFNVKEGRSRRRMTLYHCIVLLENAALTGFWYSSRNFSTDFYSLIMVCVVASSFALGIFFMCVYYCLLHPNGPMLGPQAPGCIFRKASEPCGPPADAITSPPRSLPRTTGAERDGASAGERAGTPTPPVFQVRPGLPPTPVARTLRTEGPVIRIDLPRKKYPAWDAHFIDRRLRKTILALEYSSPATPRLQYRSVGTSQELLEYETTV

SEQ ID NO: 2769 - protein, 702 aa, Homo sapiens
MTSRNQLVQKVLQELQEAVECEGLEGLIGASLEAKQVLSSFTLPTCREGGPGLQVLEVDSVALSLYPEDAPRNMLPLVCKGEGSLLFEAASMLLWGDAGLSLELRARTVVEMLLHRHYYLQGMIDSKVMLQAVRYSLCSEESPEMTSLPPATLEAIFDADVKASCFPSSFSNVWHLYALASVLQRNIYSIYPMRNLKIRPYFNRVIRPRRCDHVPSTLHIMWAGQPLTSHFFRHQYFAPVVGLEEVEAEGAPGVAPALPALAPLSSPAKTLELLNREPGLSYSHLCERYSVTKSTFYRWRRQSQEHRQKVAARFSAKHFLQDSFHRGGVVPLQQFLQRFPEISRSTYYAWKHELLGSGTCPALPPREVLGMEELEKLPEEQVAEEELECSALAVSSPGMVLMQRAKLYLEHCISLNTLVPYRCFKRRFPGISRSTYYNWRRKALRRNPSFKPAPALSAAGTPQLASVGEGAVIPWKSEAEEGAGNATGEDPPAPGELLPLRMPLSRWQRRLRRAARRQVLSGHLPFCRFRLRYPSLSPSAFWVWKSLARGWPRGLSKLQVPVPTLGKGGQEAEEKQEKEAGRDVTAVMAPPVGASSEDVEGGPSREGALQEGATAQGQPHSGPLLSQPVVAAAGGRDGRMLVMDMIATTKFKAQAKLFLQKRFQSKSFPSYKEFSALFPLTARSTYYMWKRALYDGLTLVDG

SEQ ID NO: 2770 - protein, 595 aa, Homo sapiens
MAALSPTFATSTQDSTCLQDSEFPVSSKDHSCPQNLDLFVCSGLEPHTPSVGSQESVTFQDVAVDFTEKEWPLLDSSQRKLYKDVMLENYSNLTSLGYQVGKPSLISHLEQEEEPRTEERGAHQGACADWETPSKTKWSLLMEDIFGKETPSGVTMERAGLGEKSTEYAHLFEVFGMDPHLTQPMGRHAGKRPYHRRDYGVAFKGRPHLTQHMSMYDGRKMHECHQCQKAFTTSASLTRHRRIHTGEKPYECSDCGKAFNDPSALRSHARTHLKEKPFDCSQCGNAFRTLSALKIHMRVHTGERPYKCDQCGKAYGRSCHLIAHKRTHTGERPYECHDCGKAFQHPSHLKEHVRNHTGEKPYACTQCGKAFRWKSNFNLHKKNHMVEKTYECKECGKSFGDLVSRRKHMRIHIVKKPVECRQCGKTFRNQSILKTHMNSHTGEKPYGCDLCGKAFSASSNLTAHRKIHTQERRYECAACGKVFGDYLSRRRHMSVHLVKKRVECRQCGKAFRNQSTLKTHMRSHTGEKPYECDHCGKAFSIGSNLNVHRRIHTGEKPYECLVCGKAFSDHSSLRSHVKTHRGEKLFVSSVWKRLQ

SEQ ID NO: 2771 - protein, 563 aa, Homo sapiens
MAALSPTFATSTQDSTCLQDSEFPVSSKDHSCPQNLDLFVCSGLEPHTPSVGSQESVTFQDVAVDFTEKEWPLLDSSQRKLYKDVMLENYSNLTSLDWETPSKTKWSLLMEDIFGKETPSGVTMERAGLGEKSTEYAHLFEVFGMDPHLTQPMGRHAGKRPYHRRDYGVAFKGRPHLTQHMSMYDGRKMHECHQCQKAFTTSASLTRHRRIHTGEKPYECSDCGKAFNDPSALRSHARTHLKEKPFDCSQCGNAFRTLSALKIHMRVHTGERPYKCDQCGKAYGRSCHLIAHKRTHTGERPYECHDCGKAFQHPSHLKEHVRNHTGEKPYACTQCGKAFRWKSNFNLHKKNHMVEKTYECKECGKSFGDLVSRRKHMRIHIVKKPVECRQCGKTFRNQSILKTHMNSHTGEKPYGCDLCGKAFSASSNLTAHRKIHTQERRYECAACGKVFGDYLSRRRHMSVHLVKKRVECRQCGKAFRNQSTLKTHMRSHTGEKPYECDHCGKAFSIGSNLNVHRRIHTGEKPYECLVCGKAFSDHSSLRSHVKTHRGEKLFVSSVWKRLQ

SEQ ID NO: 2772 - protein, 478 aa, Homo sapiens
MLENYSNLTSLDWETPSKTKWSLLMEDIFGKETPSGVTMERAGLGEKSTEYAHLFEVFGMDPHLTQPMGRHAGKRPYHRRDYGVAFKGRPHLTQHMSMYDGRKMHECHQCQKAFTTSASLTRHRRIHTGEKPYECSDCGKAFNDPSALRSHARTHLKEKPFDCSQCGNAFRTLSALKIHMRVHTGERPYKCDQCGKAYGRSCHLIAHKRTHTGERPYECHDCGKAFQHPSHLKEHVRNHTGEKPYACTQCGKAFRWKSNFNLHKKNHMVEKTYECKECGKSFGDLVSRRKHMRIHIVKKPVECRQCGKTFRNQSILKTHMNSHTGEKPYGCDLCGKAFSASSNLTAHRKIHTQERRYECAACGKVFGDYLSRRRHMSVHLVKKRVECRQCGKAFRNQSTLKTHMRSHTGEKPYECDHCGKAFSIGSNLNVHRRIHTGEKPYECLVCGKAFSDHSSLRSHVKTHRGEKLFVSSVWKRLQ

SEQ ID NO: 2773 - protein, 510 aa, Homo sapiens
MLENYSNLTSLGYQVGKPSLISHLEQEEEPRTEERGAHQGACADWETPSKTKWSLLMEDIFGKETPSGVTMERAGLGEKSTEYAHLFEVFGMDPHLTQPMGRHAGKRPYHRRDYGVAFKGRPHLTQHMSMYDGRKMHECHQCQKAFTTSASLTRHRRIHTGEKPYECSDCGKAFNDPSALRSHARTHLKEKPFDCSQCGNAFRTLSALKIHMRVHTGERPYKCDQCGKAYGRSCHLIAHKRTHTGERPYECHDCGKAFQHPSHLKEHVRNHTGEKPYACTQCGKAFRWKSNFNLHKKNHMVEKTYECKECGKSFGDLVSRRKHMRIHIVKKPVECRQCGKTFRNQSILKTHMNSHTGEKPYGCDLCGKAFSASSNLTAHRKIHTQERRYECAACGKVFGDYLSRRRHMSVHLVKKRVECRQCGKAFRNQSTLKTHMRSHTGEKPYECDHCGKAFSIGSNLNVHRRIHTGEKPYECLVCGKAFSDHSSLRSHVKTHRGEKLFVSSVWKRLQ

SEQ ID NO: 2774 - protein, 389 aa, Homo sapiens
MEDSPTMVRVDSPTMVRGENQVSPCQGRRCFPKALGYVTGDMKELANQLKDKPVVLQFIDWILRGISQVVFVNNPVSGILILVGLLVQNPWWALTGWLGTVVSTLMALLLSQDRSLIASGLYGYNATLVGVLMAVFSDKGDYFWWLLLPVCAMSMTCPIFSSALNSMLSKWDLPVFTLPFNMALSMYLSATGHYNPFFPAKLVIPITTAPNISWSDLSALELLKSIPVGVGQIYGCDNPWTGGIFLGAILLSSPLMCLHAAIGSLLGIAAGLSLSAPFEDIYFGLWGFNSSLACIAMGGMFMALTWQTHLLALGCALFTAYLGVGMANFMAEVGLPACTWPFCLATLLFLIMTTKNSNIYKMPLSKVTYPEENRIFYLQAKKRMVESPL

SEQ ID NO: 2775 - protein, 445 aa, Homo sapiens
MNGRSLIGGAGDARHGPVWKDPFGTKAGDAARRGIARLSLALADGSQEQEPEEEIAMEDSPTMVRVDSPTMVRGENQVSPCQGRRCFPKALGYVTGDMKELANQLKDKPVVLQFIDWILRGISQVVFVNNPVSGILILVGLLVQNPWWALTGWLGTVVSTLMALLLSQDRSLIASGLYGYNATLVGVLMAVFSDKGDYFWWLLLPVCAMSMTCPIFSSALNSMLSKWDLPVFTLPFNMALSMYLSATGHYNPFFPAKLVIPITTAPNISWSDLSALELLKSIPVGVGQIYGCDNPWTGGIFLGAILLSSPLMCLHAAIGSLLGIAAGLSLSAPFEDIYFGLWGFNSSLACIAMGGMFMALTWQTHLLALGCALFTAYLGVGMANFMAEVGLPACTWPFCLATLLFLIMTTKNSNIYKMPLSKVTYPEENRIFYLQAKKRMVESPL

SEQ ID NO: 2776 - protein, 2279 aa, Homo sapiens
MYRSSARSSVSSHRPKDDGGGGPRSGRSSGSSSGPARRSSPPPPPSGSSSRTPARRPRSPSGHRGRRASPSPPRGRRVSPSPPRARRGSPSPPRGRRLFPPGPAGFRGSSRGESRADYARDGRGDHPGDSGSRRRSPGLCSDSLEKSLRITVGNDHFCVSTPERRRLSDRLGSPVDNLEDMDRDDLTDDSVFTRSSQCSRGLERYISQEEGPLSPFLGQLDEDYRTKETFLHRSDYSPHISCHDELLRGTERNREKLKGYSIRSEERSREAKRPRYDDTVKINSMGGDHPSFTSGTRNYRQRRRSPSPRFLDPEFRELDLARRKREEEEERSRSLSQELVGVDGGGTGCSIPGLSGVLTASEPGYSLHRPEEVSVMPKKSILKKRIEVDIMEPSMQLESFSSSTSSSQDHPLYSGHPSLPLSGAIAAFASEIENKGTMVETALKEPQGNLYQWGPLPGIPKDNSPLREKFGSFLCHKDNLDLKAEGPERHTDFLLPHERASQDGSGFSRILSMLADSTSTQEKRRRSFPDIEDEEKFLYGDEEEDLKAESVPKPLGSSESEVMRQKASSLPSSAPAVKLESLEETNPEYAKIHDLLKTIGLDIGVAEISQLAARTQERLHGKKPSLRSSADRRSSVDRYFSADHCSSVDHRFSADRCSSVDHCFSADRRSSDPHRLESREAHHSNTHSPEVSHPHPPSPVDPYLLTKNSPPFLKSDHPVGHISGPEVVGSGFQSSVAVRCMLPSAPSAPIRLPHTAALSQFHMPRASQFAAARIPPNYQGPAIPPASFDAYRHYMAYAASRWPMYPTSQPSNHPVPEPHRIMPITKQATRSRPNLRVIPTVTPDKPKQKESLRGSIPAAQVPVQVSIPSLIRYNPEKISDEKNRASQKQKVIEEREKLKNDREARQKKMYYLRTELERLHKQQGEMLRKKRREKDGHKDPLLVEVSRLQDNIMKDIAELRQEAEEAEKKQSELDKVAQILGINIFDKSQKSLSDSREPTEKPGKAEKSKSPEKVSSFSNSSSNKESKVNNEKFRTKSPKPAESPQSATKQLDQPTAAYEYYDAGNHWCKDCNTICGTMFDFFTHMHNKKHTQTLDPYNRPWASKTQSEAKQDAIKRTDKITVPAKGSEFLVPISGFYCQLCEEFLGDPISGEQHVKGHQHNEKYKKYVDENPLYEERRNLDRQAGLAVVLETERRRQSELKRKLSEKPKEEKKEKKAKAVKEVKEDDKVSEKLEDQLSEGRNSPEKAENKRNTGIKLQLKEEVKKESPTSSSFGKFSWKKPEKEEEKSSLVTPSISKEEILESSKDKEDGKTEAGKAKPIKIKLSGKTVVAHTSPWMPVVTTSTQTKIRPNLPIPSTVLRKSCSATMSKPAPLNTFLSIKSSGTTAKPLPVVKESSADLLLPPDIISKAFGGEEVILKGSPEEKVVLAEKSEPSHLPEQILPPPPPPPPPPPPPPPVIPHPAAPSAAQANAILAPVKSNPVVSQTLSPGFVGPNILNPVLPVAIMASAQPAAIPSDETAPGVSESDRDQTLFSVLVRPPPPLSSVFSEQAKKLEKRNSCLATANAKDLYDIFYSSGGKGAPETKGAPETKLSGGPLANGENSNLSRTKSSDTSSTSPLNSSASQEELHQDEGLVAAPIVSNSEKPIAKTLVALGKWSVVEHVGPKSTGSTYGFLQPLTRLCQSRPYETITPKTDTLAIWTSSSFQSDTSRDISPEKSELDLGEPGPPGVEPPPQLLDIQCKESQKLVEIHLRESVNQDKESQELRKSEDCRESEIETNTELKERVKELSEGIVDEGVSTSIGPHSIDDSNLNHGNRYMWEGEVKQPNLLMIDKEAEQSNKLMTGSETPSKVVIKLSPQACSFTKAKLDSFLSEARSLLNPQDTPVKISAPELLLHSPARSAMCLTGSPQEQGVSVVSEEGLENSAPESASRTSRYRSLKLKRERSKDFQVKKIYELAVWDENKKRPETWESPEKPKTEALELQDVHPELTVTIESKALEDFEATDLKVEELTALGNLGDMPVDFCTTRVSPAHRSPTVLCQKVCEENSVSPIGCNSSDPADFEPIPSFSGFPLDSPKTLVLDFETEGERNSPNPRSVRIPSPNILKTGLTENVDRGLGGLEGTHQALDLLAGGMMPEEVKESSQLDKQESLGLELKTINSAGLGPSPCLPDLVDFVTRTSGVQKDKLCSPLSEPGDPSKCSSLELGPLQLEISNASTTEVAILQVDDDSGDPLNLVKAPVSRSPPREQVIEDNMVPQGMPEQETTVGAIQDHTESSVHN

SEQ ID NO: 2777 - protein, 1117 aa, Homo sapiens
MYRSSARSSVSSHRPKDDGGGGPRSGRSSGSSSGPARRSSPPPPPSGSSSRTPARRPRSPSGHRGRRASPSPPRGRRVSPSPPRARRGSPSPPRGRRLFPPGPAGFRGSSRGESRADYARDGRGDHPGDSGSRRRSPGLCSDSLEKSLRITVGNDHFCVSTPERRRLSDRLGSPVDNLEDMDRDDLTDDSVFTRSSQCSRGLERYISQEEGPLSPFLGQLDEDYRTKETFLHRSDYSPHISCHDELLRGTERNREKLKGYSIRSEERSREAKRPRYDDTVKINSMGGDHPSFTSGTRNYRQRRRSPSPRFLDPEFRELDLARRKREEEEERSRSLSQELVGVDGGGTGCSIPGLSGVLTASEPGYSLHRPEEVSVMPKKSILKKRIEVDIMEPSMQLESFSSSTSSSQDHPLYSGHPSLPLSGAIAAFASEIENKGTMVETALKEPQGNLYQWGPLPGIPKDNSPLREKFGSFLCHKDNLDLKAEGPERHTDFLLPHERASQDGSGFSRILSMLADSTSTQEKRRRSFPDIEDEEKFLYGDEEEDLKAESVPKPLGSSESEVMRQKASSLPSSAPAVKLESLEETNPEYAKIHDLLKTIGLDIGVAEISQLAARTQERLHGKKPSLRSSADRRSSVDRYFSADHCSSVDHRFSADRCSSVDHCFSADRRSSDPHRLESREAHHSNTHSPEVSHPHPPSPVDPYLLTKNSPPFLKSDHPVGHISGPEVVGSGFQSSVAVRCMLPSAPSAPIRLPHTAALSQFHMPRASQFAAARIPPNYQGPAIPPASFDAYRHYMAYAASRWPMYPTSQPSNHPVPEPHRIMPITKQATRSRPNLRVIPTVTPDKPKQKESLRGSIPAAQVPVQVSIPSLIRYNPEKISDEKNRASQKQKVIEEREKLKNDREARQKKMYYLRTELERLHKQQGEMLRKKRREKDGHKDPLLVEVSRLQDNIMKDIAELRQEAEEAEKKQSELDKVAQILGINIFDKSQKSLSDSREPTEKPGKAEKSKSPEKVSSFSNSSSNKESKVNNEKFRTKSPKPAESPQSATKQLDQPTAAYEYYDAGNHWCKDCNTICGTMFDFFTHMHNKKHTQGQFQKSSDFQKEGLQQTFLPPERQG

SEQ ID NO: 2778 - protein, 383 aa, Homo sapiens
MDRTCEERPAEDGSDEEDPDSMEAPTRIRDTPEDIVLEAPASGLAFHPARDLLAAGDVDGDVFVFSYSCQEGETKELWSSGHHLKACRAVAFSEDGQKLITVSKDKAIHVLDVEQGQLERRVSKAHGAPINSLLLVDENVLATGDDTGGICLWDQRKEGPLMDMRQHEEYIADMALDPAKKLLLTASGDGCLGIFNIKRRRFELLSEPQSGDLTSVTLMKWGKKVACGSSEGTIYLFNWNGFGATSDRFALRAESIDCMVPVTESLLCTGSTDGVIRAVNILPNRVVGSVGQHTGEPVEELALSHCGRFLASSGHDQRLKFWDMAQLRAVVVDDYRRRKKKGGPLRALSSKTWSTDDFFAGLREEGEDSMAQEEKEETGDDSD

SEQ ID NO: 2779 - protein, 165 aa, Homo sapiens
MKWGKKVACGSSEGTIYLFNWNGFGATSDRFALRAESIDCMVPVTESLLCTGSTDGVIRAVNILPNRVVGSVGQHTGEPVEELALSHCGRFLASSGHDQRLKFWDMAQLRAVVVDDYRRRKKKGGPLRALSSKTWSTDDFFAGLREEGEDSMAQEEKEETGDDSD

SEQ ID NO: 2780 - protein, 509 aa, Homo sapiens
MALSQGLLTFRDVAIEFSQEEWKCLDPAQRTLYRDVMLENYRNLVSLDISSKCMMNTLSSTGQGNTEVIHTGTLQRQASYHIGAFCSQEIEKDIHDFVFQWQEDETNDHEAPMTEIKKLTSSTDRYDQRHAGNKPIKGQLESRFHLHLRRHRRIHTGEKPYKCEECEKVFSCKSHLEIHRIIHTGEKPYKCKVCDKAFKHDSHLAKHTRIHRGDKHYTCNECGKVFDQKATLACHHRSHTGEKPYKCNECGKTFSQTSHLVYHHRLHTGEKPYKCNECGKTFARNSVLVIHKAVHTAEKPYKCNECGKVFKQRATLAGHRRVHTGEKPYRCEECDKVFSRKSHLERHRRIHTGEKPYKCKVCDKAFRSDSRLAEHQRVHTGERPYTCNECGKVFSTKAYLACHQKLHTGEKLYECEECDKVYIRKSHLERHRRIHTGEKPHKCGDCGKAFNSPSHLIRHQRIHTGQKSYKCHQCGKVFSLRSLLAEHQKIPFGDNCFKCNEYSKPSSIN

SEQ ID NO: 2781 - protein, 766 aa, Homo sapiens
MASDTPESLMALCTDFCLRNLDGTLGYLLDKETLRLHPDIFLPSEICDRLVNEYVELVNAACNFEPHESFFSLFSDPRSTRLTRIHLREDLVQDQDLEAIRKQDLVELYLTNCEKLSAKSLQTLRSFSHTLVSLSLFGCTNIFYEEENPGGCEDEYLVNPTCQVLVKDFTFEGFSRLRFLNLGRMIDWVPVESLLRPLNSLAALDLSGIQTSDAAFLTQWKDSLVSLVLYNMDLSDDHIRVIVQLHKLRHLDISRDRLSSYYKFKLTREVLSLFVQKLGNLMSLDISGHMILENCSISKMEEEAGQTSIEPSKSSIIPFRALKRPLQFLGLFENSLCRLTHIPAYKVSGDKNEEQVLNAIEAYTEHRPEITSRAINLLFDIARIERCNQLLRALKLVITALKCHKYDRNIQVTGSAALFYLTNSEYRSEQSVKLRRQVIQVVLNGMESYQEVTVQRNCCLTLCNFSIPEELEFQYRRVNELLLSILNPTRQDESIQRIAVHLCNALVCQVDNDHKEAVGKMGFVVTMLKLIQKKLLDKTCDQVMEFSWSALWNITDETPDNCEMFLNFNGMKLFLDCLKEFPEKQELHRNMLGLLGNVAEVKELRPQLMTSQFISVFSNLLESKADGIEVSYNACGVLSHIMFDGPEAWGVCEPQREEVEERMWAAIQSWDINSRRNINYRSFEPILRLLPQGISPVSQHWATWALYNLVSVYPDKYCPLLIKEGGMPLLRDIIKMATARQETKEMARKVIEHCSNFKEENMDTSR

SEQ ID NO: 2782 - protein, 414 aa, Homo sapiens
MRVGGAFHLLLVCLSPALLSAVRINGDGQEVLYLAEGDNVRLGCPYVLDPEDYGPNGLDIEWMQVNSDPAHHRENVFLSYQDKRINHGSLPHLQQRVRFAASDPSQYDASINLMNLQVSDTATYECRVKKTTMATRKVIVTVQARPAVPMCWTEGHMTYGNDVVLKCYASGGSQPLSYKWAKISGHHYPYRAGSYTSQHSYHSELSYQESFHSSINQGLNNGDLVLKDISRADDGLYQCTVANNVGYSVCVVEVKVSDSRRIGVIIGIVLGSLLALGCLAVGIWGLVCCCCGGSGAGGARGAFGYGNGGGVGGGACGDLASEIREDAVAPGCKASGRGSRVTHLLGYPTQNVSRSLRRKYAPPPCGGPEDVALAPCTAAAACEAGPSPVYVKVKSAEPADCAEGPVQCKNGLLV

SEQ ID NO: 2783 - protein, 402 aa, Homo sapiens
MYTSEEKCNQRTQKRKIYNVCPRKGKKIFIHMHEIIQIDGHIYQCLECKQNFCENLALIMCERTHTGEKPYKCDMCEKTFVQSSDLTSHQRIHNYEKPYKCSKCEKSFWHHLALSGHQRTHAGKKFYTCDICGKNFGQSSDLLVHQRSHTGEKPYLCSECDKCFSRSTNLIRHRRTHTGEKPFKCLECEKAFSGKSDLISHQRTHTGERPYKCNKCEKSYRHRSAFIVHKRVHTGEKPYKCGACEKCFGQKSDLIVHQRVHTGEKPYKCLECMRSFTRSANLIRHQATHTHTFKCLEYEKSFNCSSDLIVHQRIHMEEKPHQWSACESGFLLGMDFVAQQKMRTQTEELHYKYTVCDKSFHQSSALLQHQTVHIGEKPFVCNVSEKGLELSPPHASEASQMS

SEQ ID NO: 2784 - protein, 330 aa, Homo sapiens
MATKESRDAKAQLALSSSANQSKEVPENPNYALKCTLVGHTEAVSSVKFSPNGEWLASSSADRLIIIWGAYDGKYEKTLYGHNLEISDVAWSSDSSRLVSASDDKTLKLWDVRSGKCLKTLKGHSNYVFCCNFNPPSNLIISGSFDETVKIWEVKTGKCLKTLSAHSDPVSAVHFNCSGSLIVSGSYDGLCRIWDAASGQCLKTLVDDDNPPVSFVKFSPNGKYILTATLDNTLKLWDYSRGRCLKTYTGHKNEKYCIFANFSVTGGKWIVSGSEDNLVYIWNLQTKEIVQKLQGHTDVVISAACHPTENLIASAALENDKTIKLWMSNH

SEQ ID NO: 2785 - protein, 554 aa, Homo sapiens [sequence omitted]

SEQ ID NO: 2786 - protein, 916 aa, Homo sapiens
MESGQPARRIAMAPLLEYERQLVLELLDTDGLVVCARGLGADRLLYHFLQLHCHPACLVLVLNTQPAEEEYFINQLKIEGVEHLPRRVTNEITSNSRYEVYTQGGVIFATSRILVVDFLTDRIPSDLITGILVYRAHRIIESCQEAFILRLFRQKNKRGFIKAFTDNAVAFDTGFCHVERVMRNLFVRKLYLWPRFHVAVNSFLEQHKPEVVEIHVSMTPTMLAIQTAILDILNACLKELKCHNPSLEVEDLSLENAIGKPFDKTIRHYLDPLWHQLGAKTKSLVQDLKILRTLLQYLSQYDCVTFLNLLESLRATEKAFGQNSGWLFLDSSTSMFINARARVYHLPDAKMSKKEKISEKMEIKEGEETKKELVLESNPKWEALTEVLKEIEAENKESEALGGPGQVLICASDDRTCSQLRDYITLGAEAFLLRLYRKTFEKDSKAEEVWMKFRKEDSSKRIRKSHKRPKDPQNKERASTKERTLKKKKRKLTLTQMVGKPEELEEEGDVEEGYRREISSSPESCPEEIKHEEFDVNLSSDAAFGILKEPLTIIHPLLGCSDPYALTRVLHEVEPRYVVLYDAELTFVRQLEIYRASRPGKPLRVYFLIYGGSTEEQRYLTALRKEKEAFEKLIREKASMVVPEEREGRDETNLDLVRGTASADVSTDTRKAGGQEQNGTQQSIVVDMREFRSELPSLIHRRGIDIEPVTLEVGDYILTPEMCVERKSISDLIGSLNNGRLYSQCISMSRYYKRPVLLIEFDPSKPFSLTSRGALFQEISSNDISSKLTLLTLHFPRLRILWCPSPHATAELFEELKQSKPQPDAATALAITADSETLPESEKYNPGPQDFLLKMPGVNAKNCRSLMHHVKNIAELAALSQDELTSILGNAANAKQLYDFIHTSFAEVVSKGKGKK

SEQ ID NO: 2787 - protein, 372 aa, Homo sapiens
MESGQPARRIAMAPLLEYERQLVLELLDTDGLVVCARGLGADRLLYHFLQLHCHPACLVLVLNTQPAEEEYFINQLKIEGVEHLPRRVTNEITSNSRYEVYTQGGVIFATSRILVVDFLTDRIPSDLITGILVYRAHRIIESCQEAFILRLFRQKNKRGFIKAFTDNAVAFDTGFCHVERVMRNLFVRKLYLWPRFHVAVNSFLEQHKPEVVEIHVSMTPTMLAIQTAILDILNACLKELKCHNPSLEVEDLSLENAIGKPFDKTIRHYLDPLWHQLGAKTKSLVQDLKILRTLLQYLSQYDCVTFLNLLESLRATEKAFGQNSGWLFLDSSTSMFINARARVYHLPDAKMSKKEKISEKMEIKEGEGILWG

SEQ ID NO: 2788 - protein, 524 aa, Homo sapiens
MKEESAAQLGCCHRPMALGGTGGSLSPSLDFQLFRGDQVFSACRPLPDMVDAHGPSCASWLCPLPLAPGRSALLACLQDLDLNLCTPQPAPLGTDLQGLQEDALSMKHEPPGLQASSTDDKKFTVKYPQNKDKLGKQPERAGEGAPCPAFSSHNSSSPPPLQNRKSPSPLAFCPCPPVNSISKELPFLLHAFYPGYPLLLPPPHLFTYGALPSDQCPHLLMLPQDPSYPTMAMPSLLMMVNELGHPSARWETLLPYPGAFQASGQALPSQARNPGAGAAPTDSPGLERGGMASPAKRVPLSSQTGTAALPYPLKKKNGKILYECNICGKSFGQLSNLKVHLRVHSGERPFQCALCQKSFTQLAHLQKHHLVHTGERPHKCSIPWVPGRNHWKSFQAWREREVCHKRFSSSSNLKTHLRLHSGARPFQCSVCRSRFTQHIHLKLHHRLHAPQPCGLVHTQLPLASLACLAQWHQGALDLMAVASEKHMGYDIDEVKVSSTSQGKARAVSLSSAGTPLVMGQDQNN

SEQ ID NO: 2789 - protein, 504 aa, Homo sapiens
MKEESAAQLGCCHRPMALGGTGGSLSPSLDFQLFRGDQVFSACRPLPDMVDAHGPSCASWLCPLPLAPGRSALLACLQDLDLNLCTPQPAPLGTDLQGLQEDALSMKHEPPGLQASSTDDKKFTVKYPQNKDKLGKQPERAGEGAPCPAFSSHNSSSPPPLQNRKSPSPLAFCPCPPVNSISKELPFLLHAFYPGYPLLLPPPHLFTYGALPSDQCPHLLMLPQDPSYPTMAMPSLLMMVNELGHPSARWETLLPYPGAFQASGQALPSQARNPGAGAAPTDSPGLERGGMASPAKRVPLSSQTGTAALPYPLKKKNGKILYECNICGKSFGQLSNLKVHLRVHSGERPFQCALCQKSFTQLAHLQKHHLVHTGERPHKCSVCHKRFSSSSNLKTHLRLHSGARPFQCSVCRSRFTQHIHLKLHHRLHAPQPCGLVHTQLPLASLACLAQWHQGALDLMAVASEKHMGYDIDEVKVSSTSQGKARAVSLSSAGTPLVMGQDQNN

SEQ ID NO: 2790 - protein, 510 aa, Homo sapiens
MAAAALRDPAQVPVAADLLTDHEEGYVTFEDVAVYFSQEEWRLLDDAQRLLYRNVMLENFTLLASLGLASSKTHEITQLESWEEPFMPAWEVVTSAIPRGCWHGAEAEEAPEQIASVGLLSSNIQQHQKQHCGEKPLKRQEGRVPVLRSCKVHLSEKSLQSREVGKALLISSGVLKHQVTHTGEKSHRSSKSREAFHAGKRHYKCSECGKAFGQKYLLVQHQRLHAGKKTYECSECGKLFRDMSNLFIHQIVHTGERPYGCSNCGKSFSRNAHLIEHQRVHTGEKPFTCSECGKAFRHNSTLVQHHKIHTGVRPYECSECGKLFSFNSSLMKHQRIHTGERPYKCSECGKFYSHKSNLIKHWRVHTGERPYKCSDCGKFFTQCSSLMQHQKVHTGEKPFKCNECGRFFRENSTLVRHQRVHTGAKPYECRECGKFFSQSSTLMQHRKVHIGEKPFKCNECGRLFRENSSLVKHQRVHTGAKPYECRECGKFFRHNSSLFKHRRIHTGEMQ

SEQ ID NO: 2791 - protein, 478 aa, Homo sapiens
MAAAALRDPAQVPVAADLLTDHEEQGYVTFEDVAVYFSQEEWRLLDDAQRLLYRNVMLENFTLLASLGCWHGAEAEEAPEQIASVGLLSSNIQQHQKQHCGEKPLKRQEGRVPVLRSCKVHLSEKSLQSREVGKALLISSGVLKHQVTHTGEKSHRSSKSREAFHAGKRHYKCSECGKAFGQKYLLVQHQRLHAGKKTYECSECGKLFRDMSNLFIHQIVHTGERPYGCSNCGKSFSRNAHLIEHQRVHTGEKPFTCSECGKAFRHNSTLVQHHKIHTGVRPYECSECGKLFSFNSSLMKHQRIHTGERPYKCSECGKFYSHKSNLIKHWRVHTGERPYKCSDCGKFFTQCSSLMQHQKVHTGEKPFKCNECGRFFRENSTLVRHQRVHTGAKPYECRECGKFFSQSSTLMQHRKVHIGEKPFKCNECGRLFRENSSLVKHQRVHTGAKPYECRECGKFFRHNSSLFKHRRIHTGEMQ

SEQ ID NO: 2792 - protein, 497 aa, Homo sapiens
MAAAALRDPAQGYVTFEDVAVYFSQEEWRLLDDAQRLLYRNVMLENFTLLASLGLASSKTHEITQLESWEEPFMPAWEVVTSAIPRGCWHGAEAEEAPEQIASVGLLSSNIQQHQKQHCGEKPLKRQEGRVPVLRSCKVHLSEKSLQSREVGKALLISSGVLKHQVTHTGEKSHRSSKSREAFHAGKRHYKCSECGKAFGQKYLLVQHQRLHAGKKTYECSECGKLFRDMSNLFIHQIVHTGERPYGCSNCGKSFSRNAHLIEHQRVHTGEKPFTCSECGKAFRHNSTLVQHHKIHTGVRPYECSECGKLFSFNSSLMKHQRIHTGERPYKCSECGKFYSHKSNLIKHWRVHTGERPYKCSDCGKFFTQCSSLMQHQKVHTGEKPFKCNECGRFFRENSTLVRHQRVHTGAKPYECRECGKFFSQSSTLMQHRKVHIGEKPFKCNECGRLFRENSSLVKHQRVHTGAKPYECRECGKFFRHNSSLFKHRRIHTGEMQ

SEQ ID NO: 2793 - protein, 498 aa, Homo sapiens
MAAAALRDPAQQGYVTFEDVAVYFSQEEWRLLDDAQRLLYRNVMLENFTLLASLGLASSKTHEITQLESWEEPFMPAWEVVTSAIPRGCWHGAEAEEAPEQIASVGLLSSNIQQHQKQHCGEKPLKRQEGRVPVLRSCKVHLSEKSLQSREVGKALLISSGVLKHQVTHTGEKSHRSSKSREAFHAGKRHYKCSECGKAFGQKYLLVQHQRLHAGKKTYECSECGKLFRDMSNLFIHQIVHTGERPYGCSNCGKSFSRNAHLIEHQRVHTGEKPFTCSECGKAFRHNSTLVQHHKIHTGVRPYECSECGKLFSFNSSLMKHQRIHTGERPYKCSECGKFYSHKSNLIKHWRVHTGERPYKCSDCGKFFTQCSSLMQHQKVHTGEKPFKCNECGRFFRENSTLVRHQRVHTGAKPYECRECGKFFSQSSTLMQHRKVHIGEKPFKCNECGRLFRENSSLVKHQRVHTGAKPYECRECGKFFRHNSSLFKHRRIHTGEMQ

SEQ ID NO: 2794 - protein, 511 aa, Homo sapiens
MAAAALRDPAQVPVAADLLTDHEEQGYVTFEDVAVYFSQEEWRLLDDAQRLLYRNVMLENFTLLASLGLASSKTHEITQLESWEEPFMPAWEVVTSAIPRGCWHGAEAEEAPEQIASVGLLSSNIQQHQKQHCGEKPLKRQEGRVPVLRSCKVHLSEKSLQSREVGKALLISSGVLKHQVTHTGEKSHRSSKSREAFHAGKRHYKCSECGKAFGQKYLLVQHQRLHAGKKTYECSECGKLFRDMSNLFIHQIVHTGERPYGCSNCGKSFSRNAHLIEHQRVHTGEKPFTCSECGKAFRHNSTLVQHHKIHTGVRPYECSECGKLFSFNSSLMKHQRIHTGERPYKCSECGKFYSHKSNLIKHWRVHTGERPYKCSDCGKFFTQCSSLMQHQKVHTGEKPFKCNECGRFFRENSTLVRHQRVHTGAKPYECRECGKFFSQSSTLMQHRKVHIGEKPFKCNECGRLFRENSSLVKHQRVHTGAKPYECRECGKFFRHNSSLFKHRRIHTGEMQ

SEQ ID NO: 2795 - protein, 464 aa, Homo sapiens
MAAAALRDPAQGYVTFEDVAVYFSQEEWRLLDDAQRLLYRNVMLENFTLLASLGCWHGAEAEEAPEQIASVGLLSSNIQQHQKQHCGEKPLKRQEGRVPVLRSCKVHLSEKSLQSREVGKALLISSGVLKHQVTHTGEKSHRSSKSREAFHAGKRHYKCSECGKAFGQKYLLVQHQRLHAGKKTYECSECGKLFRDMSNLFIHQIVHTGERPYGCSNCGKSFSRNAHLIEHQRVHTGEKPFTCSECGKAFRHNSTLVQHHKIHTGVRPYECSECGKLFSFNSSLMKHQRIHTGERPYKCSECGKFYSHKSNLIKHWRVHTGERPYKCSDCGKFFTQCSSLMQHQKVHTGEKPFKCNECGRFFRENSTLVRHQRVHTGAKPYECRECGKFFSQSSTLMQHRKVHIGEKPFKCNECGRLFRENSSLVKHQRVHTGAKPYECRECGKFFRHNSSLFKHRRIHTGEMQ

SEQ ID NO: 2796 - protein, 962 aa, Homo sapiens
MDEQALLGLNPNADSDFRQRALAYFEQLKISPDAWQVCAEALAQRTYSDDHVKFFCFQVLEHQVKYKYSELTTVQQQLIRETLISWLQAQMLNPQPEKTFIRNKAAQVFALLFVTEYLTKWPKFFFDILSVVDLNPRGVDLYLRILMAIDSELVDRDVVHTSEEARRNTLIKDTMREQCIPNLVESWYQILQNYQFTNSEVTCQCLEVVGAYVSWIDLSLIANDRFINMLLGHMSIEVLREEACDCLFEVVNKGMDPVDKMKLVESLCQVLQSAGFFSIDQEEDVDFLARFSKLVNGMGQSLIVSWSKLIKNGDIKNAQEALQAIETKVALMLQLLIHEDDDISSNIIGFCYDYLHILKQLTVLSDQQKANVEAIMLAVMKKLTYDEEYNFENEGEDEAMFVEYRKQLKLLLDRLAQVSPELLLASVRRVFSSTLQNWQTTRFMEVEVAIRLLYMLAEALPVSHGAHFSGDVSKASALQDMMRTLVTSGVSSYQHTSVTLEFFETVVRYEKFFTVEPQHIPCVLMAFLDHRGLRHSSAKVRSRTAYLFSRFVKSLNKQMNPFIEDILNRIQDLLELSPPENGHQSLLSSDDQLFIYETAGVLIVNSEYPAERKQALMRNLLTPLMEKFKILLEKLMLAQDEERQASLADCLNHAVGFASRTSKAFSNKQTVKQCGCSEVYLDCLQTFLPALSCPLQKDILRSGVRTFLHRMIICLEEEVLPFIPSASEHMLKDCEAKDLQEFIPLINQITAKFKIQVSPFLQQMFMPLLHAIFEVLLRPAEENDQSAALEKQMLRRSYFAFLQTVTGSGMSEVIANQGAENVERVLVTVIQGAVEYPDPIAQKTCFIILSKLVELWGGKDGPVGFADFVYKHIVPACFLAPLKQTFDLADAQTVLALSECAVTLKTIHLKRGPECVQYLQQEYLPSLQVAPEIIQEFCQALQQPDAKVFKNYLKVFFQRAKP

SEQ ID NO: 2797 - protein, 502 aa, Homo sapiens
MSGGPMGGRPGGRGAPAVQQNIPSTLLQDHENQRLFEMLGRKCLTLATAVVQLYLALPPGAEHWTKEHCGAVCFVKDNPQKSYFIRLYGLQAGRLLWEQELYSQLVYSTPTPFFHTFAGDDCQAGLNFADEDEAQAFRALVQEKIQKRNQRQSGDRRQLPPPPTPANEERRGGLPPLPLHPGGDQGGPPVGPLSLGLATVDIQNPDITSSRYRGLPAPGPSPADKKRSGKKKISKADIGAPSGFKHVSHVGWDPQNGFDVNNLDPDLRSLFSRAGISEAQLTDAETSKLIYDFIEDQGGLEAVRQEMRRQEPLPPPPPPSRGGNQLPRPPIVGGNKGRSGPLPPVPLGIAPPPPTPRGPPPPGRGGPPPPPPPATGRSGPLPPPPPGAGGPPMPPPPPPPPPPPSSGNGPAPPPLPPALVPAGGLAPGGGRGALLDQIRQGIQLNKTPGAPESSALQPPPQSSEGLVGALMHVMQKRSRAIHSSDEGEDQAGDEDEDDEWDD

SEQ ID NO: 2798 - protein, 830 aa, Homo sapiens
MVEEENIRVVRCGGSELNFRRAVFSADSKYIFCVSGDFVKVYSTVTEECVHILHGHRNLVTGIQLNPNNHLQLYSCSLDGTIKLWDYIDGILIKTFIVGCKLHALFTLAQAEDSVFVIVNKEKPDIFQLVSVKLPKSSSQEVEAKELSFVLDYINQSPKCIAFGNEGVYVAAVREFYLSVYFFKKKTTSRFTLSSSRNKKHAKNNFTCVACHPTEDCIASGHMDGKIRLWRNFYDDKKYTYTCLHWHHDMVMDLAFSVTGTSLLSGGRESVLVEWRDATEKNKEFLPRLGATIEHISVSPAGDLFCTSHSDNKIIIIHRNLEASAVIQGLVKDRSIFTGLMIDPRTKALVLNGKPGHLQFYSLQSDKQLYNLDIIQQEYINDYGLIQIELTKAAFGCFGNWLATVEQRQEKETELELQMKLWMYNKKTQGFILNTKINMPHEDCITALCFCNAEKSEQPTLVTASKDGYFKVWILTDDSDIYKKAVGWTCDFVGSYHKYQATNCCFSEDGSLLAVSFEEIVTIWDSVTWELKCTFCQRAGKIRHLCFGRLTCSKYLLGATENGILCCWNLLSCALEWNAKLNVRVMEPDPNSENIAAISQSSVGSDLFVFKPSEPRPLYIQKGISREKVQWGVFVPRDVPESFTSEAYQWLNRSQFYFLTKSQSLLTFSTKSPEEKLTPTSKQLLAEESLPTTPFYFILGKHRQQQDEKLNETLENELVQLPLTENIPAISELLHTPAHVLPSAAFLCSMFVNSLLLSKETKSAKEIPEDVDMEEEKESEDSDEENDFTEKVQDTSNTGLGEDIIHQLSKSEEKELRKFRKIDYSWIAAL

SEQ ID NO: 2799 - protein, 525 aa, Homo sapiens
MATLLRSKLSNVATSVSNKSQAKMSGMFARMGFQAATDEEAVGFAHCDDLDFEHRQGLQMDILKAEGEPCGDEGAEAPVEGDIHYQRGSGAPLPPSGSKDQVGGGGEFGGHDKPKITAWEAGWNVTNAIQGMFVLGLPYAILHGGYLGLFLIIFAAVVCCYTGKILIACLYEENEDGEVVRVRDSYVAIANACCAPRFPTLGGRVVNVAQIIELVMTCILYVVVSGNLMYNSFPGLPVSQKSWSIIATAVLLPCAFLKNLKAVSKFSLLCTLAHFVINILVIAYCLSRARDWAWEKVKFYIDVKKFPISIGIIVFSYTSQIFLPSLEGNMQQPSEFHCMMNWTHIAACVLKGLFALVAYLTWADETKEVITDNLPGSIRAVVNIFLVAKALLSYPLPFFAAVEVLEKSLFQEGSRAFFPACYSGDGRLKSWGLTLRCALVVFTLLMAIYVPHFALLMGLTGSLTGAGLCFLLPSLFHLRLLWRKLLWHQVFFDVAIFVIGGICSVSGFVHSLEGLIEAYRTNAED

SEQ ID NO: 2800 - protein, 107 aa, Homo sapiens
MWLSPWSTCPPHPLPSCLTACCSPAHQPVRGSAQPPASDLCTCVTCCSGPHPNYPPAHLLPTSSLPICPGLICCLLTCLLVDCFSALLSACETRDLSPWKARRVLLR

SEQ ID NO: 2801 - protein, 364 aa, Homo sapiens
MSEVEAAAGATAVPAATVPATAAGVVAVVVPVPAGEPQKGGGAGGGGGAASGPAAGTPSAPGSRTPGNPATAVSGTPAPPARSQADKPVLAIQVLGTVKWFNVRNGYGFINRNDTKEDVFVHQTAIKRNNPRKFLRSVGDGETVEFDVVEGEKGAEATNVTGPGGVPVKGSRYAPNRRKSRRFIPRPPSVAPPPMVAEIPSAGTGPGSKGERAEDSGQRPRRWCPPPFFYRRRFVRGPRPPNQQQPIEGTDRVEPKETAPLEGHQQQGDERVPPPRFRPRYRRPFRPRPRQQPTTEGGDGETKPSQGPADGSRPEPQRPRNRPYFQRRRQQAPGPQQAPGPRQPAAPETSAPVNSGDPTTTILE

SEQ ID NO: 2802 - protein, 163 aa, Homo sapiens
MFLHSGPARGPCTAAGRSASVRVPVQVAHELQGPDAIVFGAEVEQVHLVANELDAGRVQLLLAQGVAAAVLLVQVVMGEELGEQGHQQARGEVADGQAALLDTAKMLVAEQAVGAGQLQVGLGISNLSKSIGTSQIFLERHRSPLKLSSTLITEMSSGRLEEL

SEQ ID NO: 2803 - protein, 311 aa, Homo sapiens
MLSARNSMMFGHLSPVRIPRLRGKFNLQLPSLDEQVIPARLLKMEVRAEEPKEATEVKDQVETQGQEDNKMGPCSNGEAASTSRPLETQGNLTSSWYNPRPLEGNVHLKSLTEKNQTDKAQVHAVSFYSKGHGVASSHSPAGGILPFGKPDPLPTVLPAPVPGCSLWPEKAALKVLGKDHLPSSPGLLMVGEDMQPKDPAVLGSSRSSPPRAAGHRSRKRKLSGPPLQLQLTPPLQLRWDRDGGPPPAKLPCLSPEALLVGQASQREGRLQQGNMRKNMRVLSRTSKFRRRKQLLRRRKKTRQGRRGGSCL

SEQ ID NO: 2804 - protein, 514 aa, Homo sapiens
MDLANHGLILLQQLNAQREFGFLCDCTVAIGDVYFKAHKSVLASFSNYFKMLFVHQTSECVRLKPTDIQPDIFSYLLHLMYTGKMAPQLIDPVRLEQGIKFLHAYPLIQEASLASQGAFSHPDQVFPLASSLYGIQIADHQLRQATKIASAPEKLGRDPRPQTSRISQEQVPEASQLSQLTSNLAQVNRTNMTPSDPLQTSLSPELVSTPVPPPPPGEETNLEASSSDEQPASLTIAHVKPSIMKRNGSFPKYYACHLCGRRFTLRSSLREHLQIHTGVPFTSSQQGESRVPLTLCSNAADLGKDAMEVPEAGMISDSELQHISDSPIIDGQQQSETPPPSDIADIDNLEQADQEREVKRRKYECTICGRKFIQKSHWREHMYIHTGKPFKCSTCDKSFCRANQAARHVCLNQSIDTYTMVDKQTLELCTFEEGSQMDNMLVQTNKPYKCNLCDKTFSTPNEVVKHSCQNQNSDVFALDEGRSILLGSGDSEVTEPDHPVLASIKKEQETVLLD

SEQ ID NO: 2805 - protein, 372 aa, Homo sapiens
MSGRSGKKKMSKLSRSARAGVIFPVGRLMRYLKKGTFKYRISVGAPVYMAAVIEYLAAEILELAGNAARDNKKARIAPRHILLAVANDEELNQLLKGVTIASGGVLPRIHPELLAKKRGTKGKSETILSPPPEKRGRKATSGKKGGKKSKAAKPRTSKKSKPKDSDKEGTSNSTSEDGPGDGFTILSSKSLVLGQKLSLTQSDISHIGSMRVEGIVHPTTAEIDLKEDIGKALEKAGGKEFLETVKELRKSQGPLEVAEAAVSQSSGLAAKFVIHCHIPQWGSDKCEEQLEETIKNCLSAAEDKKLKSVAFPPFPSGRNCFPKQTAAQVTLKAISAHFDDSSASSLKNVYFLLFDSESIGIYVQEMAKLDAK

SEQ ID NO: 2806 - protein, 625 aa, Homo sapiens
MSQESDNNKRLVALVPMPSDPPFNTRRAYTSEDEAWKSYLENPLTAATKAMMSINGDEDSAAALGLLYDYYKVPRDKRLLSVSKASDSQEDQEKRNCLGTSEAQSNLSGGENRVQVLKTVPVNLSLNQDHLENSKREQYSISFPESSAIIPVSGITVVKAEDFTPVFMAPPVHYPRGDGEEQRVVIFEQTQYDVPSLATHSAYLKDDQRSTPDSTYSESFKDAATEKFRSASVGAEEYMYDQTSSGTFQYTLEATKSLRQKQGEGPMTYLNKGQFYAITLSETGDNKCFRHPISKVRSVVMVVFSEDKNRDEQLKYWKYWHSRQHTAKQRVLDIADYKESFNTIGNIEEIAYNAVSFTWDVNEEAKIFITVNCLSTDFSSQKGVKGLPLMIQIDTYSYNNRSNKPIHRAYCQIKVFCDKGAERKIRDEERKQNRKKGKGQASQTQCNSSSDGKLAAIPLQKKSDITYFKTMPDLHSQPVLFIPDVHFANLQRTGQVYYNTDDEREGGSVLVKRMFRPMEEEFGPVPSKQMKEEGTKRVLLYVRKETDDVFDALMLKSPTVKGLMEAISEKYGLPVEKIAKLYKKSKKGILVNMDDNIIEHYSNEDTFILNMESMVEGFKVTLMEI

SEQ ID NO: 2807 - protein, 609 aa, Homo sapiens
MPSDPPFNTRRAYTSEDEAWKSYLENPLTAATKAMMSINGDEDSAAALGLLYDYYKVPRDKRLLSVSKASDSQEDQEKRNCLGTSEAQSNLSGGENRVQVLKTVPVNLSLNQDHLENSKREQYSISFPESSAIIPVSGITVVKAEDFTPVFMAPPVHYPRGDGEEQRVVIFEQTQYDVPSLATHSAYLKDDQRSTPDSTYSESFKDAATEKFRSASVGAEEYMYDQTSSGTFQYTLEATKSLRQKQGEGPMTYLNKGQFYAITLSETGDNKCFRHPISKVRSVVMVVFSEDKNRDEQLKYWKYWHSRQHTAKQRVLDIADYKESFNTIGNIEEIAYNAVSFTWDVNEEAKIFITVNCLSTDFSSQKGVKGLPLMIQIDTYSYNNRSNKPIHRAYCQIKVFCDKGAERKIRDEERKQNRKKGKGQASQTQCNSSSDGKLAAIPLQKKSDITYFKTMPDLHSQPVLFIPDVHFANLQRTGQVYYNTDDEREGGSVLVKRMFRPMEEEFGPVPSKQMKEEGTKRVLLYVRKETDDVFDALMLKSPTVKGLMEAISEKYGLPVEKIAKLYKKSKKGILVNMDDNIIEHYSNEDTFILNMESMVEGFKVTLMEI

SEQ ID NO: 2808 - protein, 166 aa, Homo sapiens
MAPKKAKKRAGGANSNVFSMFEQTQIQEFKEAFTIMDQNRDGFIDKNDLRDTFAALGRVNVKNEEIDEMIKEAPGPINFTVFLTMFGEKLKGADPEETILNAFKVFDPEGKGVLKADYVREMLTTQAERFSKEEVDQMFAAFPPDVTGNLDYKNLVHIITHGEEKD

SEQ ID NO: 2809 - protein, 4493 aa, Homo sapiens
MPRPGTMALCLLTLVLSLLPPQAAAEQDLSVNRAVWDGGGCISQGDVLNRQCQQLSQHVRTGSAANTATGTTSTNVVEPRMYLSCSTNPEMTSIESSVTSDTPGVSSTRMTPTESRTTSESTSDSTTLFPSSTEDTSSPTTPEGTDVPMSTPSEESISSTMAFVSTAPLPSFEAYTSLTYKVDMSTPLTTSTQASSSPTTPESTTIPKSTNSEGSTPLTSMPASTMKVASSEAITLLTTPVEISTPVTISAQASSSPTTAEGPSLSNSAPSGGSTPLTRMPLSVMLVVSSEASTLSTTPAATNIPVITSTEASSSPTTAEGTSIPTSTYTEGSTPLTSTPASTMPVATSEMSTLSITPVDTSTLVTTSTEPSSLPTTAEATSMLTSTLSEGSTPLTNMPVSTILVASSEASTTSTIPVDSKTFVTTASEASSSPTTAEDTSIATSTPSEGSTPLTSMPVSTTPVASSEASNLSTTPVDSKTQVTTSTEASSSPPTAEVNSMPTSTPSEGSTPLTSMSVSTMPVASSEASTLSTTPVDTSTPVTTSSEASSSSTTPEGTSIPTSTPSEGSTPLTNMPVSTRLVVSSEASTTSTTPADSNTFVTTSSEASSSSTTAEGTSMPTSTYSERGTTITSMSVSTTLVASSEASTLSTTPVDSNTPVTTSTEATSSSTTAEGTSMPTSTYTEGSTPLTSMPVNTTLVASSEASTLSTTPVDTSTPVTTSTEASSSPTTADGASMPTSTPSEGSTPLTSMPVSKTLLTSSEASTLSTTPLDTSTHITTSTEASCSPTTTEGTSMPISTPSEGSPLLTSIPVSITPVTSPEASTLSTTPVDSNSPVTTSTEVSSSPTPAEGTSMPTSTYSEGRTPLTSMPVSTTLVATSAISTLSTTPVDTSTPVTNSTEARSSPTTSEGTSMPTSTPGEGSTPLTSMPDSTTPVVSSEARTLSATPVDTSTPVTTSTEATSSPTTAEGTSIPTSTPSEGTTPLTSTPVSHTLVANSEASTLSTTPVDSNTPLTTSTEASSPPPTAEGTSMPTSTPSEGSTPLTRMPVSTTMVASSETSTLSTTPADTSTPVTTYSQASSSSTTADGTSMPTSTYSEGSTPLTSVPVSTRLVVSSEASTLSTTPVDTSIPVTTSTEASSSPTTAEGTSIPTSPPSEGTTPLASMPVSTTLVVSSEANTLSTTPVDSKTQVATSTEASSPPPTAEVTSMPTSTPGERSTPLTSMPVRHTPVASSEASTLSTSPVDTSTPVTTSAETSSSPTTAEGTSLPTSTTSEGSTLLTSIPVSTTLVTSPEASTLLTTPVDTKGPVVTSNEVSSSPTPAEGTSMPTSTYSEGRTPLTSIPVNTTLVASSAISILSTTPVDNSTPVTTSTEACSSPTTSEGTSMPNSNPSEGTTPLTSIPVSTTPVVSSEASTLSATPVDTSTPGTTSAEATSSPTTAEGISIPTSTPSEGKTPLKSIPVSNTPVANSEASTLSTTPVDSNSPVVTSTAVSSSPTPAEGTSIAISTPSEGSTALTSIPVSTTTVASSEINSLSTTPAVTSTPVTTYSQASSSPTTADGTSMQTSTYSEGSTPLTSLPVSTMLVVSSEANTLSTTPIDSKTQVTASTEASSSTTAEGSSMTISTPSEGSPLLTSIPVSTTPVASPEASTLSTTPVDSNSPVITSTEVSSSPTPAEGTSMPTSTYTEGRTPLTSITVRTTPVASSAISTLSTTPVDNSTPVTTSTEARSSPTTSEGTSMPNSTPSEGTTPLTSIPVSTTPVLSSEASTLSATPIDTSTPVTTSTEATSSPTTAEGTSIPTSTLSEGMTPLTSTPVSHTLVANSEASTLSTTPVDSNSPVVTSTAVSSSPTPAEGTSIATSTPSEGSTALTSIPVSTTTVASSETNTLSTTPAVTSTPVTTYAQVSSSPTTADGSSMPTSTPREGRPPLTSIPVSTTTVASSEINTLSTTLADTRTPVTTYSQASSSPTTADGTSMPTPAYSEGSTPLTSMPLSTTLVVSSEASTLSTTPVDTSTPATTSTEGSSSPTTAGGTSIQTSTPSERTTPLAGMPVSTTLVVSSEGNTLSTTPVDSKTQVTNSTEASSSATAEGSSMTISAPSEGSPLLTSIPLSTTPVASPEASTLSTTPVDSNSPVITSTEVSSSPIPTEGTSMQTSTYSDRRTPLTSMPVSTTVVASSAISTLSTTPVDTSTPVTNSTEARSSPTTSEGTSMPTSTPSEGSTPFTSMPVSTMPVVTSEASTLSATPVDTSTPVTTSTEATSSPTTAEGTSIPTSTLSEGTTPLTSIPVSHTLVANSEVSTLSTTPVDSNTPFTTSTEASSPPPTAEGTSMPTSTSSEGNTPLTRMPVSTTMVASFETSTLSTTPADTSTPVTTYSQAGSSPTTADDTSMPTSTYSEGSTPLTSVPVSTMPVVSSEASTHSTTPVDTSTPVTTSTEASSSPTTAEGTSIPTSPPSEGTTPLASMPVSTTPVVSSEAGTLSTTPVDTSTPMTTSTEASSSPTTAEDIVVPISTASEGSTLLTSIPVSTTPVASPEASTLSTTPVDSNSPVVTSTEISSSATSAEGTSMPTSTYSEGSTPLRSMPVSTKPLASSEASTLSTTPVDTSIPVTTSTETSSSPTTAKDTSMPISTPSEVSTSLTSILVSTMPVASSEASTLSTTPVDTRTLVTTSTGTSSSPTTAEGSSMPTSTPGERSTPLTNILVSTTLLANSEASTLSTTPVDTSTPVTTSAEASSSPTTAEGTSMRISTPSDGSTPLTSILVSTLPVASSEASTVSTTAVDTSIPVTTSTEASSSPTTAEVTSMPTSTPSETSTPLTSMPVNHTPVASSEAGTLSTTPVDTSTPVTTSTKASSSPTTAEGIVVPISTASEGSTLLTSIPVSTTPVASSEASTLSTTPVDTSIPVTTSTEGSSSPTTAEGTSMPISTPSEVSTPLTSILVSTVPVAGSEASTLSTTPVDTRTPVTTSAEASSSPTTAEGTSMPISTPGERRTPLTSMSVSTMPVASSEASTLSRTPADTSTPVTTSTEASSSPTTAEGTGIPISTPSEGSTPLTSIPVSTTPVAIPEASTLSTTPVDSNSPVVTSTEVSSSPTPAEGTSMPISTYSEGSTPLTGVPVSTTPVTSSAISTLSTTPVDTSTPVTTSTEAHSSPTTSEGTSMPTSTPSEGSTPLTYMPVSTMLVVSSEDSTLSATPVDTSTPVTTSTEATSSTTAEGTSIPTSTPSEGMTPLTSVPVSNTPVASSEASILSTTPVDSNTPLTTSTEASSSPPTAEGTSMPTSTPSEGSTPLTSMPVSTTTVASSETSTLSTTPADTSTPVTTYSQASSSPPIADGTSMPTSTYSEGSTPLTNMSFSTTPVVSSEASTLSTTPVDTSTPVTTSTEASLSPTTAEGTSIPTSSPSEGTTPLASMPVSTTPVVSSEVNTLSTTPVDSNTLVTTSTEASSSPTIAEGTSLPTSTTSEGSTPLSIMPLSTTPVASSEASTLSTTPVDTSTPVTTSSPTNSSPTTAEVTSMPTSTAGEGSTPLTNMPVSTTPVASSEASTLSTTPVDSNTFVTSSSQASSSPATLQVTTMRMSTPSEGSSSLTTMLLSSTYVTSSEASTPSTPSVDRSTPVTTSTQSNSTPTPPEVITLPMSTPSEVSTPLTIMPVSTTSVTISEAGTASTLPVDTSTPVITSTQVSSSPVTPEGTTMPIWTPSEGSTPLTTMPVSTTRVTSSEGSTLSTPSVVTSTPVTTSTEAISSSATLDSTTMSVSMPMEISTLGTTILVSTTPVTRFPESSTPSIPSVYTSMSMTTASEGSSSPTTLEGTTTMPMSTTSERSTLLTTVLISPISVMSPSEASTLSTPPGDTSTPLLTSTKAGSFSIPAEVTTIRISITSERSTPLTTLLVSTTLPTSFPGASIASTPPLDTSTTFTPSTDTASTPTIPVATTISVSVITEGSTPGTTIFIPSTPVTSSTADVFPATTGAVSTPVITSTELNTPSTSSSSTTTSFSTTKEFTTPAMTTAAPLTYVTMSTAPSTPRTTSRGCTTSASTLSATSTPHTSTSVTTRPVTPSSESSRPSTITSHTIPPTFPPAHSSTPPTTSASSTTVNPEAVTTMTTRTKPSTRTTSFPTVTTTAVPTNTTIKSNPTSTPTVPRTTTCFGDGCQNTASRCKNGGTWDGLKCQCPNLYYGELCEEVVSSIDIGPPETISAQMELTVTVTSVKFTEELKNHSSQEFQEFKQTFTEQMNIVYSGIPEYVGVNITKLRLGSVVVEHDVLLRTKYTPEYKTVLDNATEVVKEKITKVTTQQIMINDICSDMMCFNTTGTQVQNITVTQYDPEEDCRKMAKEYGDYFVVEYRDQKPYCISPCEPGFSVSKNCNLGKCQMSLSGPQCLCVTTETHWYSGETCNQGTQKSLVYGLVGAGVVLMLIILVALLMLVFRSKREVKRQKYRLSQLYKWQEEDSGPAPGTFQNIGFDICQDDDSIHLESIYSNFQPSLRHIDPETKIRIQRPQVMTTSF

SEQ ID NO: 2810 - protein, 4361 aa, Homo sapiens
MPRPGTMALCLLTLVLSLLPPQAAAEQDLSVNRAVWDGGGCISQGDVLNRQCQQLSQHVRTGSAANTATGTTSTNVVEPRMYLSCSTNPEMTSIESSVTSDTPGVSSTRMTPTESRTTSESTSDSTTLFPSSTEDTSSPTTPEGTDVPMSTPSEESISSTMAFVSTAPLPSFEAYTSLTYKVDMSTPLTTSTQASSSPTTPESTTIPKSTNSEGSTPLTSMPASTMKVASSEAITLLTTPVEISTPVTISAQASSSPTTAEGPSLSNSAPSGGSTPLTRMPLSVMLVVSSEASTLSTTPAATNIPVITSTEASSSPTTAEGTSIPTSTYTEGSTPLTSTPASTMPVATSEMSTLSITPVDTSTLVTTSTEPSSLPTTAEATSMLTSTLSEGSTPLTNMPVSTILVASSEASTTSTIPVDSKTFVTTASEASSSPTTAEDTSIATSTPSEGSTPLTSMPVSTTPVASSEASNLSTTPVDSKTQVTTSTEASSSPPTAEVNSMPTSTPSEGSTPLTSMSVSTMPVASSEASTLSTTPVDTSTPVTTSSEASSSSTTPEGTSIPTSTPSEGSTPLTNMPVSTRLVVSSEASTTSTTPADSNTFVTTSSEASSSSTTAEGTSMPTSTYSERGTTITSMSVSTTLVASSEASTLSTTPVDSNTPVTTSTEATSSSTTAEGTSMPTSTYTEGSTPLTSMPVNTTLVASSEASTLSTTPVDTSTPVTTSTEASSSPTTADGASMPTSTPSEGSTPLTSMPVSKTLLTSSEASTLSTTPLDTSTHITTSTEASCSPTTTEGTSMPISTPSEGSPLLTSIPVSITPVTSPEASTLSTTPVDSNSPVTTSTEVSSSPTPAEGTSMPTSTYSEGRTPLTSMPVSTTLVATSAISTLSTTPVDTSTPVTNSTEARSSPTTSEGTSMPTSTPGEGSTPLTSMPDSTTPVVSSEARTLSATPVDTSTPVTTSTEATSSPTTAEGTSIPTSTPSEGTTPLTSTPVSHTLVANSEASTLSTTPVDSNTPLTTSTEASSPPPTAEGTSMPTSTPSEGSTPLTRMPVSTTMVASSETSTLSTTPADTSTPVTTYSQASSSSTTADGTSMPTSTYSEGSTPLTSVPVSTRLVVSSEASTLSTTPVDTSIPVTTSTEASSSPTTAEGTSIPTSPPSEGTTPLASMPVSTTLVVSSEANTLSTTPVDSKTQVATSTEASSPPPTAEVTSMPTSTPGERSTPLTSMPVRHTPVASSEASTLSTSPVDTSTPVTTSAETSSSPTTAEGTSLPTSTTSEGSTLLTSIPVSTTLVTSPEASTLLTTPVDTKGPVVTSNEVSSSPTPAEGTSMPTSTYSEGRTPLTSIPVNTTLVASSAISILSTTPVDNSTPVTTSTEACSSPTTSEGTSMPNSNPSEGTTPLTSIPVSTTPVVSSEASTLSATPVDTSTPGTTSAEATSSPTTAEGISIPTSTPSEGKTPLKSIPVSNTPVANSEASTLSTTPVDSNSPVVTSTAVSSSPTPAEGTSIAISTPSEGSTALTSIPVSTTTVASSEINSLSTTPAVTSTPVTTYSQASSSPTTADGTSMQTSTYSEGSTPLTSLPVSTMLVVSSEANTLSTTPIDSKTQVTASTEASSSTTAEGSSMTISTPSEGSPLLTSIPVSTTPVASPEASTLSTTPVDSNSPVITSTEVSSSPTPAEGTSMPTSTYTEGRTPLTSITVRTTPVASSAISTLSTTPVDNSTPVTTSTEARSSPTTSEGTSMPNSTPSEGTTPLTSIPVSTTPVLSSEASTLSATPIDTSTPVTTSTEATSSPTTAEGTSIPTSTLSEGMTPLTSTPVSHTLVANSEASTLSTTPVDSNSPVVTSTAVSSSPTPAEGTSIATSTPSEGSTALTSIPVSTTTVASSETNTLSTTPAVTSTPVTTYAQVSSSPTTADGSSMPTSTPREGRPPLTSIPVSTTTVASSEINTLSTTLADTRTPVTTYSQASSSPTTADGTSMPTPAYSEGSTPLTSMPLSTTLVVSSEASTLSTTPVDTSTPATTSTEGSSSPTTAGGTSIQTSTPSERTTPLAGMPVSTTLVVSSEGNTLSTTPVDSKTQVTNSTEASSSATAEGSSMTISAPSEGSPLLTSIPLSTTPVASPEASTLSTTPVDSNSPVITSTEVSSSPIPTEGTSMQTSTYSDRRTPLTSMPVSTTVVASSAISTLSTTPVDTSTPVTNSTEARSSPTTSEGTSMPTSTPSEGSTPFTSMPVSTMPVVTSEASTLSATPVDTSTPVTTSTEATSSPTTAEGTSIPTSTLSEGTTPLTSIPVSHTLVANSEVSTLSTTPVDSNTPFTTSTEASSPPPTAEGTSMPTSTSSEGNTPLTRMPVSTTMVASFETSTLSTTPADTSTPVTTYSQAGSSPTTADDTSMPTSTYSEGSTPLTSVPVSTMPVVSSEASTHSTTPVDTSTPVTTSTEASSSPTTAEGTSIPTSPPSEGTTPLASMPVSTTPVVSSEAGTLSTTPVDTSTPMTTSTEASSSPTTAEDIVVPISTASEGSTLLTSIPVSTTPVASPEASTLSTTPVDSNSPVVTSTEISSSATSAEGTSMPTSTYSEGSTPLRSMPVSTKPLASSEASTLSTTPVDTSIPVTTSTETSSSPTTAKDTSMPISTPSEVSTSLTSILVSTMPVASSEASTLSTTPVDTRTLVTTSTGTSSSPTTAEGSSMPTSTPGERSTPLTNILVSTTLLANSEASTLSTTPVDTSTPVTTSAEASSSPTTAEGTSMRISTPSDGSTPLTSILVSTLPVASSEASTVSTTAVDTSIPVTTSTEASSSPTTAEVTSMPTSTPSETSTPLTSMPVNHTPVASSEAGTLSTTPVDTSTPVTTSTKASSSPTTAEGIVVPISTASEGSTLLTSIPVSTTPVASSEASTLSTTPVDTSIPVTTSTEGSSSPTTAEGTSMPISTPSEVSTPLTSILVSTVPVAGSEASTLSTTPVDTRTPVTTSAEASSSPTTAEGTSMPISTPGERRTPLTSMSVSTMPVASSEASTLSRTPADTSTPVTTSTEASSSPTTAEGTGIPISTPSEGSTPLTSIPVSTTPVAIPEASTLSTTPVDSNSPVVTSTEVSSSPTPAEGTSMPISTYSEGSTPLTGVPVSTTPVTSSAISTLSTTPVDTSTPVTTSTEAHSSPTTSEGTSMPTSTPSEGSTPLTYMPVSTMLVVSSEDSTLSATPVDTSTPVTTSTEATSSTTAEGTSIPTSTPSEGMTPLTSVPVSNTPVASSEASILSTTPVDSNTPLTTSTEASSSPPTAEGTSMPTSTPSEGSTPLTSMPVSTTTVASSETSTLSTTPADTSTPVTTYSQASSSPPIADGTSMPTSTYSEGSTPLTNMSFSTTPVVSSEASTLSTTPVDTSTPVTTSTEASLSPTTAEGTSIPTSSPSEGTTPLASMPVSTTPVVSSEVNTLSTTPVDSNTLVTTSTEASSSPTIAEGTSLPTSTTSEGSTPLSIMPLSTTPVASSEASTLSTTPVDTSTPVTTSSPTNSSPTTAEVTSMPTSTAGEGSTPLTNMPVSTTPVASSEASTLSTTPVDSNTFVTSSSQASSSPATLQVTTMRMSTPSEGSSSLTTMLLSSTYVTSSEASTPSTPSVDRSTPVTTSTQSNSTPTPPEVITLPMSTPSEVSTPLTIMPVSTTSVTISEAGTASTLPVDTSTPVITSTQVSSSPVTPEGTTMPIWTPSEGSTPLTTMPVSTTRVTSSEGSTLSTPSVVTSTPVTTSTEAISSSATLDSTTMSVSMPMEISTLGTTILVSTTPVTRFPESSTPSIPSVYTSMSMTTASEGSSSPTTLEGTTTMPMSTTSERSTLLTTVLISPISVMSPSEASTLSTPPGDTSTPLLTSTKAGSFSIPAEVTTIRISITSERSTPLTTLLVSTTLPTSFPGASIASTPPLDTSTTFTPSTDTASTPTIPVATTISVSVITEGSTPGTTIFIPSTPVTSSTADVFPATTGAVSTPVITSTELNTPSTSSSSTTTSFSTTKEFTTPAMTTAAPLTYVTMSTAPSTPRTTSRGCTTSASTLSATSTPHTSTSVTTRPVTPSSESSRPSTITSHTIPPTFPPAHSSTPPTTSASSTTVNPEAVTTMTTRTKPSTRTTSFPTVTTTAVPTNTTIKSNPTSTPTVPRTTTCFGDGCQNTASRCKNGGTWDGLKCQCPNLYYGELCEEVVSSIDIGPPETISAQMELTVTVTSVKFTEELKNHSSQEFQEFKQTFTEQMNIVYSGIPEYVGVNITKLHDVFQHHWHPSAKHYGDPVRPTVLDNATEVVKEKITKVTTQQIMINDICSDMMCFNTTGTQVQNITVTQYDPEEDCRKMAKEYGDYFVVEYRDQKPYCISPCEPGFSVSKNCNLGKCQMSL

SEQ ID NO: 2811 - protein, 949 aa, Homo sapiens
MILSLLFSLGGPLGWGLLGAWAQASSTSLSDLQSSRTPGVWKAEAEDTGKDPVGRNWCPYPMSKLVTLLALCKTEKFLIHSQQPCPQGAPDCQKVKVMYRMAHKPVYQVKQKVLTSLAWRCCPGYTGPNCEHHDSMAIPEPADPGDSHQEPQDGPVSFKPGHLAAVINEVEVQQEQQEHLLGDLQNDVHRVADSLPGLWKALPGNLTAAVMEANQTGHEFPDRSLEQVLLPHVDTFLQVHFSPIWRSFNQSLHSLTQAIRNLSLDVEANRQAISRVQDSAVARADFQELGAKFEAKVQENTQRVGQLRQDVEDRLHAQHFTLHRSISELQADVDTKLKRLHKAQEAPGTNGSLVLATPGAGARPEPDSLQARLGQLQRNLSELHMTTARREEELQYTLEDMRATLTRHVDEIKELYSESDETFDQISKVERQVEELQVNHTALRELRVILMEKSLIMEENKEEVERQLLELNLTLQHLQGGHADLIKYVKDCNCQKLYLDLDVIREGQRDATRALEETQVSLDERRQLDGSSLQALQNAVDAVSLAVDAHKAEGERARAATSRLRSQVQALDDEVGALKAAAAEARHEVRQLHSAFAALLEDALRHEAVLAALFGEEVLEEMSEQTPGPLPLSYEQIRVALQDAASGLQEQALGWDELAARVTALEQASEPPRPAEHLEPSHDAGREEAATTALAGLARELQSLSNDVKNVGRCCEAEAGAGAASLNASLHGLHNALFATQRSLEQHQRLFHSLFGNFQGLMEANVSLDLGKLQTMLSRKGKKQQKDLEAPRKRDKKEAEPLVDIRVTGPVPGALGAALWEAGSPVAFYASFSEGTAALQTVKFNTTYINIGSSYFPEHGYFRAPERGVYLFAVSVEFGPGPGTGQLVFGGHHRTPVCTTGQGSGSTATVFAMAELQKGERVWFELTQGSITKRSLSGTAFGGFLMFKT

SEQ ID NO: 2812 - protein, 189 aa, Homo sapiens
MRLSLPLLLLLLGAWAIPGGLGDRAPLTATAPQLDDEEMYSAHMPAHLRCDACRAVAYQMWQNLAKAETKLHTSNSGGRRELSELVYTDVLDRSCSRNWQDYGVREVDQVKRLTGPGLSEGPEPSISVMVTGGPWPTRLSRTCLHYLGEFGEDQIYEAHQQGRGALEALLCGGPQGACSEKVSATREEL

SEQ ID NO: 2813 - protein, 123 aa, Homo sapiens
MRLSLPLLLLLLGAWAIPGGLGDRAPLTATAPQLDDEEMYSAHMPAHLRCDACRAVAYQSLLVPDVAKSGKGRDQTSYLKLWGAAGAERVGLHGCPGPELLPELAGLRSSRSGPSETSHRPRT

SEQ ID NO: 2814 - protein, 97 aa, Homo sapiens
MPAELWLTSYGVREVDQVKRLTGPGLSEGPEPSISVMVTGGPWPTRLSRTCLHYLGEFGEDQIYEAHQQGRGALEALLCGGPQGACSEKVSATREEL

SEQ ID NO: 2815 - protein, 75 aa, Homo sapiens
MRLSLPLLLLLLGAWAIPGGLGDRAPLTATAPQLDDEEMYSAHMPAHLRCDACRAVAYQRLCSYPPHLPLTEQQS

SEQ ID NO: 2816 - protein, 62 aa, Homo sapiens
MRLSLPLLLLLLGAWAIPGGLGDRAPLTATAPQLDDEEMYSAHMPAHLRCDACRAVAYQAHP

SEQ ID NO: 2817 - protein, 169 aa, Homo sapiens
MKGSRIELGDVTPHNIKQLKRLNQVIFPVSYNDKFYKDVLEVGELAKLAYFNDIAVGAVCCRVDHSQNQKRLYIMTLGCLAPYRRLGIGTKMLNHVLNICEKDGTFDNIYLHVQISNESAIDFYRKFGFEIIETKKNYYKRIEPADAHVLQKNLKVPSGQNADVQKTDN

SEQ ID NO: 2818 - protein, 81 aa, Homo sapiens
MKGSRIELGDVTPHNIKQLKRLNQVIFPVSYNDKFYRKFGFEIIETKKNYYKRIEPADAHVLQKNLKVPSGQNADVQKTDN

SEQ ID NO: 2819 - protein, 364 aa, Homo sapiens
MDYDSYQHYFYDYDCGEDFYRSTAPSEDIWKKFELVPSPPTSPPWGLGPGAGDPAPGIGPPEPWPGGCTGDEAESRGHSKGWGRNYASIIRRDCMWSGFSARERLERAVSDRLAPGAPRGNPPKASAAPDCTPSLEAGNPAPAAPCPLGEPKTQACSGSESPSDSENEEIDVVTVEKRQSLGIRKPVTITVRADPLDPCMKHFHISIHQQQHNYAARFPPESCSQEEASERGPQEEVLERDAAGEKEDEEDEEIVSPPPVESEAAQSCHPKPVSSDTEDVTKRKNHNFLERKRRNDLRSRFLALRDQVPTLASCSKAPKVVILSKALEYLQALVGAEKRMATEKRQLRCRQQQLQKRIAYLTGY

SEQ ID NO: 2820 - protein, 236 aa, Homo sapiens
MCVCAGCRAAPSRRGAGPLQVAGGWSEGADMDYDSYQHYFYDYDCGEDFYRSTAPSEDIWKKFELVPSPPTSPPWGLGPGAGDPAPGIGPPEPWPGGCTGDEAESRGHSKGWGRNYASIIRRDCMWSGFSARERLERAVSDRLAPGAPRGNPPKASAAPDCTPSLEAGNPAPAAPCPLGEPKTQACSGSESPSDSGKDLPEPSKRGPPHGWPKLCPCLRSGIGSSQALGPSPPLFG

SEQ ID NO: 2821 - protein, 394 aa, Homo sapiens
MCVCAGCRAAPSRRGAGPLQVAGGWSEGADMDYDSYQHYFYDYDCGEDFYRSTAPSEDIWKKFELVPSPPTSPPWGLGPGAGDPAPGIGPPEPWPGGCTGDEAESRGHSKGWGRNYASIIRRDCMWSGFSARERLERAVSDRLAPGAPRGNPPKASAAPDCTPSLEAGNPAPAAPCPLGEPKTQACSGSESPSDSENEEIDVVTVEKRQSLGIRKPVTITVRADPLDPCMKHFHISIHQQQHNYAARFPPESCSQEEASERGPQEEVLERDAAGEKEDEEDEEIVSPPPVESEAAQSCHPKPVSSDTEDVTKRKNHNFLERKRRNDLRSRFLALRDQVPTLASCSKAPKVVILSKALEYLQALVGAEKRMATEKRQLRCRQQQLQKRIAYLTGY

SEQ ID NO: 2822 - protein, 358 aa, Homo sapiens
MDRDSYHHYFYDYDGGEDFYRSTTPSEDIWKKFELVPPPWDLGPAAGNPALSFGLLEPWPVGCAGDETESQDYWKAWDANYASLIRRDCMWSGFSTQEPLERAVSDLLAVGAPSGYSPKEFATPDYTPELEAGNLAPIFPCLLGEPKIQACSRSESPSDSEGEEIDVTVKKRQSLSTRKPVIIAVRADLLDPRMNLFHISIHQQQHNYAAPFPPESCFQEGAPKRMPPKEALEREAPGGKDDKEDEEIVSLPPVESEAAQSCQPKPIHYDTENWTKKKYHSYLERKRRNDQRSRFLALRDEVPALASCSRVSKVMILVKATEYLHELAEAEERMATEKRQLECQRRQLQKRIEYLSSY

SEQ ID NO: 2823 - protein, 296 aa, Homo sapiens
MAAGGPGAGSAAPVSSTSSLPLAALNMRVRRRLSLFLNVRTQVAADWTALAEEMDFEYLEIRQLETQADPTGRLLDAWQGRPGASVGRLLELLTKLGRDDVLLELGPSIEEDCQKYILKQQQEEAEKPLQVAAVDSSVPRTAELAGITTLDDPLGHMPERFDAFICYCPSDIQFVQEMIRQLEQTNYRLKLCVSDRDVLPGTCVWSIASELIEKRCRRMVVVVSDDYLQSKECDFQTKFALSLSPGAHQKRLIPIKYKAMKKEFPSILRFITVCDYTNPCTKSWFWTRLAKALSLP

SEQ ID NO: 2824 - protein, 251 aa, Homo sapiens
MAAGGPGAGSAAPVSSTSSLPLAALNMRVRRRLSLFLNVRTQVAADWTALAEEMDFEYLEIRQLETQADPTGRLLDAWQGRPGASVGRLLELLTKLGRDDVLLELGPSIGHMPERFDAFICYCPSDIQFVQEMIRQLEQTNYRLKLCVSDRDVLPGTCVWSIASELIEKRCRRMVVVVSDDYLQSKECDFQTKFALSLSPGAHQKRLIPIKYKAMKKEFPSILRFITVCDYTNPCTKSWFWTRLAKALSLP

SEQ ID NO: 2825 - protein, 191 aa, Homo sapiens
MAAGGPGAGSAAPVSSTSSLPLAALNMRVRRRLSLFLNVRTQVAADWTALAEEMDFEYLEIRQLETQADPTGRLLDAWQGRPGASVGRLLELLTKLGRDDVLLELGPSIEEDCQKYILKQQQEEAEKPLQVAAVDSSVPRTAELAGITTLDDPLGAAGWWWLSLMITCRARNVTSRPNLHSASLQVPIRSD

SEQ ID NO: 2826 - protein, 146 aa, Homo sapiens
MAAGGPGAGSAAPVSSTSSLPLAALNMRVRRRLSLFLNVRTQVAADWTALAEEMDFEYLEIRQLETQADPTGRLLDAWQGRPGASVGRLLELLTKLGRDDVLLELGPSIGAAGWWWLSLMITCRARNVTSRPNLHSASLQVPIRSD

SEQ ID NO: 2827 - protein, 275 aa, Homo sapiens
MAALNMRVRRRLSLFLNVRTQVAADWTALAEEMDFEYLEIRQLETQADPTGRLLDAWQGRPGASVGRLLELLTKLGRDDVLLELGPSIEEDCQKYILKQQQEEAEKPLQVAAVDSSVPRTAELAGITTLDDPLGHMPERFDAFICYCPSDIQFVQEMIRQLEQTNYRLKLCVSDRDVLPGTCVWSIASELIEKRCRRMVVVVSDDYLQSKECDFQTKFALSLSPGAHQKRLIPIKYKAMKKEFPSILRFITVCDYTNPCTKSWFWTRLAKALSLP

SEQ ID NO: 2828 - protein, 304 aa, Homo sapiens
MAAGGPGAGSAAPVSSTSSLPLAALNMRVRRRLSLFLNVRTQVAADWTALAEEMDFEYLEIRQLETQADPTGRLLDAWQGRPGASVGRLLELLTKLGRDDVLLELGPSIEEDCQKYILKQQQEEAEKPLQVAAVDSSVPRTAELAGITTLDDPLGHMPERFDAFICYCPSDIQFVQEMIRQLEQTNYRLKLCVSDRDVLPGTCVWSIASELIEKRLARRPRGGCRRMVVVVSDDYLQSKECDFQTKFALSLSPGAHQKRLIPIKYKAMKKEFPSILRFITVCDYTNPCTKSWFWTRLAKALSLP

SEQ ID NO: 2829 - protein, 214 aa, Homo sapiens
MAGENFATPFHGHVGRGAFSDVYEPAEDTFLLLDALEAAAAELAGVEICLEVGSGSGVVSAFLASMIGPQALYMCTDINPEAAACTLETARCNKVHIQPVITDLVKGLLPRLTEKVDLLVFNPPYVVTPPQEVGSHGIEAAWAGGRNGREVMDRFFPLVPDLLSPRGLFYLVTIKENNPEEILKIMKTKGLQGTTALSRQAGQETLSVLKFTKS

SEQ ID NO: 2830 - protein, 186 aa, Homo sapiens
MAGENFATPFHGHVGRGAFSDVYEPAEDTFLLLDALEAAAAELAGVEICLEVGSGSGVVSAFLASMIGPQALYMCTDINPEAAACTLETARCNKVHIQPVITDLVGSHGIEAAWAGGRNGREVMDRFFPLVPDLLSPRGLFYLVTIKENNPEEILKIMKTKGLQGTTALSRQAGQETLSVLKFTKS

SEQ ID NO: 2831 - protein, 1995 aa, Homo sapiens
MAAVTMSVPGRKAPPRPGPVPEAAQPFLFTPRGPSAGGGPGSGTSPQVEWTARRLVWVPSELHGFEAAALRDEGEEEAEVELAESGRRLRLPRDQIQRMNPPKFSKAEDMAELTCLNEASVLHNLRERYYSGLIYTYSGLFCVVINPYKQLPIYTEAIVEMYRGKKRHEVPPHVYAVTEGAYRSMLQDREDQSILCTGESGAGKTENTKKVIQYLAHVASSPKGRKEPGVPGELERQLLQANPILEAFGNAKTVKNDNSSRFGKFIRINFDVAGYIVGANIETYLLEKSRAIRQAKDECSFHIFYQLLGGAGEQLKADLLLEPCSHYRFLTNGPSSSPGQERELFQETLESLRVLGFSHEEIISMLRMVSAVLQFGNIALKRERNTDQATMPDNTAAQKLCRLLGLGVTDFSRALLTPRIKVGRDYVQKAQTKEQADFALEALAKATYERLFRWLVLRLNRALDRSPRQGASFLGILDIAGFEIFQLNSFEQLCINYTNEKLQQLFNHTMFVLEQEEYQREGIPWTFLDFGLDLQPCIDLIERPANPPGLLALLDEECWFPKATDKSFVEKVAQEQGGHPKFQRPRHLRDQADFSVLHYAGKVDYKANEWLMKNMDPLNDNVAALLHQSTDRLTAEIWKDVEGIVGLEQVSSLGDGPPGGRPRRGMFRTVGQLYKESLSRLMATLSNTNPSFVRCIVPNHEKRAGKLEPRLVLDQLRCNGVLEGIRICRQGFPNRILFQEFRQRYEILTPNAIPKGFMDGKQACEKMIQALELDPNLYRVGQSKIFFRAGVLAQLEEERDLKVTDIIVSFQAAARGYLARRAFQKRQQQQSALRVMQRNCAAYLKLRHWQWWRLFTKVKPLLQVTRQDEVLQARAQELQKVQELQQQSAREVGELQGRVAQLEEERARLAEQLRAEAELCAEAEETRGRLAARKQELELVVSELEARVGEEEECSRQMQTEKKRLQQHIQELEAHLEAEEGARQKLQLEKVTTEAKMKKFEEDLLLLEDQNSKLSKERKLLEDRLAEFSSQAAEEEEKVKSLNKLRLKYEATIADMEDRLRKEEKGRQELEKLKRRLDGESSELQEQMVEQQQRAEELRAQLGRKEEELQAALARAEDEGGARAQLLKSLREAQAALAEAQEDLESERVARTKAEKQRRDLGEELEALRGELEDTLDSTNAQQELRSKREQEVTELKKTLEEETRIHEAAVQELRQRHGQALGELAEQLEQARRGKGAWEKTRLALEAEVSELRAELSSLQTARQEGEQRRRRLELQLQEVQGRAGDGERARAEAAEKLQRAQAELENVSGALNEAESKTIRLSKELSSTEAQLHDAQELLQEETRAKLALGSRVRAMEAEAAGLREQLEEEAAARERAGRELQTAQAQLSEWRRRQEEEAGALEAGEEARRRAAREAEALTQRLAEKTETVDRLERGRRRLQQELDDATMDLEQQRQLVSTLEKKQRKFDQLLAEEKAAVLRAVEERERAEAEGREREARALSLTRALEEEQEAREELERQNRALRAELEALLSSKDDVGKSVHELERACRVAEQAANDLRAQVTELEDELTAAEDAKLRLEVTVQALKTQHERDLQGRDEAGEERRRQLAKQLRDAEVERDEERKQRTLAVAARKKLEGELEELKAQMASAGQGKEEAVKQLRKMQAQMKELWREVEETRTSREEIFSQNRESEKRLKGLEAEVLRLQEELAASDRARRQAQQDRDEMADEVANGNLSKAAILEEKRQLEGRLGQLEEELEEEQSNSELLNDRYRKLLLQVESLTTELSAERSFSAKAESGRQQLERQIQELRGRLGEEDAGARARHKMTIAALESKLAQAEEQLEQETRERILSGKLVRRAEKRLKEVVLQVEEERRVADQLRDQLEKGNLRVKQLKRQLEEAEEEASRAQAGRRRLQRELEDVTESAESMNREVTTLRNRLRRGPLTFTTRTVRQVFRLEEGVASDEEAEEAQPGSGPSPEPEGSPPAHPQ

SEQ ID NO: 2832 - protein, 2036 aa, Homo sapiens
MAAVTMSVPGRKAPPRPGPVPEAAQPFLFTPRGPSAGGGPGSGTSPQVEWTARRLVWVPSELHGFEAAALRDEGEEEAEVELAESGRRLRLPRDQIQRMNPPKFSKAEDMAELTCLNEASVLHNLRERYYSGLIYTYSGLFCVVINPYKQLPIYTEAIVEMYRGKKRHEVPPHVYAVTEGAYRSMLQDREDQSILCTGESGAGKTENTKKVIQYLAHVASSPKGRKEPGVPASVSTVSYGELERQLLQANPILEAFGNAKTVKNDNSSRFGKFIRINFDVAGYIVGANIETYLLEKSRAIRQAKDECSFHIFYQLLGGAGEQLKADLLLEPCSHYRFLTNGPSSSPGQERELFQETLESLRVLGFSHEEIISMLRMVSAVLQFGNIALKRERNTDQATMPDNTAAQKLCRLLGLGVTDFSRALLTPRIKVGRDYVQKAQTKEQADFALEALAKATYERLFRWLVLRLNRALDRSPRQGASFLGILDIAGFEIFQLNSFEQLCINYTNEKLQQLFNHTMFVLEQEEYQREGIPWTFLDFGLDLQPCIDLIERPANPPGLLALLDEECWFPKATDKSFVEKVAQEQGGHPKFQRPRHLRDQADFSVLHYAGKVDYKANEWLMKNMDPLNDNVAALLHQSTDRLTAEIWKDEHGGFQQFSFLGSFPPSPPGSAERCSSAISPPGVEGIVGLEQVSSLGDGPPGGRPRRGMFRTVGQLYKESLSRLMATLSNTNPSFVRCIVPNHEKRAGKLEPRLVLDQLRCNGVLEGIRICRQGFPNRILFQEFRQRYEILTPNAIPKGFMDGKQACEKMIQALELDPNLYRVGQSKIFFRAGVLAQLEEERDLKVTDIIVSFQAAARGYLARRAFQKRQQQQSALRVMQRNCAAYLKLRHWQWWRLFTKVKPLLQVTRQDEVLQARAQELQKVQELQQQSAREVGELQGRVAQLEEERARLAEQLRAEAELCAEAEETRGRLAARKQELELVVSELEARVGEEEECSRQMQTEKKRLQQHIQELEAHLEAEEGARQKLQLEKVTTEAKMKKFEEDLLLLEDQNSKLSKERKLLEDRLAEFSSQAAEEEEKVKSLNKLRLKYEATIADMEDRLRKEEKGRQELEKLKRRLDGESSELQEQMVEQQQRAEELRAQLGRKEEELQAALARAEDEGGARAQLLKSLREAQAALAEAQEDLESERVARTKAEKQRRDLGEELEALRGELEDTLDSTNAQQELRSKREQEVTELKKTLEEETRIHEAAVQELRQRHGQALGELAEQLEQARRGKGAWEKTRLALEAEVSELRAELSSLQTARQEGEQRRRRLELQLQEVQGRAGDGERARAEAAEKLQRAQAELENVSGALNEAESKTIRLSKELSSTEAQLHDAQELLQEETRAKLALGSRVRAMEAEAAGLREQLEEEAAARERAGRELQTAQAQLSEWRRRQEEEAGALEAGEEARRRAAREAEALTQRLAEKTETVDRLERGRRRLQQELDDATMDLEQQRQLVSTLEKKQRKFDQLLAEEKAAVLRAVEERERAEAEGREREARALSLTRALEEEQEAREELERQNRALRAELEALLSSKDDVGKSVHELERACRVAEQAANDLRAQVTELEDELTAAEDAKLRLEVTVQALKTQHERDLQGRDEAGEERRRQLAKQLRDAEVERDEERKQRTLAVAARKKLEGELEELKAQMASAGQGKEEAVKQLRKMQAQMKELWREVEETRTSREEIFSQNRESEKRLKGLEAEVLRLQEELAASDRARRQAQQDRDEMADEVANGNLSKAAILEEKRQLEGRLGQLEEELEEEQSNSELLNDRYRKLLLQVESLTTELSAERSFSAKAESGRQQLERQIQELRGRLGEEDAGARARHKMTIAALESKLAQAEEQLEQETRERILSGKLVRRAEKRLKEVVLQVEEERRVADQLRDQLEKGNLRVKQLKRQLEEAEEEASRAQAGRRRLQRELEDVTESAESMNREVTTLRNRLRRGPLTFTTRTVRQVFRLEEGVASDEEAEEAQPGSGPSPEPEGSPPAHPQ

SEQ ID NO: 2833 - protein, 1779 aa, Homo sapiens
MAAVTMSVPGRKAPPRPGPVPEAAQPFLFTPRGPSAGGGPGSGTSPQVEWTARRLVWVPSELHGFEAAALRDEGEEEAEVELAESGRRLRLPRDQIQRMNPPKFSKAEDMAELTCLNEASVLHNLRERYYSGLIYTYSGLFCVVINPYKQLPIYTEAIVEMYRGKKRHEVPPHVYAVTEGAYRSMLQDREDQSILCTGESGAGKTENTKKVIQYLAHVASSPKGRKEPGVPGELERQLLQANPILEAFGNAKTVKNDNSSRFGKFIRINFDVAGYIVGANIETYLLEKSRAIRQAKDECSFHIFYQLLGGAGEQLKADLLLEPCSHYRFLTNGPSSSPGQERELFQETLESLRVLGFSHEEIISMLRMVSAVLQFGNIALKRERNTDQATMPDNTAAQKLCRLLGLGVTDFSRALLTPRIKVGRDYVQKAQTKEQADFALEALAKATYERLFRWLVLRLNRALDRSPRQGASFLGILDIAGFEIFQLNSFEQLCINYTNEKLQQLFNHTMFVLEQEEYQREGIPWTFLDFGLDLQPCIDLIERPANPPGLLALLDEECWFPKATDKSFVEKVAQEQGGHPKFQRPRHLRDQADFSVLHYAGKVDYKANEWLMKNMDPLNDNVAALLHQSTDRLTAEIWKDVEGIVGLEQVSSLGDGPPGGRPRRGMFRTVGQLYKESLSRLMATLSNTNPSFVRCIVPNHEKRAGKLEPRLVLDQLRCNGVLEGIRICRQGFPNRILFQEFRQRYEILTPNAIPKGFMDGKQACEKMIQALELDPNLYRVGQSKIFFRAGVLAQLEEERDLKVTDIIVSFQAAARGYLARRAFQKRQQQQSALRVMQRNCAAYLKLRHWQWWRLFTKVKPLLQVTRQDEVLQARAQELQKVQELQQQSAREVGELQGRVAQLEEERARLAEQLRAEAELCAEAEETRGRLAARKQELELVVSELEARVGEEEECSRQMQTEKKRLQQHIQELEAHLEAEEGARQKLQLEKVTTEAKMKKFEEDLLLLEDQNSKLSKERKLLEDRLAEFSSQAAEEEEKVKSLNKLRLKYEATIADMEDRLRKEEKGRQELEKLKRRLDGESSELQEQMVEQQQRAEELRAQLGRKEEELQAALARAEDEGGARAQLLKSLREAQAALAEAQEDLESERVARTKAEKQRRDLGEELEALRGELEDTLDSTNAQQELRSKREQEVTELKKTLEEETRIHEAAVQELRQRHGQALGELAEQLEQARRGKGAWEKTRLALEAEVSELRAELSSLQTARQEGEQRRRRLELQLQEVQGRAGDGERARAEAAEKLQRAQAELENVSGALNEALLSSKDDVGKSVHELERACRVAEQAANDLRAQVTELEDELTAAEDAKLRLEVTVQALKTQHERDLQGRDEAGEERRRQLAKQLRDAEVERDEERKQRTLAVAARKKLEGELEELKAQMASAGQGKEEAVKQLRKMQAQMKELWREVEETRTSREEIFSQNRESEKRLKGLEAEVLRLQEELAASDRARRQAQQDRDEMADEVANGNLSKAAILEEKRQLEGRLGQLEEELEEEQSNSELLNDRYRKLLLQVESLTTELSAERSFSAKAESGRQQLERQIQELRGRLGEEDAGARARHKMTIAALESKLAQAEEQLEQETRERILSGKLVRRAEKRLKEVVLQVEEERRVADQLRDQLEKGNLRVKQLKRQLEEAEEEASRAQAGRRRLQRELEDVTESAESMNREVTTLRNRLRRGPLTFTTRTVRQVFRLEEGVASDEEAEEAQPGSGPSPEPEGSPPAHPQ

SEQ ID NO: 2834 - protein, 1478 aa, Homo sapiens
MAAVTMSVPGRKAPPRPGPVPEAAQPFLFTPRGPSAGGGPGSGTSPQVEWTARRLVWVPSELHGFEAAALRDEGEEEAEVELAESGRRLRLPRDQIQRMNPPKFSKAEDMAELTCLNEASVLHNLRERYYSGLIYTYSGLFCVVINPYKQLPIYTEAIVEMYRGKKRHEVPPHVYAVTEGAYRSMLQDREDQSILCTGESGAGKTENTKKVIQYLAHVASSPKGRKEPGVPGELERQLLQANPILEAFGNAKTVKNDNSSRFGKFIRINFDVAGYIVGANIETYLLEKSRAIRQAKDECSFHIFYQLLGGAGEQLKADLLLEPCSHYRFLTNGPSSSPGQERELFQETLESLRVLGFSHEEIISMLRMVSAVLQFGNIALKRERNTDQATMPDNTAAQKLCRLLGLGVTDFSRALLTPRIKVGRDYVQKAQTKEQADFALEALAKATYERLFRWLVLRLNRALDRSPRQGASFLGILDIAGFEIFQLNSFEQLCINYTNEKLQQLFNHTMFVLEQEEYQREGIPWTFLDFGLDLQPCIDLIERPANPPGLLALLDEECWFPKATDKSFVEKVAQEQGGHPKFQRPRHLRDQADFSVLHYAGKVDYKANEWLMKNMDPLNDNVAALLHQSTDRLTAEIWKDVEGIVGLEQVSSLGDGPPGGRPRRGMFRTVGQLYKESLSRLMATLSNTNPSFVRCIVPNHEKRAGKLEPRLVLDQLRCNGVLEGIRICRQGFPNRILFQEFRQRYEILTPNAIPKGFMDGKQACEKMIQALELDPNLYRVGQSKIFFRAGVLAQLEEERDLKVTDIIVSFQAAARGYLARRAFQKRQQQQSALRVMQRNCAAYLKLRHWQWWRLFTKVKPLLQVTRQDEVLQARAQELQKVQELQQQSAREVGELQGRVAQLEEERARLAEQLRAEAELCAEAEETRGRLAARKQELELVVSELEARVGEEEECSRQMQTEKKRLQQHIQELEAHLEAEEGARQKLQLEKVTTEAKMKKFEEDLLLLEDQNSKLSKERKLLEDRLAEFSSQAAEEEEKVKSLNKLRLKYEATIADMEDRLRKEEKGRQELEKLKRRLDGESSELQEQMVEQQQRAEELRAQLGRKEEELQAALARAEDEGGARAQLLKSLREAQAALAEAQEDLESERVARTKAEKQRRDLGEELEALRGELEDTLDSTNAQQELRSKREQEVTELKKTLEEETRIHEAAVQELRQRHGQALGELAEQLEQARRGKGAWEKTRLALEAEVSELRAELSSLQTARQEGEQRRRRLELQLQEVQGRAGDGERARAEAAEKLQRAQAELENVSGALNEAESKTIRLSKELSSTEAQLHDAQELLQEETRAKLALGSRVRAMEAEAAGLREQLEEEAAARERAGRELQTAQAQLSEWRRRQEEEAGALEAGEEARRRAAREAEALTQRLAEKTETVDRLERGRRRLQQELDDATLSPDALTDGAQPPSSLDPTGPCPRNPAL

SEQ ID NO: 2835 - protein, 2003 aa, Homo sapiens
MAAVTMSVPGRKAPPRPGPVPEAAQPFLFTPRGPSAGGGPGSGTSPQVEWTARRLVWVPSELHGFEAAALRDEGEEEAEVELAESGRRLRLPRDQIQRMNPPKFSKAEDMAELTCLNEASVLHNLRERYYSGLIYTYSGLFCVVINPYKQLPIYTEAIVEMYRGKKRHEVPPHVYAVTEGAYRSMLQDREDQSILCTGESGAGKTENTKKVIQYLAHVASSPKGRKEPGVPASVSTVSYGELERQLLQANPILEAFGNAKTVKNDNSSRFGKFIRINFDVAGYIVGANIETYLLEKSRAIRQAKDECSFHIFYQLLGGAGEQLKADLLLEPCSHYRFLTNGPSSSPGQERELFQETLESLRVLGFSHEEIISMLRMVSAVLQFGNIALKRERNTDQATMPDNTAAQKLCRLLGLGVTDFSRALLTPRIKVGRDYVQKAQTKEQADFALEALAKATYERLFRWLVLRLNRALDRSPRQGASFLGILDIAGFEIFQLNSFEQLCINYTNEKLQQLFNHTMFVLEQEEYQREGIPWTFLDFGLDLQPCIDLIERPANPPGLLALLDEECWFPKATDKSFVEKVAQEQGGHPKFQRPRHLRDQADFSVLHYAGKVDYKANEWLMKNMDPLNDNVAALLHQSTDRLTAEIWKDVEGIVGLEQVSSLGDGPPGGRPRRGMFRTVGQLYKESLSRLMATLSNTNPSFVRCIVPNHEKRAGKLEPRLVLDQLRCNGVLEGIRICRQGFPNRILFQEFRQRYEILTPNAIPKGFMDGKQACEKMIQALELDPNLYRVGQSKIFFRAGVLAQLEEERDLKVTDIIVSFQAAARGYLARRAFQKRQQQQSALRVMQRNCAAYLKLRHWQWWRLFTKVKPLLQVTRQDEVLQARAQELQKVQELQQQSAREVGELQGRVAQLEEERARLAEQLRAEAELCAEAEETRGRLAARKQELELVVSELEARVGEEEECSRQMQTEKKRLQQHIQELEAHLEAEEGARQKLQLEKVTTEAKMKKFEEDLLLLEDQNSKLSKERKLLEDRLAEFSSQAAEEEEKVKSLNKLRLKYEATIADMEDRLRKEEKGRQELEKLKRRLDGESSELQEQMVEQQQRAEELRAQLGRKEEELQAALARAEDEGGARAQLLKSLREAQAALAEAQEDLESERVARTKAEKQRRDLGEELEALRGELEDTLDSTNAQQELRSKREQEVTELKKTLEEETRIHEAAVQELRQRHGQALGELAEQLEQARRGKGAWEKTRLALEAEVSELRAELSSLQTARQEGEQRRRRLELQLQEVQGRAGDGERARAEAAEKLQRAQAELENVSGALNEAESKTIRLSKELSSTEAQLHDAQELLQEETRAKLALGSRVRAMEAEAAGLREQLEEEAAARERAGRELQTAQAQLSEWRRRQEEEAGALEAGEEARRRAAREAEALTQRLAEKTETVDRLERGRRRLQQELDDATMDLEQQRQLVSTLEKKQRKFDQLLAEEKAAVLRAVEERERAEAEGREREARALSLTRALEEEQEAREELERQNRALRAELEALLSSKDDVGKSVHELERACRVAEQAANDLRAQVTELEDELTAAEDAKLRLEVTVQALKTQHERDLQGRDEAGEERRRQLAKQLRDAEVERDEERKQRTLAVAARKKLEGELEELKAQMASAGQGKEEAVKQLRKMQAQMKELWREVEETRTSREEIFSQNRESEKRLKGLEAEVLRLQEELAASDRARRQAQQDRDEMADEVANGNLSKAAILEEKRQLEGRLGQLEEELEEEQSNSELLNDRYRKLLLQVESLTTELSAERSFSAKAESGRQQLERQIQELRGRLGEEDAGARARHKMTIAALESKLAQAEEQLEQETRERILSGKLVRRAEKRLKEVVLQVEEERRVADQLRDQLEKGNLRVKQLKRQLEEAEEEASRAQAGRRRLQRELEDVTESAESMNREVTTLRNRLRRGPLTFTTRTVRQVFRLEEGVASDEEAEEAQPGSGPSPEPEGSPPAHPQ

SEQ ID NO: 2836 - protein, 1946 aa, Homo sapiens
MVESCLLTFRAFFWWIALIKMDLSDLGEAAAFLRRSEAELLLLQATALDGKKKCWIPDGENAYIEAEVKGSEDDGTVIVETADGESLSIKEDKIQQMNPPEFEMIEDMAMLTHLNEASVLHTLKRRYGQWMIYTYSGLFCVTINPYKWLPVYQKEVMAAYKGKRRSEAPPHIFAVANNAFQDMLHNRENQSILFTGESGAGKTVNSKHIIQYFATIAAMIESRKKQGALEDQIMQANTILEAFGNAKTLRNDNSSRFGKFIRMHFGARGMLSSVDIDIYLLEKSRVIFQQAGERNYHIFYQILSGQKELHDLLLVSANPSDFHFCSCGAVTVESLDDAEELLATEQAMDILGFLPDEKYGCYKLTGAIMHFGNMKFKQKPREEQLEADGTENADKAAFLMGINSSELVKCLIHPRIKVGNEYVTRGQTIEQVTCAVGALSKSMYERMFKWLVARINRALDAKLSRQFFIGILDITGFEILEYNSLEQLCINFTNEKLQQFFNWHMFVLEQEEYKKESIEWVSIGFGLDLQACIDLIEKPMGILSILEEECMFPKATDLTFKTKLFDNHFGKSVHLQKPKPDKKKFEAHFELVHYAGVVPYNISGWLEKNKDLLNETVVAVFQKSSNRLLASLFENYMSTDSAIPFGEKKRKKGASFQTVASLHKENLNKLMTNLKSTAPHFVRCINPNVNKIPGILDPYLVLQQLRCNGVLEGTRICREGFPNRLQYADFKQRYCILNPRTFPKSKFVSSRKAAEELLGSLEIDHTQYRFGITKVFFKAGFLGQLEAIRDERLSKVFTLFQARAQGKLMRIKFQKILEERDALILIQWNIRAFMAVKNWPWMRLFFKIKPLVKSSEVGEEVAGLKEECAQLQKALEKSEFQREELKAKQVSLTQEKNDLILQLQAEQETLANVEEQCEWLIKSKIQLEARVKELSERVEEEEEINSELTARGRKLEDECFELKKEIDDLETMLVKSEKEKRTTEHKVKNLTEEVEFLNEDISKLNRAAKVVQEAHQQTLDDLHMEEEKLSSLSKANLKLEQQVDELEGALEQERKARMNCERELHKLEGNLKLNRESMENLESSQRHLAEELRKKELELSQMNSKVENEKGLVAQLQKTVKELQTQIKDLKEKLEAERTTRAKMERERADLTQDLADLNERLEEVGGSSLAQLEITKKQETKFQKLHRDMEEATLHFETTSASLKKRHADSLAELEGQVENLQQVKQKLEKDKSDLQLEVDDLLTRVEQMTRAKANAEKLCTLYEERLHEATAKLDKVTQLANDLAAQKTKLWSESGEFLRRLEEKEALINQLSREKSNFTRQIEDLRGQLEKETKSQSALAHALQKAQRDCDLLREQYEEEQEVKAELHRTLSKVNAEMVQWRMKYENNVIQRTEDLEDAKKELAIRLQEAAEAMGVANARNASLERARHQLQLELGDALSDLGKVRSAAARLDQKQLQSGKALADWKQKHEESQALLDASQKEVQALSTELLKLKNTYEESIVGQETLRRENKNLQEEISNLTNQVREGTKNLTEMEKVKKLIEEEKTEVQVTLEETEGALERNESKILHFQLELLEAKAELERKLSEKDEEIENFRRKQQCTIDSLQSSLDSEAKSRIEVTRLKKKMEEDLNEMELQLSCANRQVSEATKSLGQLQIQIKDLQMQLDDSTQLNSDLKEQVAVAERRNSLLQSELEDLRSLQEQTERGRRLSEEELLEATERINLFYTQNTSLLSQKKKLEADVARMQKEAEEVVQECQNAEEKAKKAAIEAANLSEELKKKQDTIAHLERTRENMEQTITDLQKRLAEAEQMALMGSRKQIQKLESRVRELEGELEGEIRRSAEAQRGARRLERCIKELTYQAEEDKKNLSRMQTQMDKLQLKVQNYKQQVEVAETQANQYLSKYKKQQHELNEVKERAEVAESQVNKLKIKAREFGKKVQEE

SEQ ID NO: 2837 - protein, 388 aa, Homo sapiens
MLKVKRLEEFNTCYNSNQLEKMAFFQCREEVEKVKCFLEKNSGDQDSRSGHNEAKEVWSNADLTERMPVKSKRTSALAVDIPAPPAPFDHRIVTAKQGAVNSFYTVSKTEILGGGRFGQVHKCEETATGLKLAAKIIKTRGMKDKEEVKNEISVMNQLDHANLIQLYDAFESKNDIVLVMEYVDGGELFDRIIDESYNLTELDTILFMKQICEGIRHMHQMYILHLDLKPENILCVNRDAKQIKIIDFGLARRYKPREKLKVNFGTPEFLAPEVVNYDFVSFPTDMWSVGVIAYMLLSGLSPFLGDNDAETLNNILACRWDLEDEEFQDISEEAKEFISKLLIKEKSWRISASEALKHPWLSDHKLHSRLNAQKKKNRGSDAQDFVTK

SEQ ID NO: 2838 - protein, 388 aa, Homo sapiens
MLKVKRLEEFNTCYNSNQLEKMAFFQCREEVEKVKCFLEKNSGDQDSRSGHNEAKEVWSNADLTERMPVKSKRTSALAVDIPAPPAPFDHRIVTAKQGAVNSFYTVSKTEILGGGRFGQVHKCEETATGLKLAAKIIKTRGMKDKEEVKNEISVMNQLDHANLIQLYDAFESKNDIVLVMEYVDGGELFDRIIDESYNLTELDTILFMKQICEGIRHMHQMYILHLDLKPENIQCSRFLIDTSILPLCLLNCRYKPREKLKVNFGTPEFLAPEVVNYDFVSFPTDMWSVGVIAYMLLSGLSPFLGDNDAETLNNILACRWDLEDEEFQDISEEAKEFISKLLIKEKSWRISASEALKHPWLSDHKLHSRLNAQKKKNRGSDAQDFVTK

SEQ ID NO: 2839 - protein, 301 aa, Homo sapiens
MGAQLSTLGHMVLFPVWFLYSLLMKLFQRSTPAITLESPDIKYPLRLIDREIISHDTRRFRFALPSPQHILGLPVGQHIYLSARIDGNLVVRPYTPISSDDDKGFVDLVIKVYFKDTHPKFPAGGKMSQYLESMQIGDTIEFRGPSGLLVYQGKGKFAIRPDKKSNPIIRTVKSVGMIAGGTGITPMLQVIRAIMKDPDDHTVCHLLFANQTEKDILLRPELEELRNKHSARFKLWYTLDRAPEAWDYGQGFVNEEMIRDHLPPPEEEPLVLMCGPPPMIQYACLPNLDHVGHPTERCFVF

SEQ ID NO: 2840 - protein, 278 aa, Homo sapiens
MKLFQRSTPAITLESPDIKYPLRLIDREIISHDTRRFRFALPSPQHILGLPVGQHIYLSARIDGNLVVRPYTPISSDDDKGFVDLVIKVYFKDTHPKFPAGGKMSQYLESMQIGDTIEFRGPSGLLVYQGKGKFAIRPDKKSNPIIRTVKSVGMIAGGTGITPMLQVIRAIMKDPDDHTVCHLLFANQTEKDILLRPELEELRNKHSARFKLWYTLDRAPEAWDYGQGFVNEEMIRDHLPPPEEEPLVLMCGPPPMIQYACLPNLDHVGHPTERCFVF

SEQ ID NO: 2841 - protein, 334 aa, Homo sapiens
MNRSLLVGCMQSKDIWGREESICERLKQDGLDVERAESWELGHMVLFPVWFLYSLLMKLFQRSTPAITLESPDIKYPLRLIDREIISHDTRRFRFALPSPQHILGLPVGQHIYLSARIDGNLVVRPYTPISSDDDKGFVDLVIKVYFKDTHPKFPAGGKMSQYLESMQIGDTIEFRGPSGLLVYQGKGKFAIRPDKKSNPIIRTVKSVGMIAGGTGITPMLQVIRAIMKDPDDHTVCHLLFANQTEKDILLRPELEELRNKHSARFKLWYTLDRAPEAWDYGQGFVNEEMIRDHLPPPEEEPLVLMCGPPPMIQYACLPNLDHVGHPTERCFVF

SEQ ID NO: 2842 - protein, 1941 aa, Homo sapiens
MSSDSELAVFGEAAPFLRKSERERIEAQNRPFDAKTSVFVAEPKESFVKGTIQSREGGKVTVKTEGGATLTVKDDQVFPMNPPKYDKIEDMAMMTHLHEPAVLYNLKERYAAWMIYTYSGLFCVTVNPYKWLPVYKPEVVTAYRGKKRQEAPPHIFSISDNAYQFMLTDRENQSILITGESGAGKTVNTKRVIQYFATIAVTGEKKKEEITSGKIQGTLEDQIISANPLLEAFGNAKTVRNDNSSRFGKFIRIHFGTTGKLASADIETYLLEKSRVVFQLKAERSYHIFYQITSNKKPELIEMLLITTNPYDYPFVSQGEISVASIDDQEELMATDSAIDILGFTNEEKVSIYKLTGAVMHYGNLKFKQKQREEQAEPDGTEVADKAAYLQSLNSADLLKALCYPRVKVGNEYVTKGQTVEQVSNAVGALAKAVYEKMFLWMVARINQQLDTKQPRQYFIGVLDIAGFEIFDFNSLEQLCINFTNEKLQQFFNHHMFVLEQEEYKKEGIEWTFIDFGMDLAACIELIEKPMGIFSILEEECMFPKATDTSFKNKLYDQHLGKSANFQKPKVVKGKAEAHFALIHYAGVVDYNITGWLEKNKDPLNETVVGLYQKSAMKTLAQLFSGAQTAEGEGAGGGAKKGGKKKGSSFQTVSALFRENLNKLMTNLRSTHPHFVRCIIPNETKTPGAMEHELVLHQLRCNGVLEGIRICRKGFPSRILYADFKQRYKVLNASAIPEGQFIDSKKASEKLLASIDIDHTQYKFGHTKVFFKAGLLGLLEEMRDDKLAQLITRTQARCRGFLARVEYQRMVERREAIFCIQYNIRSFMNVKHWPWMKLFFKIKPLLKSAETEKEMATMKEEFQKIKDELAKSEAKRKELEEKMVTLLKEKNDLQLQVQAEAEGLADAEERCDQLIKTKIQLEAKIKEVTERAEDEEEINAELTAKKRKLEDECSELKKDIDDLELTLAKVEKEKHATENKVKNLTEEMAGLDETIAKLTKEKKALQEAHQQTLDDLQAEEDKVNTLTKAKIKLEQQVDDLEGSLEQEKKLRMDLERAKRKLEGDLKLAQESIMDIENEKQQLDEKLKKKEFEISNLQSKIEDEQALGIQLQKKIKELQARIEELEEEIEAERASRAKAEKQRSDLSRELEEISERLEEAGGATSAQIEMNKKREAEFQKMRRDLEEATLQHEATAATLRKKHADSVAELGEQIDNLQRVKQKLEKEKSEMKMEIDDLASNVETVSKAKGNLEKMCRTLEDQLSELKSKEEEQQRLINDLTAQRGRLQTESGEFSRQLDEKEALVSQLSRGKQAFTQQIEELKRQLEEEIKAKNALAHALQSSRHDCDLLREQYEEEQESKAELQRALSKANTEVAQWRTKYETDAIQRTEELEEAKKKLAQRLQAAEEHVEAVNAKCASLEKTKQRLQNEVEDLMLDVERTNAACAALDKKQRNFDKILAEWKQKCEETHAELEASQKEARSLGTELFKIKNAYEESLDQLETLKRENKNLQQEISDLTEQIAEGGKRIHELEKIKKQVEQEKCELQAALEEAEASLEHEEGKILRIQLELNQVKSEVDRKIAEKDEEIDQLKRNHIRIVESMQSTLDAEIRSRNDAIRLKKKMEGDLNEMEIQLNHANRMAAEALRNYRNTQGILKDTQIHLDDALRSQEDLKEQLAMVERRANLLQAEIEELRATLEQTERSRKIAEQELLDASERVQLLHTQNTSLINTKKKLETDISQMQGEMEDILQEARNAEEKAKKAITDAAMMAEELKKEQDTSAHLERMKKNMEQTVKDLQLRLDEAEQLALKGGKKQIQKLEARVRELEGEVESEQKRNAEAVKGLRKHERRVKELTYQTEEDRKNILRLQDLVDKLQAKVKSYKRQAEEAEEQSNTNLAKFRKLQHELEEAEERADIAESQVNKLRVKSREVHTKVISEE

SEQ ID NO: 2843 - protein, 708 aa, Homo sapiens
MSSDSELAVFGEAAPFLRKSERERIEAQNRPFDAKTSVFVAEPKESFVKGTIQSREGGKVTVKTEGGATLTVKDDQVFPMNPPKYDKIEDMAMMTHLHEPAVLYNLKERYAAWMIYTYSGLFCVTVNPYKWLPVYKPEVVTAYRGKKRQEAPPHIFSISDNAYQFMLTDRENQSILITGESGAGKTVNTKRVIQYFATIAVTGEKKKEEITSGKIQGTLEDQIISANPLLEAFGNAKTVRNDNSSRFGKFIRIHFGTTGKLASADIETYLLEKSRVVFQLKAERSYHIFYQITSNKKPELIEMLLITTNPYDYPFVSQGEISVASIDDQEELMATDSAIDILGFTNEEKVSIYKLTGAVMHYGNLKFKQKQREEQAEPDGTEVADKAAYLQSLNSADLLKALCYPRVKVGNEYVTKGQTVEQVSNAVGALAKAVYEKMFLWMVARINQQLDTKQPRQYFIGVLDIAGFEIFDFNSLEQLCINFTNEKLQQFFNHHMFVLEQEEYKKEGIEWTFIDFGMDLAACIELIEKPMGIFSILEEECMFPKATDTSFKNKLYDQHLGKSANFQKPKVVKGKAEAHFALIHYAGVVDYNITGWLEKNKDPLNETVVGLYQKSAMKTLAQLFSGAQTAEGEGAGGGAKKGGKKKGSSFQTVSALFREEQSNTNLAKFRKLQHELEEAEERADIAESQVNKLRVKSREVHTKVISEE

SEQ ID NO: 2844 - protein, 272 aa, Homo sapiens
MNSDSSSVSSRASSPDMDEMYLRDHHHRHHHHQESRLNSVSSTQGDMMQKMPGESLSRAGAKAAGESSKYKIKKQLSEQDLQQLRLKINGRERKRMHDLNLAMDGLREVMPYAHGPSVRKLSKIATLLLARNYILMLTSSLEEMKRLVGEIYGGHHSAFHCGTVGHSAGHPAHAANSVHPVHPILGGALSSGNASSPLSAASLPAIGTIRPPHSLLKAPSTPPALQLGSGFQHWAGLPCPCTICQMPPPPHLSALSTANMARLSAESKDLLK

SEQ ID NO: 2845 - protein, 726 aa, Homo sapiens
MAQTVQNVTLSLTLPITCHICLGKVRQPVICINNHVFCSICIDLWLKNNSQCPACRVPITPENPCKEIIGGTSESEPMLSHTVRKHLRKTRLELLHKEYEDEIDCLQKEVEELKSKNLSLESQIKTILDPLTLVQGNQNEDKHLVTDNPSKINPETVAEWKKKLRTANEIYEKVKDDVDKLKEANKKLKLENGGLVRENLRLKAEVDNRSPQKFGRFAVAALQSKVEQYERETNRLKKALERSDKYIEELESQVAQLKNSSEEKEAMNSICQTALSADGKGSKGSEEDVVSKNQGDSARKQPGSSTSSSSHLAKPSSSRLCDTSSARQESTSKADLNCSKNKDLYQEQVEVMLDVTDTSMDTYLEREWGNKPSDCVPYKDEELYDLPAPCTPLSLSCLQLSTPENRESSVVQAGGSKKHSNHLRKLVFDDFCDSSNVSNKDSSEDDISRSENEKKSECFSSPKTGFWDCCSTSYAQNLDFESSEGNTIANSVGEISSKLSEKSGLCLSKRLNSIRSFEMNRTRTSSEASMDAAYLDKISELDSMMSESDNSKSPCNNGFKSLDLDGLSKSSQGSEFLEEPDKLEEKTELNLSKGSLTNDQLENGSEWKPTSFFLLSPSDQEMNEDFSLHSSSCPVTNEIKPPSCLFQTEFSQGILLSSSHRLFEDQRFGSSLFKMSSEMHSLHNHLQSPWSTSFVPEKRNKNVNQSTKRKIQSSLSSASPSKATKS

SEQ ID NO: 2846 - protein, 311 aa, Homo sapiens
MELENQTRVTKFILVGFPGSLSMRAAMFLIFLVAYILTVAENVIIILLVLQNRPLHKPMYFFLANLSFLETWYISVTVPKLLFSFWSVNNSISFTLCMIQLYFFIALMCTECVLLAAMAYDRYVAICRPLHYPTIMSHGLCFRLALGSWAIGFGISLAKIYFISCLSFCGPNVINHFFCDISPVLNLSCTDMSITELVDFILALVIFLFPLFITVLSYGCILATILCMPTGKQKAFSTCASHLVVVTIFYSAIIFMYARPRVIHAFNMNKIISIFYAIVTPSLNPFIYCLRNREVKEALKKLAYCQASRSD

SEQ ID NO: 2847 - protein, 1046 aa, Homo sapiens
MASSVGNVADSTEPTKRMLSFQGLAELAHREYQAGDFEAAERHCMQLWRQEPDNTGVLLLLSSIHFQCRRLDRSAHFSTLAIKQNPLLAEAYSNLGNVYKERGQLQEAIEHYRHALRLKPDFIDGYINLAAALVAAGDMEGAVQAYVSALQYNPDLYCVRSDLGNLLKALGRLEEAKACYLKAIETQPNFAVAWSNLGCVFNAQGEIWLAIHHFEKAVTLDPNFLDAYINLGNVLKEARIFDRAVAAYLRALSLSPNHAVVHGNLACVYYEQGLIDLAIDTYRRAIELQPHFPDAYCNLANALKEKGSVAEAEDCYNTALRLCPTHADSLNNLANIKREQGNIEEAVRLYRKALEVFPEFAAAHSNLASVLQQQGKLQEALMHYKEAIRISPTFADAYSNMGNTLKEMQDVQGALQCYTRAIQINPAFADAHSNLASIHKDSGNIPEAIASYRTALKLKPDFPDAYCNLAHCLQIVCDWTDYDERMKKLVSIVADQLEKNRLPSVHPHHSMLYPLSHGFRKAIAERHGNLCLDKINVLHKPPYEHPKDLKLSDGRLRVGYVSSDFGNHPTSHLMQSIPGMHNPDKFEVFCYALSPDDGTNFRVKVMAEANHFIDLSQIPCNGKAADRIHQDGIHILVNMNGYTKGARNELFALRPAPIQAMWLGYPGTSGALFMDYIITDQETSPAEVAEQYSEKLAYMPHTFFIGDHANMFPHLKKKAVIDFKSNGHIYDNRIVLNGIDLKAFLDSLPDVKIVKMKCPDGGDNADSSNTALNMPVIPMNTIAEAVIEMINRGQIQITINGFSISNGLATTQINNKAATGEEVPRTIIVTTRSQYGLPEDAIVYCNFNQLYKIDPSTLQMWANILKRVPNSVLWLLRFPAVGEPNIQQYAQNMGLPQNRIIFSPVAPKEEHVRRGQLADVCLDTPLCNGHTTGMDVLWAGTPMVTMPGETLASRVAASQLTCLGCLELIAKNRQEYEDIAVKLGTDLEYLKKVRGKVWKQRISSPLFNTKQYTMELERLYLQMWEHYAAGNKPDHMIKPVEVTESA

SEQ ID NO: 2848 - protein, 920 aa, Homo sapiens
MLQGHFWLVREGIMISPSSPPPPNLFFFPLQIFPFPFTSFPSHLLSLTPPKACYLKAIETQPNFAVAWSNLGCVFNAQGEIWLAIHHFEKAVTLDPNFLDAYINLGNVLKEARIFDRAVAAYLRALSLSPNHAVVHGNLACVYYEQGLIDLAIDTYRRAIELQPHFPDAYCNLANALKEKGSVAEAEDCYNTALRLCPTHADSLNNLANIKREQGNIEEAVRLYRKALEVFPEFAAAHSNLASVLQQQGKLQEALMHYKEAIRISPTFADAYSNMGNTLKEMQDVQGALQCYTRAIQINPAFADAHSNLASIHKDSGNIPEAIASYRTALKLKPDFPDAYCNLAHCLQIVCDWTDYDERMKKLVSIVADQLEKNRLPSVHPHHSMLYPLSHGFRKAIAERHGNLCLDKINVLHKPPYEHPKDLKLSDGRLRVGYVSSDFGNHPTSHLMQSIPGMHNPDKFEVFCYALSPDDGTNFRVKVMAEANHFIDLSQIPCNGKAADRIHQDGIHILVNMNGYTKGARNELFALRPAPIQAMWLGYPGTSGALFMDYIITDQETSPAEVAEQYSEKLAYMPHTFFIGDHANMFPHLKKKAVIDFKSNGHIYDNRIVLNGIDLKAFLDSLPDVKIVKMKCPDGGDNADSSNTALNMPVIPMNTIAEAVIEMINRGQIQITINGFSISNGLATTQINNKAATGEEVPRTIIVTTRSQYGLPEDAIVYCNFNQLYKIDPSTLQMWANILKRVPNSVLWLLRFPAVGEPNIQQYAQNMGLPQNRIIFSPVAPKEEHVRRGQLADVCLDTPLCNGHTTGMDVLWAGTPMVTMPGETLASRVAASQLTCLGCLELIAKNRQEYEDIAVKLGTDLEYLKKVRGKVWKQRISSPLFNTKQYTMELERLYLQMWEHYAAGNKPDHMIKPVEVTESA

SEQ ID NO: 2849 - protein, 1036 aa, Homo sapiens
MASSVGNVADSTGLAELAHREYQAGDFEAAERHCMQLWRQEPDNTGVLLLLSSIHFQCRRLDRSAHFSTLAIKQNPLLAEAYSNLGNVYKERGQLQEAIEHYRHALRLKPDFIDGYINLAAALVAAGDMEGAVQAYVSALQYNPDLYCVRSDLGNLLKALGRLEEAKACYLKAIETQPNFAVAWSNLGCVFNAQGEIWLAIHHFEKAVTLDPNFLDAYINLGNVLKEARIFDRAVAAYLRALSLSPNHAVVHGNLACVYYEQGLIDLAIDTYRRAIELQPHFPDAYCNLANALKEKGSVAEAEDCYNTALRLCPTHADSLNNLANIKREQGNIEEAVRLYRKALEVFPEFAAAHSNLASVLQQQGKLQEALMHYKEAIRISPTFADAYSNMGNTLKEMQDVQGALQCYTRAIQINPAFADAHSNLASIHKDSGNIPEAIASYRTALKLKPDFPDAYCNLAHCLQIVCDWTDYDERMKKLVSIVADQLEKNRLPSVHPHHSMLYPLSHGFRKAIAERHGNLCLDKINVLHKPPYEHPKDLKLSDGRLRVGYVSSDFGNHPTSHLMQSIPGMHNPDKFEVFCYALSPDDGTNFRVKVMAEANHFIDLSQIPCNGKAADRIHQDGIHILVNMNGYTKGARNELFALRPAPIQAMWLGYPGTSGALFMDYIITDQETSPAEVAEQYSEKLAYMPHTFFIGDHANMFPHLKKKAVIDFKSNGHIYDNRIVLNGIDLKAFLDSLPDVKIVKMKCPDGGDNADSSNTALNMPVIPMNTIAEAVIEMINRGQIQITINGFSISNGLATTQINNKAATGEEVPRTIIVTTRSQYGLPEDAIVYCNFNQLYKIDPSTLQMWANILKRVPNSVLWLLRFPAVGEPNIQQYAQNMGLPQNRIIFSPVAPKEEHVRRGQLADVCLDTPLCNGHTTGMDVLWAGTPMVTMPGETLASRVAASQLTCLGCLELIAKNRQEYEDIAVKLGTDLEYLKKVRGKVWKQRISSPLFNTKQYTMELERLYLQMWEHYAAGNKPDHMIKPVEVTESA

SEQ ID NO: 2850 - protein, 665 aa, Homo sapiens
MHYKEAIRISPTFADAYSNMGNTLKEMQDVQGALQCYTRAIQINPAFADAHSNLASIHKDSGNIPEAIASYRTALKLKPDFPDAYCNLAHCLQIVCDWTDYDERMKKLVSIVADQLEKNRLPSVHPHHSMLYPLSHGFRKAIAERHGNLCLDKINVLHKPPYEHPKDLKLSDGRLRVGYVSSDFGNHPTSHLMQSIPGMHNPDKFEVFCYALSPDDGTNFRVKVMAEANHFIDLSQIPCNGKAADRIHQDGIHILVNMNGYTKGARNELFALRPAPIQAMWLGYPGTSGALFMDYIITDQETSPAEVAEQYSEKLAYMPHTFFIGDHANMFPHLKKKAVIDFKSNGHIYDNRIVLNGIDLKAFLDSLPDVKIVKMKCPDGGDNADSSNTALNMPVIPMNTIAEAVIEMINRGQIQITINGFSISNGLATTQINNKAATGEEVPRTIIVTTRSQYGLPEDAIVYCNFNQLYKIDPSTLQMWANILKRVPNSVLWLLRFPAVGEPNIQQYAQNMGLPQNRIIFSPVAPKEEHVRRGQLADVCLDTPLCNGHTTGMDVLWAGTPMVTMPGETLASRVAASQLTCLGCLELIAKNRQEYEDIAVKLGTDLEYLKKVRGKVWKQRISSPLFNTKQYTMELERLYLQMWEHYAAGNKPDHMIKPVEVTESA

SEQ ID NO: 2851 - protein, 311 aa, Homo sapiens
MSGENNSSVTEFILAGLSEQPELQLPLFLLFLGIYVVTVVGNLGMTTLIWLSSHLHTPMYYFLSSLSFIDFCHSTVITPKMLVNFVTEKNIISYPECMTQLYFFLVFAIAECHMLAAMAYDRYMAICSPLLYSVIISNKACFSLILGVYIIGLVCASVHTGCMFRVQFCKFDLINHYFCDLLPLLKLSCSSIYVNKLLILCVGAFNILVPSLTILCSYIFIIASILHIRSTEGRSKAFSTCSSHMLAVVIFFGSAAFMYLQPSSISSMDQGKVSSVFYTIIVPMLNPLIYSLRNKDVHVSLKKMLQRRTLL

SEQ ID NO: 2852 - protein, 339 aa, Homo sapiens
MSYFPILFFFFLKRCPSYTEPQNLTGVSEFLLLGLSEDPELQPVLAGLFLSMYLVTVLGNLLIILAVSSDSHLHTPMYFFLSNLSLADIGFTSTTVPKMIVDMQTHSRVISYEGCLTQMSFFVLFACMDDMLLSVMAYDRFVAICHPLHYRIIMNPRLCGFLILLSFFISLLDSQLHNLIMLQLTCFKDVDISNFFCDPSQLLHLRCSDTFINEMVIYFMGAIFGCLPISGILFSYYKIVSPILRVPTSDGKYKAFSTCGSHLAVVCLFYGTGLVGYLSSAVLPSPRKSMVASVMYTVVTPMLNPFIYSLRNKDIQSALCRLHGRIIKSHHLHPFCYMG

SEQ ID NO: 2853 - protein, 312 aa, Homo sapiens
MMGRRNNTNVADFILMGLTLSEEIQMALFMLFLLIYLITMLGNVGMILIIRLDLQLHTPMYFFLTHLSFIDLSYSTVVTPKTLANLLTSNYISFTGCFAQMFFFAFLGTAECYLLSSMAHDRYAAICSPLHYTVIMSKRLCLALITGPYVIGFIDSFVNVVSMSRLHFYDSNVIHHFFCDTSPILALSCTDTYNTEILIFIIVGSTLMVSLFTISASYVFILFTILKINSTSGKQKAFSTCVSHLLGVTIFYSTLIFTYLKPRKSYSLGRDQVASVFYTIVIPVLNPLIYSLRNKEVKNAVIRVMQRRQDSR

SEQ ID NO: 2854 - protein, 311 aa, Homo sapiens
MSKTSLVTAFILTGLPHAPGLDAPLFGIFLVVYVLTVLGNLLILLVIRVDSHLHTPMYYFLTNLSFIDMWFSTVTVPKMLMTLVSPSGRAISFHSCVAQLYFFHFLGSTECFLYTVMSYDRYLAISYPLRYTSMMSGSRCALLATSTWLSGSLHSAVQTILTFHLPYCGPNQIQHYLCDAPPILKLACADTSANEMVIFVDIGLVASGCFLLIVLSYVSIVCSILRIHTSEGRHRAFQTCASHCIVVLCFFVPCVFIYLRPGSRDVVDGVVAIFYTVLTPLLNPVVYTLRNKEVKKAVLKLRDKVAHSQGE

SEQ ID NO: 2855 - protein, 310 aa, Homo sapiens
MVKAGNETQISEFLLLGFSEKQELQPFLFGLFLSMYLVTVLGNLLIILAAISDSCLHTPMYFFLSNLSFVDICFASTMVPKMLVNIQTQSKVITYAGCITQMCFFVLFIVLDSLLLTVMAYDQFVAICHPLHYTVIMSPQLCGLLVLVSWIMSVLNSMLQSLVTLQLSFCTDLEIPHFFCELNEMIHLACSDTFVNNMVMHFAAVLLDGGPLVGILYSYCRIVSSIRAISSTQGKYKALSTCASHLSVVSIFYGTGLGVYLSSTMTQNLHSTAVASVMYTVVTPMLNPFIYSLRNKDIKGALTQFFRGKQ

SEQ ID NO: 2856 - protein, 310 aa, Homo sapiens
MMDNHSSATEFHLLGFPGSQGLHHILFAIFFFFYLVTLMGNTVIIVIVCVDKRLQSPMYFFLSHLSTLEILVTTIIVPMMLWGLLFLGCRQYLSLHVSLNFSCGTMEFALLGVMAVDRYVAVCNPLRYNIIMNSSTCIWVVIVSWVFGFLSEIWPIYATFQFTFRKSNSLDHFYCDRGQLLKLSCDNTLLTEFILFLMAVFILIGSLIPTIVSYTYIISTILKIPSASGRRKAFSTFASHFTCVVIGYGSCLFLYVKPKQTQGVEYNKIVSLLVSVLTPFLNPFIFTLRNDKVKEALRDGMKRCCQLLKD

SEQ ID NO: 2857 - protein, 313 aa, Homo sapiens
MERINSTLLTAFILTGIPYPLRLRTLFFVFFFLIYILTQLGNLLILITVWADPRLHARPMYIFLGVLSVIDMSISSIIVPRLMMNFTLGVKPIPFGGCVAQLYFYHFLGSTQCFLYTLMAYDRYLAICQPLRYPVLMTAKLSALLVAGAWMAGSIHGALQAILTFRLPYCGPNQVDYFFCDIPAVLRLACADTTVNELVTFVDIGVVVASCFSLILLSYIQIIQAILRIHTADGRRRAFSTCGAHVTVVTVYYVPCAFIYLRPETNSPLDGAAALVPTAITPFLNPLIYTLRNQEVKLALKRMLRSPRTPSEV

SEQ ID NO: 2858 - protein, 312 aa, Homo sapiens
MDGDNQSENSQFLLLGISESPEQQRILFWMFLSMYLVTVLGNVLIILAISSDSHLHTPMYFFLANLSFTDLFFVTNTIPKMLVNFQSQNKAISYAGCLTQLYFLVSLVTLDNLILAVMAYDRYVATCCPLHYVTAMSPGLCVLLLSLCWGLSVLYGLLLTFLLTRVTFCGPREIHYLFCDMYILLWLACSNTHIIHTALIATGCFIFLTPLGFMTTSYVRIVRTILQMPSASKKYKTFSTCASHLGVVSLFYGTLAMVYLQPLHTYSMKDSVATVMYAVLTPMMNPFIYRLRNKDMHGAPGRVLWRPFQRPK

SEQ ID NO: 2859 - protein, 802 aa, Homo sapiens
MGHPPLEFSDCYLDSPDFRERLKCYEQELERTNKFIKDVIKDGNALISAMRNYSSAVQKFSQTLQSFQFDFIGDTLTDDEINIAESFKEFAELLNEVENERMMMVHNASDLLIKPLENFRKEQIGFTKERKKKFEKDGERFYSLLDRHLHLSSKKKESQLQEADLQVDKERHNFFESSLDYVYQIQEVQESKKFNIVEPVLAFLHSLFISNSLTVELTQDFLPYKQQLQLSLQNTRNHFSSTREEMEELKKRMKEAPQTCKLPGQPTIEGYLYTQEKWALGISWVKYYCQYEKETKTLTMTPMEQKPGAKQGPLDLTLKYCVRRKTESIDKRFCFDIETNERPGTITLQALSEANRRLWMEAMDGKEPIYHSPITKQQEMELNEVGFKFVRKCINIIETKGIKTEGLYRTVGSNIQVQKLLNAFFDPKCPGDVDFHNSDWDIKTITSSLKFYLRNLSEPVMTYRLHKELVSAAKSDNLDYRLGAIHSLVYKLPEKNREMLELLIRHLVNVCEHSKENLMTPSNMGVIFGPTLMRAQEDTVAAMMNIKFQNIVVEILIEHFGKIYLGPPEESAAPPVPPPRVTARRHKPITISKRLLRERTVFYTSSLDESEDEIQHQTPNGTITSSIEPPKPPQHPKLPIQRSGETDPGRKSPSRPILDGKLEPCPEVDVGKLVSRLQDGGTKITPKATNGPMPGSGPTKTPSFHIKRPAPRPLAHHKEGDADSFSKVRPPGEKPTIIRPPVRPPDPPCRAATPQKPEPKPDIVAGNAGEITSSVVASRTRFFETASRKTGSSQGRLPGDES

SEQ ID NO: 2860 - protein, 311 aa, Homo sapiens
MGHPPLEFSDCYLDSPDFRERLKCYEQELERTNKFIKDVIKDGNALISAMRNYSSAVQKFSQTLQSFQFDFIGDTLTDDEINIAESFKEFAELLNEVENERMMMVHNASDLLIKPLENFRKEQIGFTKERKKKFEKDGERFYSLLDRHLHLSSKKKESQLQEADLQVDKERHNFFESSLDYVYQIQEVQESKKFNIVEPVLAFLHSLFISNSLTVELTQDFLPYKQQLQLSLQNTRNHFSSTREEMEELKKRMKEAPQTCKLPGQPTIEGYLYTQEKCVWGHRGIHWVSISQELLPLVGCEFWAPLLFIDP

SEQ ID NO: 2861 - protein, 311 aa, Homo sapiens
MSNASLVTAFILTGLPHAPGLDALLFGIFLVVYVLTVLGNLLILLVIRVDSHLHTPMYYFLTNLSFIDMWFSTVTVPKMLMTLVSPSGRAISFHSCVAQLYFFHFLGSTECFLYTVMSYDRYLAISYPLRYTSMMSGSRCALLATGTWLSGSLHSAVQTILTFHLPYCGPNQIQHYFCDAPPILKLACADTSANVMVIFVDIGIVASGCFVLIVLSYVSIVCSILRIRTSDGRRRAFQTCASHCIVVLCFFVPCVVIYLRPGSMDAMDGVVAIFYTVLTPLLNPVVYTLRNKEVKKAVLKLRDKVAHPQRK

SEQ ID NO: 2862 - protein, 626 aa, Homo sapiens
MCSTLKKCGTYRTEVAECHDHGSTFQGRKKGGSSFRDNFDKRSCHYEHGGYERPPSHCQENDGSVEMRDVHKDQQLRHTPYSIRCERRMKWHSEDEIRITTWRNRKPPERKMSQNTQDGYTRNWFKVTIPYGIKYDKAWLMNSIQSHCSDRFTPVDFHYVRNRACFFVQDASAASALKDVSYKIYDDENQKICIFVNHSTAPYSVKNKLKPGQMEMLKLTMNKRYNVSQQALDLQNLRFDPDLMGRDIDIILNRRNCMAATLKIIERNFPELLSLNLCNNKLYQLDGLSDITEKAPKVKTLNLSKNKLESAWELGKVKGLKLEELWLEGNPLCSTFSDQSAYVSAIRDCFPKLLRLDGRELSAPVIVDIDSSETMKPCKENFTGSETLKHLVLQFLQQYYSIYDSGDRQGLLGAYHDEACFSLAIPFDPKDSAPSSLCKYFEDSRNMKTLKDPYLKGELLRRTKRDIVDSLSALPKTQHDLSSILVDVWCQTERMLCFSVNGVFKEVEGQSQGSVLAFTRTFIATPGSSSSLCIVNDELFVRDASPQETQSAFSIPVSTLSSSSEPSLSQEQQEMVQAFSAQSGMKLEWSQKCLQDNEWNYTRAGQAFTMLQTEGKIPAEAFKQIS

SEQ ID NO: 2863 - protein, 1087 aa, Homo sapiens
MDLYSTPAAALDRFVARRLQPRKEFVEKARRALGALAAALRERGGRLGAAAPRVLKTVKGGSSGRGTALKGGCDSELVIFLDCFKSYVDQRARRAEILSEMRASLESWWQNPVPGLRLTFPEQSVPGALQFRLTSVDLEDWMDVSLVPAFNVLGQAGSGVKPKPQVYSTLLNSGCQGGEHAACFTELRRNFVNIRPAKLKNLILLVKHWYHQVCLQGLWKETLPPVYALELLTIFAWEQGCKKDAFSLAEGLRTVLGLIQQHQHLCVFWTVNYGFEDPAVGQFLQRQLKRPRPVILDPADPTWDLGNGAAWHWDLLAQEAASCYDHPCFLRGMGDPVQSWKGPGLPRAGCSGLGHPIQLDPNQKTPENSKSLNAVYPRAGSKPPSCPAPGPTGAASIVPSVPGMALDLSQIPTKELDRFIQDHLKPSPQFQEQVKKAIDIILRCLHENCVHKASRVSKGGSFGRGTDLRDGCDVELIIFLNCFTDYKDQGPRRAEILDEMRAQLESWWQDQVPSLSLQFPEQNVPEALQFQLVSTALKSWTDVSLLPAFDAVGQLSSGTKPNPQVYSRLLTSGCQEGEHKACFAELRRNFMNIRPVKLKNLILLVKHWYRQVAAQNKGKGPAPASLPPAYALELLTIFAWEQGCRQDCFNMAQGFRTVLGLVQQHQQLCVYWTVNYSTEDPAMRMHLLGQLRKPRPLVLDPADPTWNVGHGSWELLAQEAAALGMQACFLSRDGTSVQPWDVMPALLYQTPAGDLDKFISEFLQPNRQFLAQVNKAVDTICSFLKENCFRNSPIKVIKVVKGGSSAKGTALRGRSDADLVVFLSCFSQFTEQGNKRAEIISEIRAQLEACQQERQFEVKFEVSKWENPRVLSFSLTSQTMLDQSVDFDVLPAFDALGQLVSGSRPSSQVYVDLIHSYSNAGEYSTCFTELQRDFIISRPTKLKSLIRLVKHWYQQCTKISKGRGSLPPQHGLELLTVYAWEQGGKDSQFNMAEGFRTVLELVTQYRQLCIYWTINYNAKDKTVGDFLKQQLQKPRPIILDPADPTGNLGHNARWDLLAKEAAACTSALCCMGRNGIPIQPWPVKAAV

SEQ ID NO: 2864 - protein, 312 aa, Homo sapiens
MSANTSMVTEFLLLGFSHLADLQGLLFSVFLTIYLLTVAGNFLIVVLVSTDAALQSPMYFFLRTLSALEIGYTSVTVPLLLHHLLTGRRHISRSGCALQMFFFLFFGATECCLLAAMAYDRYAAICEPLRYPLLLSHRVCLQLAGSAWACGVLVGLGHTPFIFSLPFCGPNTIPQFFCEIQPVLQLVCGDTSLNELQIILATALLILCPFGLILGSYGRILVTIFRIPSVAGRRKAFSTCSSHLIMVSLFYGTALFIYIRPKASYDPATDPLVSLFYAVVTPILNPIIYSLRNTEVKAALKRTIQKTVPMEI

SEQ ID NO: 2865 - protein, 501 aa, Homo sapiens
MAASWRLGCDPRLLRYLVGFPGRRSVGLVKGALGWSVSRGANWRWFHSTQWLRGDPIKILMPSLSPTMEEGNIVKWLKKEGEAVSAGDALCEIETDKAVVTLDASDDGILAKIVVEEGSKNIRLGSLIGLIVEEGEDWKHVEIPKDVGPPPPVSKPSEPRPSPEPQISIPVKKEHIPGTLRFRLSPAARNILEKHSLDASQGTATGPRGIFTKEDALKLVQLKQTGKITESRPTPAPTATPTAPSPLQATAGPSYPRPVIPPVSTPGQPNAVGTFTEIPASNIRRVIAKRLTESKSTVPHAYATADCDLGAVLKVRQDLVKDDIKVSVNDFIIKAAAVTLKQMPDVNVSWDGEGPKQLPFIDISVAVATDKGLLTPIIKDAAAKGIQEIADSVKALSKKARDGKLLPEEYQGGSFSISNLGMFGIDEFTAVINPPQACILAVGRFRPVLKLTEDEEGNAKLQQRQLITVTMSSDSRVVDDELATRFLKSFKANLENPIRLA

SEQ ID NO: 2866 - protein, 274 aa, Homo sapiens
MAASWRLGCDPRLLRYLVGFPGRRSVGLVKGALGWSVSRGANWRWFHSTQWLRGDPIKILMPSLSPTMEEGNIVKWLKKEGEAVSAGDALCEIETDKAVVTLDASDDGILAKIVQMPDVNVSWDGEGPKQLPFIDISVAVATDKGLLTPIIKDAAAKGIQEIADSVKALSKKARDGKLLPEEYQGGSFSISNLGMFGIDEFTAVINPPQACILAVGRFRPVLKLTEDEEGNAKLQQRQLITVTMSSDSRVVDDELATRFLKSFKANLENPIRLA

SEQ ID NO: 2867 - protein, 486 aa, Homo sapiens
MQSGGAEGSPGAGRTGRGPGSGKAPPAEISSGAPDFPGGDPIKILMPSLSPTMEEGNIVKWLKKEGEAVSAGDALCEIETDKAVVTLDASDDGILAKIVVEEGSKNIRLGSLIGLIVEEGEDWKHVEIPKDVGPPPPVSKPSEPRPSPEPQISIPVKKEHIPGTLRFRLSPAARNILEKHSLDASQGTATGPRGIFTKEDALKLVQLKQTGKITESRPTPAPTATPTAPSPLQATAGPSYPRPVIPPVSTPGQPNAVGTFTEIPASNIRRVIAKRLTESKSTVPHAYATADCDLGAVLKVRQDLVKDDIKVSVNDFIIKAAAVTLKQMPDVNVSWDGEGPKQLPFIDISVAVATDKGLLTPIIKDAAAKGIQEIADSVKALSKKARDGKLLPEEYQGGSFSISNLGMFGIDEFTAVINPPQACILAVGRFRPVLKLTEDEEGNAKLQQRQLITVTMSSDSRVVDDELATRFLKSFKANLENPIRLA

SEQ ID NO: 2868 - protein, 348 aa, Homo sapiens
MRKMSEEEFYLFKNISSVGPWDGPQYHIAPVWAFYLQAAFMGTVFLIGFPLNAMVLVATLRYKKLRQPLNYILVNVSFGGFLLCIFSVFPVFVASCNGYFVFGRHVCALEGFLGTVAGLVTGWSLAFLAFERYIVICKPFGNFRFSSKHALTVVLATWTIGIGVSIPPFFGWSRFIPEGLQCSCGPDWYTVGTKYRSESYTWFLFIFCFIVPLSLICFSYTQLLRALKAVAAQQQESATTQKAEREVSRMVVVMVGSFCVCYVPYAAFAMYMVNNRNHGLDLRLVTIPSFFSKSACIYNPIIYCFMNKQFQACIMKMVCGKAMTDESDTCSSQKTEVSTVSSTQVGPN

SEQ ID NO: 2869 - protein, 364 aa, Homo sapiens
MAQQWSLQRLAGRHPQDSYEDSTQSSIFTYTNSNSTRGPFEGPNYHIAPRWVYHLTSVWMIFVVIASVFTNGLVLAATMKFKKLRHPLNWILVNLAVADLAETVIASTISVVNQVYGYFVLGHPMCVLEGYTVSLCGITGLWSLAIISWERWMVVCKPFGNVRFDAKLAIVGIAFSWIWAAVWTAPPIFGWSRYWPHGLKTSCGPDVFSGSSYPGVQSYMIVLMVTCCITPLSIIVLCYLQVWLAIRAVAKQQKESESTQKAEKEVTRMVVVMVLAFCFCWGPYAFFACFAAANPGYPFHPLMAALPAFFAKSATIYNPVIYVFMNRQFRNCILQLFGKKVDDGSELSSASKTEVSSVSSVSPA

SEQ ID NO: 2870 - protein, 313 aa, Homo sapiens
MKRENQSSVSEFLLLDLPIWPEQQAVFFTLFLGMYLITVLGNLLIILLIRLDSHLHTPMFFFLSHLALTDISLSSVTVPKMLLSMQTQDQSILYAGCVTQMYFFIFFTDLDNFLLTSMAYDRYVAICHPLRYTTIMKEGLCNLLVTVSWILSCTNALSHTLLLAQLSFCADNTIPHFFCDLVALLKLSCSDISLNELVIFTVGQAVITLPLICILISYGHIGVTILKAPSTKGIFKALSTCGSHLSVVSLYYGTIIGLYFLPSSSASSDKDVIASVMYTVITPLLNPFIYSLRNRDIKGALERLFNRATVLSQ

SEQ ID NO: 2871 - protein, 318 aa, Homo sapiens
MEWENQTILVEFFLKGHSVHPRLELLFFVLIFIMYVVILLGNGTLILISILDPHLHTPMYFFLGNLSFLDICYTTTSIPSTLVSFLSERKTISFSGCAVQMFLGLAMGTTECVLLGMMAFDRYVAICNPLRYPIIMSKNAYVPMAVGSWFAGIVNSAVQTTFVVQLPFCRKNVINHFSCEILAVMKLACADISGNEFLMLVATILFTLMPLLLIVISYSLIISSILKIHSSEGRSKAFSTCSAHLTVVIIFYGTILFMYMKPKSKETLNSDDLDATDKIISMFYGVMTPMMNPLIYSLRNKDVKEAVKHLPNRRFFSK

SEQ ID NO: 2872 - protein, 193 aa, Homo sapiens
MKDFVRLQSSFLLCTILTLSEQESVSVGCTSSMFWVVAEPTLLGQDHILHSDEASLGTGCPVTNVTAKGYEFNYPATQCGIQKEVFSYVTVFYSALHCNIMHKGVTGKIPLMCIVYGSSLDTTSSTIHNNLTEFQNDPPATNSYSPWNLTNASLFGLTRIPYFQNSSVEASHQSLLLNMSHPLVHESANVAIF

SEQ ID NO: 2873 - protein, 309 aa, Homo sapiens
MLNTTSVTEFLLLGVTDIQELQPFLFVVFLTIYFISVAGNGAILMIVISDPRLHSPMYFFLGNLSCLDICYSSVTLPKMLQNFLSAHKAISFLGCISQLHFFHFLGSTEAMLLAVMAFDRFVAICKPLRYTVIMNPQLCTQMAITIWMIGFFHALLHSLMTSRLNFCGSNRIYHFFCDVKPLLKLSNQWLLSTVTGTIAMGPFFLTLLSYFYIITHLFFKTHSFSMLRKALSTCASHFMVVILLYAPVLFTYIHHASGTSMDQDRITAIMYTVVTPVLNPLIYTLRNKEVKGAFNRAMKRWLWPKEILK

SEQ ID NO: 2874 - protein, 316 aa, Homo sapiens
MEETNNSSEKGFLLLGFSDQPQLERFLFAIILYFYVLSLLGNTALILVCCLDSRLHTPMYFFLSNLSCVDICFTTSVAPQLLVTMNKKDKTMSYGGCVAQLYVAMGLGSSECILLAVMAYDRYAAVCRPLRYIAIMHPRFCASLAGGAWLSGLITSLIQCSLTVQLPLCGHRTLDHIFCEVPVLIKLACVDTTFNEAELFVASVVFLIVPVLLILVSYGFITQAVLRIKSAAGRQKAFGTCSSHLVVVIIFYGTIIFMYLQPANRRSKNQGKFVSLFYTIVTPLLNPIIYTLRNKDVKGALRTLILGSAAGQSHKD

SEQ ID NO: 2875 - protein, 315 aa, Homo sapiens
MGDWNNSDAVEPIFILRGFPGLEYVHSWLSILFCLAYLVAFMGNVTILSVIWIESSLHQPMYYFISILAVNDLGMSLSTLPTMLAVLWLDAPEIQASACYAQLFFIHTFTFLESSVLLAMAFDRFVAICHPLHYPTILTNSVIGKIGLACLLRSLGVVLPTPLLLRHYHYCHGNALSHAFCLHQDVLRLSCTDARTNSIYGLCVVIATLGVDSIFILLSYVLILNTVLDIASREEQLKALNTCVSHICVVLIFFVPVIGVSMVHRFGKHLSPIVHILMADIYLLLPPVLNPIVYSVRTKQIRLGILHKFVLRRRF

SEQ ID NO: 2876 - protein, 305 aa, Homo sapiens
MSNTNGSAITEFILLGLTDCPELQSLLFVLFLVVYLVTLLGNLGMIMLMRLDSRLHTPMYFFLTNLAFVDLCYTSNATPQMSTNIVSEKTISFAGCFTQCYIFIALLLTEFYMLAAMAYDRYVAIYDPLRYSVKTSRRVCICLATFPYVYGFSDGLFQAILTFRLTFCRSSVINHFYCADPPLIKLSCSDTYVKEHAMFISAGFNLSSSLTIVLVSYAFILAAILRIKSAEGRHKAFSTCGSHMMAVTLFYGTLFCMYIRPPTDKTVEESKIIAVFYTFVSPVLNPLIYSLRNKDVKQALKNVLR

SEQ ID NO: 2877 - protein, 312 aa, Homo sapiens
MDLKNGSLVTEFILLGFFGRWELQIFFFVTFSLIYGATVMGNILIMVTVTCRSTLHSPLYFLLGNLSFLDMCLSTATTPKMIIDLLTDHKTISVWGCVTQMFFMHFFGGAEMTLLIIMAFDRYVAICKPLHYRTIMSHKLLKGFAILSWIIGFLHSISQIVLTMNLPFCGHNVINNIFCDLPLVIKLACIETYTLELFVIADSGLLSFTCFILLLVSYIVILVSVPKKSSHGLSKALSTLSAHIIVVTLFFGPCIFIYVWPFSSLASNKTLAVFYTVITPLLNPSIYTLRNKKMQEAIRKLRFQYVSSAQNF

SEQ ID NO: 2878 - protein, 308 aa, Homo sapiens
METQNLTVVTEFILLGLTQSQDAQLLVFVLVLIFYLIILPGNFLIIFTIKSDPGLTAPLYFFLGNLALLDASYSFIVVPRMLVDFLSEKKVISYRSCITQLFFLHFLGAGEMFLLVVMAFDRYIAICRPLHYSTIMNPRACYALSLVLWLGGFIHSIVQVALILHLPFCGPNQLDNFFCDVPQVIKLACTNTFVVELLMVSNSGLLSLLCFLGLLASYAVILCRIREHSSEGKSKAISTCTTHIIIIFLMFGPAIFIYTCPFQAFPADKVVSLFHTVIFPLMNPVIYTLRNQEVKASMRKLLSQHMFC

SEQ ID NO: 2879 - protein, 320 aa, Homo sapiens
MEMRNTTPDFILLGLFNHTRAHQVLFMMLLATVLTSLFSNALMILLIHWDHRLHRPMYFLLSQLSLMDMMLVSTTVPKMAADYLTGNKAISRAGCGVQIFFLPTLGGGECFLLAAMAYDRYAAVCHPLRYPTLMSWQLCLRMTMSSWLLGAADGLLQAVATLSFPYCGAHEIDHFFCEAPVLVRLACADTSVFENAMYICCVLMLLVPFSLILSSYGLILAAVLLMRSTEARKKAFATCSSHVAVVGLFYGAGIFTYMRPKSHRSTNHDKVVSAFYTMFTPLLNPLIYSVRNSEVKEALKRWLGTCVNLKHQQNEAHRSR

SEQ ID NO: 2880 - protein, 312 aa, Homo sapiens
MDGENHSVVSEFLFLGLTHSWEIQLLLLVFSSVLYVASITGNILIVFSVTTDPHLHSPMYFLLASLSFIDLGACSVTSPKMIYDLFRKRKVISFGGCIAQIFFIHVVGGVEMVLLIAMAFDRYVALCKPLHYLTIMSPRMCLSFLAVAWTLGVSHSLFQLAFLVNLAFCGPNVLDSFYCDLPRLLRLACTDTYRLQFMVTVNSGFICVGTFFILLISYVFILFTVWKHSSGGSSKALSTLSAHSTVVLLFFGPPMFVYTRPHPNSQMDKFLAIFDAVLTPFLNPVVYTFRNKEMKAAIKRVCKQLVIYKRIS

SEQ ID NO: 2881 - protein, 365 aa, Homo sapiens
MASTESSLLRSLGLSPGPGSSEVELDCWFDEDFKFILLPVSYAVVFVLGLGLNAPTLWLFIFRLRPWDATATYMFHLALSDTLYVLSLPTLIYYYAAHNHWPFGTEICKFVRFLFYWNLYCSVLFLTCISVHRYLGICHPLRALRWGRPRLAGLLCLAVWLVVAGCLVPNLFFVTTSNKGTTVLCHDTTRPEEFDHYVHFSSAVMGLLFGVPCLVTLVCYGLMARRLYQPLPGSAQSSSRLRSLRTIAVVLTVFAVCFVPFHITRTIYYLARLLEADCRVLNIVNVVYKVTRPLASANSCLDPVLYLLTGDKYRRQLRQLCGGGKPQPRTAASSLALVSLPEDSSCRWAATPQDSSCSTPRADRL

SEQ ID NO: 2882 - protein, 596 aa, Homo sapiens
MGRGARAAAAQSRWGRASRASVSPGRTIRSAPAVGEAQETEAAPEKENRVDVGAEERAAATRPRQKSWLVRHFSLLLRRDRQAQKAGQLFSGLLALNVVFLGGAFICSMIFNKVAVTLGDVWILLATLKVLSLLWLLYYVASTTRRPHAVLYQDPHAGPLWVRGSLVLFGSCTFCLNIFRVGYDVSHIRCKSQLDLVFSVIEMVFIGVQTWVLWKHCKDCVRVQTNFTRCGLMLTLATNLLLWVLAVTNDSMHREIEAELGILMEKSTGNETNTCLCLNATACEAFRRGFLMLYPFSTEYCLICCAVLFVMWKNVGRHVAPHMGAHPATAPFHLHGAIFGPLLGLLVLLAGVCVFVLFQIEASGPAIACQYFTLYYAFYVAVLPTMSLACLAGTAIHGLEERELDTVKNPTRSLDVVLLMGAALGQMGIAYFSIVAIVAKRPHELLNRLILAYSLLLILQHIAQNLFIIEGLHRRPLWETVPEGLAGKQEAEPPRRGSLLELGQGLQRASLAYIHSYSHLNWKRRALKEISLFLILCNITLWMMPAFGIHPEFENGLEKDFYGYQIWFAIVNFGLPLGVFYRMHSVGGLVEVYLGA

SEQ ID NO: 2883 - protein, 309 aa, Homo sapiens
MVRLTLDLIARNSNLKPRKEETISQCLKKITHINFSDKNIDAIEDLSLCKNLSVLYLYDNCISQITNLNYATNLTHLYLQNNCISCIENLRSLKKLEKLYLGGNYIAVIEGLEGLGELRELHVENQRLPLGEKLLFDPRTLHSLAKSLCILNISNNNIDDITDLELLENLNQLIAVDNQLLHVKDLEFLLNKLMKLWKIDLNGNPVCLKPKYRDRLILVSKSLEFLDGKEIKNIERQFLMNWKASKDAKKISKKRSSKNEDASNSLISNFKTMHHIVPVYYPQVGKPKLAFFSEIQRYPVNANASPESS

SEQ ID NO: 2884 - protein, 228 aa, Homo sapiens
MVRLTLDLIARNSNLKPRKEETISQCLKKITHINFSDKNIDAIEDLSLCKNLSVLYLYDNCISQITNLNYATNLTHLYLQNNCISCIENLRSLKKLEKLYLGGNYIAVIEGLEGLGELRELHVENQRLPLGEKLLFDPRTLHSLAKSLCILNISNNNIDDITDLELLENLNQLIAVDNQLLHVKDLEFLLNKLMKLWKIDLNGNPVCLKPKYRDRLILVSKSLGTYLY

SEQ ID NO: 2885 - protein, 966 aa, Homo sapiens
MFWKFDLNTTSHVDKLLDKEHVTLQELMDEDDILQECKAQNQKLLDFLCRQQCMEELVSLITQDPPLDMEEKVRFKYPNTACELLTCDVPQISDRLGGDESLLSLLYDFLDHEPPLNPLLASFFSKTIGNLIARKTEQVITFLKKKDKFISLVLKHIGTSALMDLLLRLVSCVEPAGLRQDVLHWLNEEKVIQRLVELIHPSQDEDRQSNASQTLCDIVRLGRDQGSQLQEALEPDPLLTALESQDCVEQLLKNMFDGDRTESCLVSGTQVLLTLLETRRVGTEGLVDSFSQGLERSYAVSSSVLHGIEPRLKDFHQLLLNPPKKKAILTTIGVLEEPLGNARLHGARLMAALLHTNTPSINQELCRLNTMDLLLDLFFKYTWNNFLHFQVELCIAAILSHAAREERTEASGSESRVEPPHENGNRSLETPQPAASLPDNTMVTHLFQKCCLVQRILEAWEANDHTQAAGGMRRGNMGHLTRIANAVVQNLERGPVQTHISEVIRGLPADCRGRWESFVEETLTETNRRNTVDLVSTHHLHSSSEDEDIEGAFPNELSLQQAFSDYQIQQMTANFVDQFGFNDEEFADQDDNINAPFDRIAEINFNIDADEDSPSAALFEACCSDRIQPFDDDEDEDIWEDSDTRCAARVMARPRFGAPHASESCSKNGPERGGQDGKASLEAHRDAPGAGAPPAPGKKEAPPVEGDSEGAMWTAVFDEPANSTPTAPGVVRDVGSSVWAAGTSAPEEKGWAKFTDFQPFCCSESGPRCSSPVDTECSHAEGSRSQGPEKASQASYFAVSPASPCAWNVCVTRKAPLLASDSSSSGGSHSEDGDQKAASAMDAVSRGPGREAPPLPTVARTEEAVGRVGCADSRLLSPACPAPKEVTAAPAVAVPPEATVAITTALSKAGPAIPTPAVSSALAVAVPLGPIMAVTAAPAMVATLGTVTKDGKTDAPPEGAALNGPV

SEQ ID NO: 2886 - protein, 927 aa, Homo sapiens
MFWKFDLNTTSHVDKLLDKEHVTLQELMDEDDILQECKAQNQKLLDFLCRQQCMEELVSLITQDPPLDMEEKVRFKYPNTACELLTCDVPQISDRLGGDESLLSLLYDFLDHEPPLNPLLASFFSKTIGNLIARKTEQVITFLKKKDKFISLVLKHIGTSALMDLLLRLVSCVEPAGLRQDVLHWLNEEKVIQRLVELIHPSQDEDRQSNASQTLCDIVRLGRDQGSQLQEALEPDPLLTALESQDCVEQLLKNMFDGDRTESCLVSGTQVLLTLLETRRVGTEGLVDSFSQGLERSYAVSSSVLHGIEPRLKDFHQLLLNPPKKKAILTTIGVLEEPLGNARLHGARLMAALLHTNTPSINQELCRLNTMDLLLDLFFKYTWNNFLHFQVELCIAAILSHAAREERTEASGSESRVEPPHENGNRSLETPQPAASLPDNTMVTHLFQKCCLVQRILEAWEANDHTQAAGGMRRGNMGHLTRIANAVVQNLERGPVQTHISEVIRGLPADCRGRWESFVEETLTETNRRNTVDLAFSDYQIQQMTANFVDQFGFNDEEFADQDDNINAPFDRIAEINFNIDADEDSPSAALFEACCSDRIQPFDDDEDEDIWEDSDTRCAARVMARPRFGAPHASESCSKNGPERGGQDGKASLEAHRDAPGAGAPPAPGKKEAPPVEGDSEAGAMWTAVFDEPANSTPTAPGVVRDVGSSVWAAGTSAPEEKGWAKFTDFQPFCCSESGPRCSSPVDTECSHAEGSRSQGPEKAFSPASPCAWNVCVTRKAPLLASDSSSSGGSHSEDGDQKAASAMDAVSRGPGREAPPLPTVARTEEAVGRVGCADSRLLSPACPAPKEVTAAPAVAVPPEATVAITTALSKAGPAIPTPAVSSALAVAVPLGPIMAVTAAPAMVATLGTVTKDGQMPRQKELP

SEQ ID NO: 2887 - protein, 933 aa, Homo sapiens
MFWKFDLNTTSHVDKLLDKEHVTLQELMDEDDILQECKAQNQKLLDFLCRQQCMEELVSLITQDPPLDMEEKVRFKYPNTACELLTCDVPQISDRLGGDESLLSLLYDFLDHEPPLNPLLASFFSKTIGNLIARKTEQVITFLKKKDKFISLVLKHIGTSALMDLLLRLVSCVEPAGLRQDVLHWLNEEKVIQRLVELIHPSQDEDRQSNASQTLCDIVRLGRDQGSQLQEALEPDPLLTALESRQDCVEQLLKNMFDGDRTESCLVSGTQVLLTLLETRRVGTEGLVDSFSQGLERSYAVSSSVLHGIEPRLKDFHQLLLNPPKKKAILTTIGVLEEPLGNARLHGARLMAALLHTNTPSINQELCRLNTMDLLLDLFFKYTWNNFLHFQVELCIAAILSHAAREERTEASGSESRVEPPHENGNRSLETPQPAASLPDNTMVTHLFQKCCLVQRILEAWEANDHTQAAGGMRRGNMGHLTRIANAVVQNLERGPVQTHISEVIRGLPADCRGRWESFVEETLTETNRRNTVDLAFSDYQIQQMTANFVDQFGFNDEEFADQDDNINAPFDRIAEINFNIDADEDSPSAALFEACCSDRIQPFDDDEDEDIWEDSDTRCAARVMARPRFGAPHASESCSKNGPERGGQDGKASLEAHRDAPGAGAPPAPGKKEAPPVEGDSEGAMWTAVFDEPANSTPTAPGVVRDVGSSVWAAGTSAPEEKGWAKFTDFQPFCCSESGPRCSSPVDTECSHAEGSRSQGPEKAFSPASPCAWNVCVTRKAPLLASDSSSSGGSHSEDGDQKAASAMDAVSRGPGREAPPLPTVARTEEAVGRVGCADSRLLSPACPAPKEVTAAPAVAVPPEATVAITTALSKAGPAIPTPAVSSALAVAVPLGPIMAVTAAPAMVATLGTVTKDGKTDAPPEGAALNGPV

SEQ ID NO: 2888 - protein, 932 aa, Homo sapiens
MFWKFDLNTTSHVDKLLDKEHVTLQELMDEDDILQECKAQNQKLLDFLCRQQCMEELVSLITQDPPLDMEEKVRFKYPNTACELLTCDVPQISDRLGGDESLLSLLYDFLDHEPPLNPLLASFFSKTIGNLIARKTEQVITFLKKKDKFISLVLKHIGTSALMDLLLRLVSCVEPAGLRQDVLHWLNEEKVIQRLVELIHPSQDEDRQSNASQTLCDIVRLGRDQGSQLQEALEPDPLLTALESQDCVEQLLKNMFDGDRTESCLVSGTQVLLTLLETRRVGTEGLVDSFSQGLERSYAVSSSVLHGIEPRLKDFHQLLLNPPKKKAILTTIGVLEEPLGNARLHGARLMAALLHTNTPSINQELCRLNTMDLLLDLFFKYTWNNFLHFQVELCIAAILSHAAREERTEASGSESRVEPPHENGNRSLETPQPAASLPDNTMVTHLFQKCCLVQRILEAWEANDHTQAAGGMRRGNMGHLTRIANAVVQNLERGPVQTHISEVIRGLPADCRGRWESFVEETLTETNRRNTVDLAFSDYQIQQMTANFVDQFGFNDEEFADQDDNINAPFDRIAEINFNIDADEDSPSAALFEACCSDRIQPFDDDEDEDIWEDSDTRCAARVMARPRFGAPHASESCSKNGPERGGQDGKASLEAHRDAPGAGAPPAPGKKEAPPVEGDSEGAMWTAVFDEPANSTPTAPGVVRDVGSSVWAAGTSAPEEKGWAKFTDFQPFCCSESGPRCSSPVDTECSHAEGSRSQGPEKAFSPASPCAWNVCVTRKAPLLASDSSSSGGSHSEDGDQKAASAMDAVSRGPGREAPPLPTVARTEEAVGRVGCADSRLLSPACPAPKEVTAAPAVAVPPEATVAITTALSKAGPAIPTPAVSSALAVAVPLGPIMAVTAAPAMVATLGTVTKDGKTDAPPEGAALNGPV

SEQ ID NO: 2889 - protein, 959 aa, Homo sapiens
MFWKFDLNTTSHVDKLLDKEHVTLQELMDEDDILQECKAQNQKLLDFLCRQQCMEELVSLITQDPPLDMEEKVRFKYPNTACELLTCDVPQISDRLGGDESLLSLLYDFLDHEPPLNPLLASFFSKTIGNLIARKTEQVITFLKKKDKFISLVLKHIGTSALMDLLLRLVSCVEPAGLRQDVLHWLNEEKVIQRLVELIHPSQDEDRQSNASQTLCDIVRLGRDQGSQLQEALEPDPLLTALESQDCVEQLLKNMFDGDRTESCLVSGTQVLLTLLETRRVGTEGLVDSFSQGLERSYAVSSSVLHGIEPRLKDFHQLLLNPPKKKAILTTIGVLEEPLGNARLHGARLMAALLHTNTPSINQELCRLNTMDLLLDLFFKYTWNNFLHFQVELCIAAILSHAAREERTEASGSESRVEPPHENGNRSLETPQPAASLPDNTMVTHLFQKCCLVQRILEAWEANDHTQAAGGMRRGNMGHLTRIANAVVQNLERGPVQTHISEVIRGLPADCRGRWESFVEETLTETNRRNTVDLVSTHHLHSSSEDEDIEGAFPNELSLQQAFSDYQIQQMTANFVDQFGFNDEEFADQDDNINAPFDRIAEINFNIDADEDSPSAALFEACCSDRIQPFDDDEDEDIWEDSDTRCAARVMARPRFGAPHASESCSKNGPERGGQDGKASLEAHRDAPGAGAPPAPGKKEAPPVEGDSEGAMWTAVFDEPANSTPTAPGVVRDVGSSVWAAGTSAPEEKGWAKFTDFQPFCCSESGPRCSSPVDTECSHAEGSRSQGPEKAFSPASPCAWNVCVTRKAPLLASDSSSSGGSHSEDGDQKAASAMDAVSRGPGREAPPLPTVARTEEAVGRVGCADSRLLSPACPAPKEVTAAPAVAVPPEATVAITTALSKAGPAIPTPAVSSALAVAVPLGPIMAVTAAPAMVATLGTVTKDGKTDAPPEGAALNGPV

SEQ ID NO: 2890 - protein, 905 aa, Homo sapiens
MFWKFDLNTTSHVDKLLDKEHVTLQELMDEDDILQECKAQNQKLLDFLCRQQCMEELLTCDVPQISDRLGGDESLLSLLYDFLDHEPPLNPLLASFFSKTIGNLIARKTEQVITFLKKKDKFISLVLKHIGTSALMDLLLRLVSCVEPAGLRQDVLHWLNEEKVIQRLVELIHPSQDEDRQSNASQTLCDIVRLGRDQGSQLQEALEPDPLLTALESQDCVEQLLKNMFDGDRTESCLVSGTQVLLTLLETRRVGTEGLVDSFSQGLERSYAVSSSVLHGIEPRLKDFHQLLLNPPKKKAILTTIGVLEEPLGNARLHGARLMAALLHTNTPSINQELCRLNTMDLLLDLFFKYTWNNFLHFQVELCIAAILSHAAREERTEASGSESRVEPPHENGNRSLETPQPAASLPDNTMVTHLFQKCCLVQRILEAWEANDHTQAAGGMRRGNMGHLTRIANAVVQNLERGPVQTHISEVIRGLPADCRGRWESFVEETLTETNRRNTVDLAFSDYQIQQMTANFVDQFGFNDEEFADQDDNINAPFDRIAEINFNIDADEDSPSAALFEACCSDRIQPFDDDEDEDIWEDSDTRCAARVMARPRFGAPHASESCSKNGPERGGQDGKASLEAHRDAPGAGAPPAPGKKEAPPVEGDSEGAMWTAVFDEPANSTPTAPGVVRDVGSSVWAAGTSAPEEKGWAKFTDFQPFCCSESGPRCSSPVDTECSHAEGSRSQGPEKAFSPASPCAWNVCVTRKAPLLASDSSSSGGSHSEDGDQKAASAMDAVSRGPGREAPPLPTVARTEEAVGRVGCADSRLLSPACPAPKEVTAAPAVAVPPEATVAITTALSKAGPAIPTPAVSSALAVAVPLGPIMAVTAAPAMVATLGTVTKDGKTDAPPEGAALNGPV

SEQ ID NO: 2891 - protein, 299 aa, Homo sapiens
MSRGPSSAVLPSALGSRKLGPRSLSCLSDLDGGVALEPRACRPPGSPGRAPPPTPAPSGCDPRLRPIILRRARSLPSSPERRQKAAGAPGAACRPGCSQKLRVRFADALGLELAQVKVFNAGDDPSVPLHVLSRLAINSDLCCSSQDLEFTLHCLVPDFPPPVEAADFGERLQRQLVCLERVTCSDLGISGTVRVCNVAFEKQVAVRYTFSGWRSTHEAVARWRGPAGPEGTEDVFTFGFPVPPFLLELGSRVHFAVRYQVAGAEYWDNNDHRDYSLTCRNHALHMPRGECEESWIHFI

SEQ ID NO: 2892 - protein, 754 aa, Homo sapiens
MGIKVQRPRCFFDIAINNQPAGRVVFELFSDVCPKTCENFRCLCTGEKGTGKSTQKPLHYKSCLFHRVVKDFMVQGGDFSEGNGRGGESIYGGFFEDESFAVKHNKEFLLSMANRGKDTNGSQFFITTKPTPHLDGHHVVFGQVISGQEVVREIENQKTDAASKPFAEVRILSCGELIPKSKVKKEEKKRHKSSSSSSSSSSDSDSSSDSQSSSDSSDSESATEEKSKKRKKKHRKNSRKHKKEKKKRKKSKKSASSESEAENLEAQPQSTVRPEEIPPIPENRFLMRKSPPKADEKERKNRERERERECNPPNSQPASYQRRLLVTRSGRKIKGRGPRRYRTPSRSRSRDRFRRSETPPHWRQEMQRAQRMRVSSGERWIKGDKSELNEIKENQRSPVRVKERKITDHRNVSESPNRKNEKEKKVKDHKSNSKERDIRRNSEKDDKYKNKVKKRAKSKSRSKSKEKSKSKERDSKHNRNEEKRMRSRSKGRDHENVKEKEKQSDSKGKDQERSRSKEKSKQLESKSNEHDHSKSKEKDRRAQSRSRECDITKGKHSYNSRTRERSRSRDRSRRVRSRTHDRDRSRSKEYHRYREQEYRRRGRSRSRERRTPPGRSRSKDRRRRRRDSRSSEREESQSRNKDKYRNQESKSSHRKENSESEKRMYSKSRDHNSSNNSREKKADRDQSPFSKIKQSSQDNELKSSMLKNKEDEKIRSSVEKENQKSKGQENDHVHEKNKKFDHESSPGTDEDKSG

SEQ ID NO: 2893 - protein, 357 aa, Homo sapiens
MGIKVQRPRCFFDIAINNQPAGRVVFELFSDVCPKTCENFRCLCTGEKGTGKSTQKPLHYKSCLFHRVVKDFMVQGGDFSEGNGRGGESIYGGFFEDESFAVKHNKEFLLSMANRGKDTNGSQFFITTKPTPHLDGHHVVFGQVISGQEVVREIENQKTDAASKPFAEVRILSCGELIPKSKVKKEEKKRHKSSSSSSSSSSDSDSSSDSQSSSDSSDSESATEEKSKKRKKKHRKNSRKHKKEKKKRKKSKKSASSESEAENLEAQPQSTVRPEEIPPIPENRFLMRKSPPKADEKERKNRERERERECNPPNSQPASYQRRLLVTRSGRKIKGRGPRVGDSFPRDLHNIAFVFLK

SEQ ID NO: 2894 - protein, 426 aa, Homo sapiens
MGPLPAPSCTQRITWKGLLLTASLLNFWNPPTTAEVTIEAQPPKVSEGKDVLLLVHNLPQNLPGYFWYKGEMTDLYHYIISYIVDGKIIIYGPAYSGRETVYSNASLLIQNVTRKDAGTYTLHIIKRGDETREEIRHFTFTLYLETPKPYISSSNLNPREAMEAVRLICDPETLDASYLWWMNGQSLPVTHRLQLSKTNRTLYLFGVTKYIAGPYECEIRNPVSASRSDPVTLNLLPKLPIPYITINNLNPRENKDVLAFTCEPKSENYTYIWWLNGQSLPVSPGVKRPIENRILILPSVTRNETGPYQCEIRDRYGGLRSNPVILNVLYGPDLPRIYPSFTYYRSGENLDLSCFTESNPPAEYFWTINGKFQQSGQKLFIPQITRNHSGLYACSVHNSATGKEISKSMTVKVSGPCHGDLTESQS

SEQ ID NO: 2895 - protein, 402 aa, Homo sapiens
MGPLPAPSCTQRITWKGLLLTASLLNFWNPPTTAEVTIEAQPPKVSEGKDVLLLVHNLPQNLPGYFWYKGEMTDLYHYIISYIVDGKIIIYGPAYSGRETVYSNASLLIQNVTRKDAGTYTLHIIKRGDETREEIRHFTFTLYLETPKPYISSSNLNPREAMEAVRLICDPETLDASYLWWMNGQSLPVTHRLQLSKTNRTLYLFGVTKYIAGPYECEIRNPVSASRSDPVTLNLLHGPDLPRIYPSFTYYRSGENLDLSCFTESNPPAEYFWTINGKFQQSGQKLFIPQITRNHSGLYACSVHNSATGKEISKSMTVKVSGKWIPASLAVGFYVESIWLSEKSQENIFIPSLCPMGTSKSQILLLNPPNLSLQTLFSLFFCFLMADLVSGLKKVGRGLYQP

SEQ ID NO: 2896 - protein, 72 aa, Homo sapiens
MASASCSPGGALASPEPGRKILPRMISHSELRKLFYSADAVCFDVDSTVISEEGIGCFHWIWRKCDQATSQG

SEQ ID NO: 2897 - protein, 56 aa, Homo sapiens
MVTRFLGPRYRELVKNWVPTAYTWGAVGAVGLVWATDWRLILDWVPYINGKFKKDN

SEQ ID NO: 2898 - protein, 42 aa, Homo sapiens
MEEGNNNEEVIHLNNFHCHRGQDFVIFFWKTQIIQREKTESL

SEQ ID NO: 2899 - protein, 186 aa, Homo sapiens
MASPSKAVIVPGNGGGDVTTHGWYGWVKKELEKIPGFQCLAKNMPDPITARESIWLPFMETELHCDEKTIIIGHSSGAIAAMRYAETHRVYAIVLVSAYTSDLGDENERASGYFTRPWQWEKIKANCPYIVQFGSTDDPFLPWKEQQEVADRLETKLHKFTDCGHFQNTEFHELITVVKSLLKVPA

SEQ ID NO: 2900 - protein, 173 aa, Homo sapiens
MASPSKAVIVPGNGGGDVTTHGWYGWVKKELEKIPGFQCLAKNMPDPITARESIWLPFMETELHCDEKTIIIGHSSGAIAAMRYAETHRVYAIVLVSAYTSDLGDENERASGYFTRPWQWEKIKANCPYIVQFGSTDDPFLPWKEQQEVADSWTPNCTNSLTVVTFRTQSSMN

SEQ ID NO: 2901 - protein, 257 aa, Homo sapiens
MVSWMICRLVVLVFGMLCPAYASYKAVKTKNIREYVRWMMYWIVFALFMAAEIVTDIFISWFPFYYEIKMAFVLWLLSPYTKGASLLYRKFVHPSLSRHEKEIDAYIVQAKERSYETVLSFGKRGLNIAASAAVQAATKSQGALAGRLRSFSMQDLRSISDAPAPAYHDPLYLEDQVSHRRPPIGYRAGGLQDSDTEDECWSDTEAVPRAPARPREKPLIRSQSLRVVKRKPPVREGTSRSLKVRTRKKTVPSDVDS

SEQ ID NO: 2902 - protein, 173 aa, Homo sapiens
MVSWMICRLVVLVFGMLCPAYASYKAVKTKNIREYVRWMMYWIVFALFMAAEIVTDIFISWFPFYYEIKMAFVLWLLSPYTKGASLLYRKFVHPSLSRHEKEIDAYIVQAKERSYETVLSFGKRGLNIAASAAVQAATKGTGPGACRTATPRMSVGQILRQSPGRQPGPERSP

SEQ ID NO: 2903 - protein, 175 aa, Homo sapiens
MLPPMALPSVSWMLLSCLILLCQVQGEETQKELPSPRISCPKGSKAYGSPCYALFLSPKSWMDADLACQKRPSGKLVSVLSGAEGSFVSSLVRSISNSYSYIWIGLHDPTQGSEPDGDGWEWSSTDVMNYFAWEKNPSTILNPGHCGSLSRSTGFLKWKDYNCDAKLPYVCKFKD

SEQ ID NO: 2904 - protein, 129 aa, Homo sapiens
MLPPMALPSVSWMLLSCLILLCQVQGEETQKELPSPRISCPKGSKAYGSPCYALFLSPKSWMDADGSEPDGDGWEWSSTDVMNYFAWEKNPSTILNPGHCGSLSRSTGFLKWKDYNCDAKLPYVCKFKD

SEQ ID NO: 2905 - protein, 698 aa, Homo sapiens
MLSPKIRQARRARSKSLVMGEQSRSPGRMPCPHRLGPVLKAGWLKKQRSIMKNWQQRWFVLRGDQLFYYKDKDEIKPQGFISLQGTQVTELPPGPEDPGKHLFEISPGGAGEREKVPANPEALLLMASSQRDMEDWVQAIRRVIWAPLGGGIFGQRLEETVHHERKYGPRLAPLLVEQCVDFIRERGLTEEGLFRMPGQANLVRDLQDSFDCGEKPLFDSTTDVHTVASLLKLYLRELPEPVVPFARYEDFLSCAQLLTKDEGEGTLELAKQVSNLPQANYNLLRYICKFLDEVQAYSNVNKMSVQNLATVFGPNILRPQVEDPVTIMEGTSLVQHLMTVLIRKHSQLFTAPVPEGPTSPRGGLQCAVGWGSEEVTRDSQGEPGGPGLPAHRTSSLDGAAVAVLSRTAPTGPGSRCSPGKKVQTLPSWKSSFRQPRSLSGSPKGGGSSLEVPIISSGGNWLMNGLSSLRGHRRASSGDRLKDSGSVQRLSTYDNVPAPGLVPGIPSVASMAWSGASSSESSVGGSLSSCTACRASDSSARSSLHTDWALEPSPLPSSSEDPKSLDLDHSMDEAGAGASNSEPSEPDSPTREHARRSEALQGLVTELRAELCRQRTEYERSVKRIEEGSADLRKRMSRLEEELDQEKKKYIMLEIKLRNSERAREDAERRNQLLQREMEEFFSTLGSLTVGAKGARAPK

SEQ ID NO: 2906 - protein, 714 aa, Homo sapiens
MLSPKIRQARRARSKSLVMGEQSRSPGRMPCPHRLGPVLKAGWLKKQRSIMKNWQQRWFVLRGDQLFYYKDKDEIKPQGFISLQGTQVTELPPGPEDPGKHLFEISPGGAGEREKVPANPEALLLMASSQRDMEDWVQAIRRVIWAPLGGGTARRSHAHPLEPLPPGIFGQRLEETVHHERKYGPRLAPLLVEQCVDFIRERGLTEEGLFRMPGQANLVRDLQDSFDCGEKPLFDSTTDVHTVASLLKLYLRELPEPVVPFARYEDFLSCAQLLTKDEGEGTLELAKQVSNLPQANYNLLRYICKFLDEVQAYSNVNKMSVQNLATVFGPNILRPQVEDPVTIMEGTSLVQHLMTVLIRKHSQLFTAPVPEGPTSPRGGLQCAVGWGSEEVTRDSQGEPGGPGLPAHRTSSLDGAAVAVLSRTAPTGPGSRCSPGKKVQTLPSWKSSFRQPRSLSGSPKGGGSSLEVPIISSGGNWLMNGLSSLRGHRRASSGDRLKDSGSVQRLSTYDNVPAPGLVPGIPSVASMAWSGASSSESSVGGSLSSCTACRASDSSARSSLHTDWALEPSPLPSSSEDPKSLDLDHSMDEAGAGASNSEPSEPDSPTREHARRSEALQGLVTELRAELCRQRTEYERSVKRIEEGSADLRKRMSRLEEELDQEKKKYIMLEIKLRNSERAREDAERRNQLLQREMEEFFSTLGSLTVGAKGARAPK

SEQ ID NO: 2907 - protein, 608 aa, Homo sapiens
MPFWPIRCLKRSRRMPRGGAGEREKVPANPEALLLMASSQRDMEDWVQAIRRVIWAPLGGGIFGQRLEETVHHERKYGPRLAPLLVEQCVDFIRERGLTEEGLFRMPGQANLVRDLQDSFDCGEKPLFDSTTDVHTVASLLKLYLRELPEPVVPFARYEDFLSCAQLLTKDEGEGTLELAKQVSNLPQANYNLLRYICKFLDEVQAYSNVNKMSVQNLATVFGPNILRPQVEDPVTIMEGTSLVQHLMTVLIRKHSQLFTAPVPEGPTSPRGGLQCAVGWGSEEVTRDSQGEPGGPGLPAHRTSSLDGAAVAVLSRTAPTGPGSRCSPGKKVQTLPSWKSSFRQPRSLSGSPKGGGSSLEVPIISSGGNWLMNGLSSLRGHRRASSGDRLKDSGSVQRLSTYDNVPAPGLVPGIPSVASMAWSGASSSESSVGGSLSSCTACRASDSSARSSLHTDWALEPSPLPSSSEDPKSLDLDHSMDEAGAGASNSEPSEPDSPTREHARRSEALQGLVTELRAELCRQRTEYERSVKRIEEGSADLRKRMSRLEEELDQEKKKYIMLEIKLRNSERAREDAERRNQLLQREMEEFFSTLGSLTVGAKGARAPK

SEQ ID NO: 2908 - protein, 494 aa, Homo sapiens
MGQPREFWHLRSQVPVPTCHLLTVQPWCLLPHPTPAGGRERRHSASSLLAALCLRKAVLRPHPAVLPGVGGCVVLSSGRMKAPLRGGLALGTGPAPTKLQLLHDWQSEPGPSGWQQGPSPPLFPAGTSLVQHLMTVLIRKHSQLFTAPVPEGPTSPRGGLQCAVGWGSEEVTRDSQGEPGGPGLPAHRTSSLDGAAVAVLSRTAPTGPGSRCSPGKKVQTLPSWKSSFRQPRSLSGSPKGGGSSLEVPIISSGGNWLMNGLSSLRGHRRASSGDRLKDSGSVQRLSTYDNVPAPGLVPGIPSVASMAWSGASSSESSVGGSLSSCTACRASDSSARSSLHTDWALEPSPLPSSSEDPKSLDLDHSMDEAGAGASNSEPSEPDSPTREHARRSEALQGLVTELRAELCRQRTEYERSVKRIEEGSADLRKRMSRLEEELDQEKKKYIMLEIKLRNSERAREDAERRNQLLQREMEEFFSTLGSLTVGAKGARAPK

SEQ ID NO: 2909 - protein, 704 aa, Homo sapiens
MLPTASSKRRTFAARYFTRSKSLVMGEQSRSPGRMPCPHRLGPVLKAGWLKKQRSIMKNWQQRWFVLRGDQLFYYKDKDEIKPQGFISLQGTQVTELPPGPEDPGKHLFEISPGGAGEREKVPANPEALLLMASSQRDMEDWVQAIRRVIWAPLGGGIFGQRLEETVHHERKYGPRLAPLLVEQCVDFIRERGLTEEGLFRMPGQANLVRDLQDSFDCGEKPLFDSTTDVHTVASLLKLYLRELPEPVVPFARYEDFLSCAQLLTKDEGEGTLELAKQVSNLPQANYNLLRYICKFLDEVQAYSNVNKMSVQNLATVFGPNILRPQVEDPVTIMEGTSLVQHLMTVLIRKHSQLFTAPVPEGPTSPRGGLQCAVGWGSEEVTRDSQGEPGGPGLPAHRTSSLDGAAVAVLSRTAPTGPGSRCSPGKKVQTLPSWKSSFRQPRSLSGSPKGGGSSLEVPIISSGGNWLMNGLSSLRGHRRASSGDRLKDSGSVQRLSTYDNVPAPGLVPGIPSVASMAWSGASSSESSVGGSLSSCTACRASDSSARSSLHTDWALEPSPLPSSSEDPKSLDLDHSMDEAGAGASNSEPSEPDSPTREHARRSEALQGLVTELRAELCRQRTEYERSVKRIEEGSADLRKRMSRLEEELDQEKKKYIMLEIKLRNSERAREDAERRNQLLQREMEEFFSTLGSLTVGAKGARAPK

SEQ ID NO: 2910 - protein, 1287 aa, Homo sapiens
MVARSTDSLDGPGEGSVQPLPTAGGPSVKGKPGKRLSAPRGPFPRLADCAHFHYENVDFGHIQLLLSPDREGPSLSGENELVFGVQVTCQGRSWPVLRSYDDFRSLDAHLHRCIFDRRFSCLPELPPPPEGARAAQMLVPLLLQYLETLSGLVDSNLNCGPVLTWMELDNHGRRLLLSEEASLNIPAVAAAHVIKRYTAQAPDELSFEVGDIVSVIDMPPTEDRSWWRGKRGFQVGFFPSECVELFTERPGPGLKADADGPPCGIPAPQGISSLTSAVPRPRGKLAGLLRTFMRSRPSRQRLRQRGILRQRVFGCDLGEHLSNSGQDVPQVLRCCSEFIEAHGVVDGIYRLSGVSSNIQRLRHEFDSERIPELSGPAFLQDIHSVSSLCKLYFRELPNPLLTYQLYGKFSEAMSVPGEEERLVRVHDVIQQLPPPHYRTLEYLLRHLARMARHSANTSMHARNLAIVWAPNLLRSMELESVGMGGAAAFREVRVQSVVVEFLLTHVDVLFSDTFTSAGLDPAGRCLLPRPKSLAGSCPSTRLLTLEEAQARTQGRLGTPTEPTTPKAPASPAERRKGERGEKQRKPGGSSWKTFFALGRGPSVPRKKPLPWLGGTRAPPQPSGSRPDTVTLRSAKSEESLSSQASGAGLQRLHRLRRPHSSSDAFPVGPAPAGSCESLSSSSSSESSSSESSSSSSESSAAGLGALSGSPSHRTSAWLDDGDELDFSPPRCLEGLRGLDFDPLTFRCSSPTPGDPAPPASPAPPAPASAFPPRVTPQAISPRGPTSPASPAALDISEPLAVSVPPAVLELLGAGGAPASATPTPALSPGRSLRPHLIPLLLRGAEAPLTDACQQEMCSKLRGAQGPLGPDMESPLPPPPLSLLRPGGAPPPPPKNPARLMALALAERAQQVAEQQSQQECGGTPPASQSPFHRSLSLEVGGEPLGTSGSGPPPNSLAHPGAWVPGPPPYLPRQQSDGSLLRSQRPMGTSRRGLRGPAQVSAQLRAGGGGRDAPEAAAQSPCSVPSQVPTPGFFSPAPRECLPPFLGVPKPGLYPLGPPSFQPSSPAPVWRSSLGPPAPLDRGENLYYEIGASEGSPYSGPTRSWSPFRSMPPDRLNASYGMLGQSPPLHRSPDFLLSYPPAPSCFPPDHLGYSAPQHPARRPTPPEPLYVNLALGPRGPSPASSSSSSPPAHPRSRSDPGPPVPRLPQKQRAPWGPRTPHRVPGPWGPPEPLLLYRAAPPAYGRGGELHRGSLYRNGGQRGEGAGPPPPYPTPSWSLHSEGQTRSYC

SEQ ID NO: 2911 - protein, 1123 aa, Homo sapiens
MLVPLLLQYLETLSGLVDSNLNCGPVLTWMELDNHGRRLLLSEEASLNIPAVAAAHVIKRYTAQAPDELSFEVGDIVSVIDMPPTEDRSWWRGKRGFQVGFFPSECVELFTERPGPGLKADADGPPCGIPAPQGISSLTSAVPRPRGKLAGLLRTFMRSRPSRQRLRQRGILRQRVFGCDLGEHLSNSGQDVPQVLRCCSEFIEAHGVVDGIYRLSGVSSNIQRLRHEFDSERIPELSGPAFLQDIHSVSSLCKLYFRELPNPLLTYQLYGKFSEAMSVPGEEERLVRVHDVIQQLPPPHYRTLEYLLRHLARMARHSANTSMHARNLAIVWAPNLLRSMELESVGMGGAAAFREVRVQSVVVEFLLTHVDVLFSDTFTSAGLDPAGRCLLPRPKSLAGSCPSTRLLTLEEAQARTQGRLGTPTEPTTPKAPASPAERRKGERGEKQRKPGGSSWKTFFALGRGPSVPRKKPLPWLGGTRAPPQPSGSRPDTVTLRSAKSEESLSSQASGAGLQRLHRLRRPHSSSDAFPVGPAPAGSCESLSSSSSSESSSSESSSSSSESSAAGLGALSGSPSHRTSAWLDDGDELDFSPPRCLEGLRGLDFDPLTFRCSSPTPGDPAPPASPAPPAPASAFPPRVTPQAISPRGPTSPASPAALDISEPLAVSVPPAVLELLGAGGAPASATPTPALSPGRSLRPHLIPLLLRGAEAPLTDACQQEMCSKLRGAQGPLGPDMESPLPPPPLSLLRPGGAPPPPPKNPARLMALALAERAQQVAEQQSQQECGGTPPASQSPFHRSLSLEVGGEPLGTSGSGPPPNSLAHPGAWVPGPPPYLPRQQSDGSLLRSQRPMGTSRRGLRGPAQVPTPGFFSPAPRECLPPFLGVPKPGLYPLGPPSFQPSSPAPVWRSSLGPPAPLDRGENLYYEIGASEGSPYSGPTRSWSPFRSMPPDRLNASYGMLGQSPPLHRSPDFLLSYPPAPSCFPPDHLGYSAPQHPARRPTPPEPLYVNLALGPRGPSPASSSSSSPPAHPRSRSDPGPPVPRLPQKQRAPWGPRTPHRVPGPWGPPEPLLLYRAAPPAYGRGGELHRGSLYRNGGQRGEGAGPPPPYPTPSWSLHSEGQTRSYC

SEQ ID NO: 2912 - protein, 1126 aa, Homo sapiens
MVARSTDSLDGPGEGSVQPLPTAGGPSVKGKPGKRLSAPRGPFPRLADCAHFHYENVDFGHIQLLLSPDREGPSLSGENELVFGVQVTCQGRSWPVLRSYDDFRSLDAHLHRCIFDRRFSCLPELPPPPEGARAAQMLVPLLLQYLETLSGLVDSNLNCGPVLTWMELDNHGRRLLLSEEASLNIPAVAAAHVIKRYTAQAPDELSFEVGDIVSVIDMPPTEDRSWWRGKRGFQVGFFPSECVELFTERPGPGLKADADGPPCGIPAPQGISSLTSAVPRPRGKLAGLLRTFMRSRPSRQRLRQRGILRQRVFGCDLGEHLSNSGQDVPQVLRCCSEFIEAHGVVDGIYRLSGVSSNIQRLRHEFDSERIPELSGPAFLQDIHSVSSLCKLYFRELPNPLLTYQLYGKFSEAMSVPGEEERLVRVHDVIQQLPPPHYRTLEYLLRHLARMARHSANTSMHARNLAIVWAPNLLRSMELESVGMGGAAAFREVRVQSVVVEFLLTHVDVLFSDTFTSAGLDPAGRCLLPRPKSLAGSCPSTRLLTLEEAQARTQGRLGTPTEPTTPKAPASPAERRKGERGEKQRKPGGSSWKTFFALGRGPSVPRKKPLPWLGGTRAPPQPSGSRPDTVTLRSAKSEESLSSQASGAELLGAGGAPASATPTPALSPGRSLRPHLIPLLLRGAEAPLTDACQQEMCSKLRGAQGPLGPDMESPLPPPPLSLLRPGGAPPPPPKNPARLMALALAERAQQVAEQQSQQECGGTPPASQSPFHRSLSLEVGGEPLGTSGSGPPPNSLAHPGAWVPGPPPYLPRQQSDGSLLRSQRPMGTSRRGLRGPAQVSAQLRAGGGGRDAPEAAAQSPCSVPSQVPTPGFFSPAPRECLPPFLGVPKPGLYPLGPPSFQPSSPAPVWRSSLGPPAPLDRGENLYYEIGASEGSPYSGPTRSWSPFRSMPPDRLNASYGMLGQSPPLHRSPDFLLSYPPAPSCFPPDHLGYSAPQHPARRPTPPEPLYVNLALGPRGPSPASSSSSSPPAHPRSRSDPGPPVPRLPQKQRAPWGPRTPHRVPGPWGPPEPLLLYRAAPPAYGRGGELHRGSLYRNGGQRGEGAGPPPPYPTPSWSLHSEGQTRSYC

SEQ ID NO: 2913 - protein, 246 aa, Homo sapiens
MLSLSLCSHLWGPLILSALQARSTDSLDGPGEGSVQPLPTAGGPSVKGKPGKRLSAPRGPFPRLADCAHFHYENVDFGHIQLLLSPDREGPSLSGENELVFGVQVTCQGRSWPVLRSYDDFRSLDAHLHRCIFDRRFSCLPELPPPPEGARAAQMLVPLLLQYLETLSGLVDSNLNCGPVLTWMEVGLGRGLGDSEWVRGCVCHHAQHREILDGNRVASAVEDEGAEVDGEAFRWGSLWVGESWDM

SEQ ID NO: 2914 - protein, 209 aa, Homo sapiens
MRAAAISTPKLDKMPGMFFSANPKELKGTTHSLLDDKMQKRRPKTFGMDMKAYLRSMIPHLESGMKSSKSKDVLSAAEVMQWSQSLEKLLANQTGQNVFGSFLKSEFSEENIEFWLACEDYKKTESDLLPCKAEEIYKAFVHSDAAKQINIDFRTRESTAKKIKAPTPTCFDEAQKVIYTLMEKDSYPRFLKSDIYLNLLNDLQANSLK

SEQ ID NO: 2915 - protein, 169 aa, Homo sapiens
MRAAAISTPKLDKMPGMFFSANPKELKGTTHSLLDDKMQKRRPKTFGMDMKAYLRSMIPHLESGMKSSKSKDVLSAAEVMQWSQSLEKLLANQTGQNVFGSFLKSEFSEENIEFWLACEDYKKTESDLLPCKAEEIYKAFVHSDAAKQVSIKLIIISFSIKDPICRNNI

SEQ ID NO: 2916 - protein, 205 aa, Homo sapiens
MCKGLAGLPASCLRSAKDMKHRLGFLLQKSDSCEHNSSHNKKDKVVICQRVSQEEVKKWAESLENLISHECGLAAFKAFLKSEYSEENIDFWISCEEYKKIKSPSKLSPKAKKIYNEFISVQATKEVNLDSCTREETSRNMLEPTITCFDEAQKKIFNLMEKDSYRRFLKSRFYLDLVNPSSCGAEKQKGAKSSADCASLVPQCA

SEQ ID NO: 2917 - protein, 205 aa, Homo sapiens
MCKGLAGLPASCLRSAKDMKHRLGFLLQKSDSCEHNSSHNKKDKVVICQRVSQEEVKKWAESLENLISHECGLAAFKAFLKSEYSEENIDFWISCEEYKKIKSPSKLSPKAKKIYNEFISVQATKEVNLDSCTREETSRNMLEPTITCFDEAQKKIFNLMEKDSYRRFLKSRSYLDLVNPSSCGAEKQKGAKSSADCASLVPQCA

SEQ ID NO: 2918 - protein, 302 aa, Homo sapiens
MYNMMLLIQKRKGIGSQLLRAGEAEGDRGAGTAERSSDWLDGRSWAIKETPTGLAGRRSEDSDNIFTGEEAKYAQSRSHSSSCRISFLLANSKLLNKMCKGLAGLPASCLRSAKDMKHRLGFLLQKSDSCEHNSSHNKKDKVVICQRVSQEEVKKWAESLENLISHECGLAAFKAFLKSEYSEENIDFWISCEEYKKIKSPSKLSPKAKKIYNEFISVQATKEVNLDSCTREETSRNMLEPTITCFDEAQKKIFNLMEKDSYRRFLKSRFYLDLVNPSSCGAEKQKGAKSSADCASLVPQCA

SEQ ID NO: 2919 - protein, 93 aa, Homo sapiens
MCKGLAGLPASCLRSAKDMKHRLGFLLQKSDSCEHNSSHNKKDKVVICQRVSQEEVKKWAESLENLISHECEPGFLHQGRDKPEHARAYNNLL

SEQ ID NO: 2920 - protein, 187 aa, Homo sapiens
MKHRLGFLLQKSDSCEHNSSHNKKDKVVICQRVSQEEVKKWAESLENLISHECGLAAFKAFLKSEYSEENIDFWISCEEYKKIKSPSKLSPKAKKIYNEFISVQATKEVNLDSCTREETSRNMLEPTITCFDEAQKKIFNLMEKDSYRRFLKSRFYLDLVNPSSCGAEKQKGAKSSADCASLVPQCA

SEQ ID NO: 2921 - protein, 199 aa, Homo sapiens
MAKSAEVKLAIFGRAGVGKSALVVRFLTKRFIWEYDPTLESTYRHQATIDDEVVSMEILDTAGQEDTIQREGHMRWGEGFVLVYDITDRGSFEEVLPLKNILDEIKKPKNVTLILVGNKADLDHSRQVSTEEGEKLATELACAFYECSACTGEGNITEIFYELCREVRRRRMVQGKTRRRSSTTHVKQAINKMLTKISS

SEQ ID NO: 2922 - protein, 180 aa, Homo sapiens
MAKSAEVKLAIFGRAGVGKSESTYRHQATIDDEVVSMEILDTAGQEDTIQREGHMRWGEGFVLVYDITDRGSFEEVLPLKNILDEIKKPKNVTLILVGNKADLDHSRQVSTEEGEKLATELACAFYECSACTGEGNITEIFYELCREVRRRRMVQGKTRRRSSTTHVKQAINKMLTKISS

SEQ ID NO: 2923 - protein, 356 aa, Homo sapiens
MSLWVDKYRPCSLGRLDYHKEQAAQLRNLVQCGDFPHLLVYGPSGAGKKTRIMCILRELYGVGVEKLRIEHQTITTPSKKKIEISTIASNYHLEVNPSDAGNSDRVVIQEMLKTVAQSQQLETNSQRDFKVVLLTEVDKLTKDAQHALRRTMEKYMSTCRLILCCNSTSKVIPPIRSRCLAVRVPAPSIEDICHVLSTVCKKEGLNLPSQLAHRLAEKSCRNLRKALLMCEACRVQQYPFTADQEIPETDWEVYLRETANAIVSQQTPQRLLEVRGRLYELLTHCIPPEIIMKGLLSELLHNCDGQLKGEVAQMAAYYEHRLQLGSKAIYHLEAFVAKFMALYKKFMEDGLEGMMF

SEQ ID NO: 2924 - protein, 305 aa, Homo sapiens
MSLWVDKYRPCSLGRLDYHKEQAAQLRNLVQCGDFPHLLVYGPSGAGKKTRIMCILRELYGVGVEKLRIEHQTITTPSKKKIEISTIASNYHLEVNPSDAGNSDRVVIQEMLKTVAQSQQLETNSQRDFKVVLLTEVDKLTKDAQHALRRTMEKYMSTCRLILCCNSTSKVIPPIRSRCLAVRVPAPSIEDICHVLSTVCKKEGLNLPSQLAHRLAEKSCRNLRKALLMCEACRVQQYPFTADQEIPETDWEVYLRETANAIVSQQTPQRLLEVRGRLYELLTHCIPPEIIMKACKEESRSCDIF

SEQ ID NO: 2925 - protein, 1692 aa, Homo sapiens
MSSAVGPRGPRPPTVPPPMQELPDLSHLTEEERNIIMAVMDRQKEEEEKEEAMLKCVVRDMAKPAACKTPRNAENQPHQPSPRLHQQFESYKEQVRKIGEEARRYQGEHKDDAPTCGICHKTKFADGCGHLCSYCRTKFCARCGGRVSLRSNNEDKVVMWVCNLCRKQQEILTKSGAWFFGSGPQQTSQDGTLSDTATGAGSEVPREKKARLQERSRSQTPLSTAAASSQDAAPPSAPPDRSKGAEPSQQALGPEQKQASSRSRSEPPRERKKTPGLSEQNGKGALKSERKRVPKTSAQPVEGAVEERERKERRESRRLEKGRSQDYPDTPEKRDEGKAADEEKQRKEEDYQTRYRSDPNLARYPVKPPPEEQQMRMHARVSRARHERRHSDVALPRTEAGAALPEGKAGKRAPAAARASPPDSPRAYSAERTAETRAPGAKQLTNHSPPAPRHGPVPAEAPELKAQEPLRKQSRLDPSSAVLMRKAKREKVETMLRNDSLSSDQSESVRPSPPKPHRSKRGGKKRQMSVSSSEEEGVSTPEYTSCEDVELESESVSEKGDLDYYWLDPATWHSRETSPISSHPVTWQPSKEGDRLIGRVILNKRTTMPKDSGALLGLKVVGGKMTDLGRLGAFITKVKKGSLADVVGHLRAGDEVLEWNGKPLPGATNEEVYNIILESKSEPQVEIIVSRPIGDIPRIPESSHPPLESSSSSFESQKMERPSISVISPTSPGALKDAPQVLPGQLSVKLWYDKVGHQLIVNVLQATDLPARVDGRPRNPYVKMYFLPDRSDKSKRRTKTVKKILEPKWNQTFVYSHVHRRDFRERMLEITVWDQPRVQEEESEFLGEILIELETALLDDEPHWYKLQTHDESSLPLPQPSPFMPRRHIHGESSSKKLQRSQRISDSDISDYEVDDGIGVVPPVGYRSSARESKSTTLTVPEQQRTTHHRSRSVSPHRGNDQGKPRSRLPNVPLQRSLDEIHPTRRSRSPTRHHDASRSPVDHRTRDVDSQYLSEQDSELLMLPRAKRGRSAECLHTTRHLVRHYKTLPPKMPLLQSSSHWNIYSSILPAHTKTKSVTRQDISLHHECFNSTVLRFTDEILVSELQPFLDRARSASTNCLRPDTSLHSPERERGRWSPSLDRRRPPSPRIQIQHASPENDRHSRKSERSSIQKQTRKGTASDAERVLPTCLSRRGHAAPRATDQPVIRGKHPARSRSSEHSSIRTLCSMHHLVPGGSAPPSPLLTRMHRQRSPTQSPPADTSFSSRRGRQLPQVPVRSGSIEQASLVVEERTRQMKMKVHRFKQTTGSGSSQELDREQYSKYNIHKDQYRSCDNVSAKSSDSDVSDVSAISRTSSASRLSSTSFMSEQSERPRGRISSFTPKMQGRRMGTSGRSIMKSTSVSGEMYTLEHNDGSQSDTAVGTVGAGGKKRRSSLSAKVVAIVSRRSRSTSQLSQTESGHKKLKSTIQRSTETGMAAEMRKMVRQPSRESTDGSINSYSSEGNLIFPGVRLGADSQFSDFLDGLGPAQLVGRQTLATPAMGDIQIGMEDKKGQLEVEVIRARSLTQKPGSKSTPAPYVKVYLLENGACIAKKKTRIARKTLDPLYQQSLVFDESPQGKVLQVIVWGDYGRMDHKCFMGVAQILLEELDLSSMVIGWYKLFPPSSLVDPTLTPLTRRASQSSLESSTGPPCIRS

SEQ ID NO: 2926 - protein, 1039 aa, Homo sapiens
MSSAVGPRGPRPPTVPPPMQELPDLSHLTEEERNIIMAVMDRQKEEEEKEEAMLKCVVRDMAKPAACKTPRNAENQPHQPSPRLHQQFESYKEQVRKIGEEARRYQGEHKDDAPTCGICHKTKFADGCGHLCSYCRTKFCARCGGRVSLRSNNEDKVVMWVCNLCRKQQEILTKSGAWFFGSGPQQTSQDGTLSDTATGAGSEVPREKKARLQERSRSQTPLSTAAASSQDAAPPSAPPDRSKGAEPSQQALGPEQKQASSRSRSEPPRERKKTPGLSEQNGKGALKSERKRVPKTSAQPVEGAVEERERKERRESRRLEKGRSQDYPDTPEKRDEGKAADEEKQRKEEDYQTRYRSDPNLARYPVKPPPEEQQMRMHARVSRARHERRHSDVALPRTEAGAALPEGKAGKRAPAAARASPPDSPRAYSAERTAETRAPGAKQLTNHSPPAPRHGPVPAEAPELKAQEPLRKQSRLDPSSAVLMRKAKREKVETMLRNDSLSSDQSESVRPSPPKPHRSKRGGKKRQMSVSSSEEEGVSTPEYTSCEDVELESESVSEKGDLDYYWLDPATWHSRETSPISSHPVTWQPSKEGDRLIGRVILNKRTTMPKDSGALLGLKVVGGKMTDLGRLGAFITKVKKGSLADVVGHLRAGDEVLEWNGKPLPGATNEEVYNIILESKSEPQVEIIVSRPIGDIPRIPESSHPPLESSSSSFESQKMERPSISVISPTSPGALKDAPQVLPGQLSVKLWYDKVGHQLIVNVLQATDLPARVDGRPRNPYVKMYFLPDRSDKSKRRTKTVKKILEPKWNQTFVYSHVHRRDFRERMLEITVWDQPRVQEEESEFLGEILIELETALLDDEPHWYKLQTHDESSLPLPQPSPFMPRRHIHGESSSKKLQRSQRISDSDISDYEVDDGIGVVPPVGYRSSARESKSTTLTVPEQQRTTHHRSRSVSPHRGNDQGKPRSRLPNVPLQRSLDEIHPTRRSRSPTRHHDASRSPVDHRTRDVDSQYLSEQDSELLMLPRAKRGRSAECLHTTR

SEQ ID NO: 2927 - protein, 1481 aa, Homo sapiens
MSSAVGPRGPRPPTVPPPMQELPDLSHLTEEERNIIMAVMDRQKEEEEKEEAMLKCVVRDMAKPAACKTPRNAENQPHQPSPRLHQQFESYKEQVRKIGEEARRYQGEHKDDAPTCGICHKTKFADGCGHLCSYCRTKFCARCGGRVSLRSNNEDKVVMWVCNLCRKQQEILTKSGAWFFGSGPQQTSQDGTLSDTATGAGSEVPREKKARLQERSRSQTPLSTAAASSQDAAPPSAPPDRSKGAEPSQQALGPEQKQASSRSRSEPPRERKKTPGLSEQNGKGALKSERKRVPKTSAQPVEGAVEERERKERRESRRLEKGRSQDYPDTPEKRDEGKAADEEKQRKEEDYQTRYRSDPNLARYPVKPPPEEQQMRMHARVSRARHERRHSDVALPRTEAGAALPEGKAGKRAPAAARASPPDSPRAYSAERTAETRAPGAKQLTNHSPPAPRHGPVPAEAPELKAQEPLRKQSRLDPSSAVLMRKAKREKVETMLRNDSLSSDQSESVRPSPPKPHRSKRGGKKRQMSVSSSEEEGVSTPEYTSCEDVELESESVSEKGDLDYYWLDPATWHSRETSPISSHPVTWQPSKEGDRLIGRVILNKRTTMPKDSGALLGLKVVGGKMTDLGRLGAFITKVKKGSLADVVGHLRAGDEVLEWNGKPLPGATNEEVYNIILESKSEPQVEIIVSRPIGDIPRIPESSHPPLESSSSSFESQKMERPSISVISPTSPGALKDAPQVLPGQLSVKLWYDKVGHQLIVNVLQATDLPARVDGRPRNPYVKMYFLPDRSDKSKRRTKTVKKILEPKWNQTFVYSHVHRRDFRERMLEITVWDQPRVQEEESEFLGEILIELETALLDDEPHWYKLQTHDESSLPLPQPSPFMPRRHIHGESSSKKLQRSQRISDSDISDYEVDDGIGVVPPVGYRSSARESKSTTLTVPEQQRTTHHRSRSVSPHRGNDQGKPRSRLPNVPLQRSLDEIHPTRRSRSPTRHHDASRSPVDHRTRDVDSQYLSEQDSELLMLPRAKRGRSAECLHTTSELQPFLDRARSASTNCLRPDTSLHSPERERMHRQRSPTQSPPADTSFSSRRGRQLPQVPVRSGSIEQASLVVEERTRQMKMKVHRFKQTTGSGSSQELDREQYSKYNIHKDQYRSCDNVSAKSSDSDVSDVSAISRTSSASRLSSTSFMSEQSERPRGRISSFTPKMQGRRMGTSGRSIMKSTSVSGEMYTLEHNDGSQSDTAVGTVGAGGKKRRSSLSAKVVAIVSRRSRSTSQLSQTESGHKKLKSTIQRSTETGMAAEMRKMVRQPSRESTDGSINSYSSEGNLIFPGVRLGADSQFSDFLDGLGPAQLVGRQTLATPAMAPYVKVYLLENGACIAKKKTRIARKTLDPLYQQSLVFDESPQGKVLQVIVWGDYGRMDHKCFMGVAQILLEELDLSSMVIGWYKLFPPSSLVDPTLTPLTRRASQSSLESSTGPPCIRS

SEQ ID NO: 2928 - protein, 1541 aa, Homo sapiens
MSSAVGPRGPRPPTVPPPMQELPDLSHLTEEERNIIMAVMDRQKEEEEKEEAMLKCVVRDMAKPAACKTPRNAENQPHQPSPRLHQQFESYKEQVRKIGEEARRYQGEHKDDAPTCGICHKTKFADGCGHLCSYCRTKFCARCGGRVSLRSNNEDKVVMWVCNLCRKQQEILTKSGAWFFGSGPQQTSQDGTLSDTATGAGSEVPREKKARLQERSRSQTPLSTAAASSQDAAPPSAPPDRSKGAEPSQQALGPEQKQASSRSRSEPPRERKKTPGLSEQNGKGALKSERKRVPKTSAQPVEGAVEERERKERRESRRLEKGRSQDYPDTPEKRDEGKAADEEKQRKEEDYQTRYRSDPNLARYPVKPPPEEQQMRMHARVSRARHERRHSDVALPRTEAGAALPEGKAGKRAPAAARASPPDSPRAYSAERTAETRAPGAKQLTNHSPPAPRHGPVPAEAPELKAQEPLRKQSRLDPSSAVLMRKAKREKVETMLRNDSLSSDQSESVRPSPPKPHRSKRGGKKRQMSVSSSEEEGVSTPEYTSCEDVELESESVSEKGDLDYYWLDPATWHSRETSPISSHPVTWQPSKEGDRLIGRVILNKRTTMPKDSGALLGLKVVGGKMTDLGRLGAFITKVKKGSLADVVGHLRAGDEVLEWNGKPLPGATNEEVYNIILESKSEPQVEIIVSRPIGDIPRIPESSHPPLESSSSSFESQKMERPSISVISPTSPGALKDAPQVLPGQLSVKLWYDKVGHQLIVNVLQATDLPARVDGRPRNPYVKMYFLPDRSDKSKRRTKTVKKILEPKWNQTFVYSHVHRRDFRERMLEITVWDQPRVQEEESEFLGEILIELETALLDDEPHWYKLQTHDESSLPLPQPSPFMPRRHIHGESSSKKLQRSQRISDSDISDYEVDDGIGVVPPVGYRSSARESKSTTLTVPEQQRTTHHRSRSVSPHRGNDQGKPRSRLPNVPLQRSLDEIHPTRRSRSPTRHHDASRSPVDHRTRDVDSQYLSEQDSELLMLPRAKRGRSAECLHTTRHLVRHYKTLPPKMPLLQSSSHWNIYSELQPFLDRARSASTNCLRPDTSLHSPERERMHRQRSPTQSPPADTSFSSRRGRQLPQVPVRSGSIEQASLVVEERTRQMKMKVHRFKQTTGSGSSQELDREQYSKYNIHKDQYRSCDNVSAKSSDSDVSDVSAISRTSSASRLSSTSFMSEQSERPRGRISSFTPKMQGRRMGTSGRSIMKSTSVSGEMYTLEHNDGSQSDTAVGTVGAGGKKRRSSLSAKVVAIVSRRSRSTSQLSQTESGHKKLKSTIQRSTETGMAAEMRKMVRQPSRESTDGSINSYSSEGNLIFPGVRLGADSQFSDFLDGLGPAQLVGRQTLATPAMGDIQIGMEDKKGQLEVEVIRARSLTQKPGSKSTPAPYVKVYLLENGACIAKKKTRIARKTLDPLYQQSLVFDESPQGKVLQVIVWGDYGRMDHKCFMGVAQILLEELDLSSMVIGWYKLFPPSSLVDPTLTPLTRRASQSSLESSTGPPCIRS

SEQ ID NO: 2929 - protein, 1475 aa, Homo sapiens
MSSAVGPRGPRPPTVPPPMQELPDLSHLTEEERNIIMAVMDRQKEEEEKEEAMLKCVVRDMAKPAACKTPRNAENQPHQPSPRLHQQFESYKEQVRKIGEEARRYQGEHKDDAPTCGICHKTKFADGCGHLCSYCRTKFCARCGGRVSLRSNNEDKVVMWVCNLCRKQQEILTKSGAWFFGSGPQQTSQDGTLSDTATGAGSEVPREKKARLQERSRSQTPLSTAAASSQDAAPPSAPPDRSKGAEPSQQALGPEQKQASSRSRSEPPRERKKTPGLSEQNGKGALKSERKRVPKTSAQPVEGAVEERERKERRESRRLEKGRSQDYPDTPEKRDEGKAADEEKQRKEEDYQTRYRSDPNLARYPVKPPPEEQQMRMHARVSRARHERRHSDVALPRTEAGAALPEGKAGKRAPAAARASPPDSPRAYSAERTAETRAPGAKQLTNHSPPAPRHGPVPAEAPELKAQEPLRKQSRLDPSSAVLMRKAKREKVETMLRNDSLSSDQSESVRPSPPKPHRSKRGGKKRQMSVSSSEEEGVSTPEYTSCEDVELESESVSEKGDLDYYWLDPATWHSRETSPISSHPVTWQPSKEGDRLIGRVILNKRTTMPKDSGALLGLKVVGGKMTDLGRLGAFITKVKKGSLADVVGHLRAGDEVLEWNGKPLPGATNEEVYNIILESKSEPQVEIIVSRPIGDIPRIPESSHPPLESSSSSFESQKMERPSISVISPTSPGALKDAPQVLPGQLSVKLWYDKVGHQLIVNVLQATDLPARVDGRPRNPYVKMYFLPDRSDKSKRRTKTVKKILEPKWNQTFVYSHVHRRDFRERMLEITVWDQPRVQEEESEFLGEILIELETALLDDEPHWYKLQTHDESSLPLPQPSPFMPRRHIHGESSSKKLQRSQRISDSDISDYEVDDGIGVVPPGYRSSARESKSTTLTVPEQQRTTHHRSRSVSPHRGNDQGKPRSRLPNVPLQRSLDEIHPTRRSRSPTRHHDASRSPVDHRTRDVDSQYLSEQDSELLMLPRAKRGRSAECLHTTRMHRQRSPTQSPPADTSFSSRRGRQLPQVPVRSGSIEQASLVVEERTRQMKMKVHRFKQTTGSGSSQELDREQYSKYNIHKDQYRSCDNVSAKSSDSDVSDVSAISRTSSASRLSSTSFMSEQSERPRGRIRRMGTSGRSIMKSTSVSGEMYTLEHNDGSQSDTAVGTVGAGGKKRRSSLSAKVVAIVSRRSRSTSQLSQTESGHKKLKSTIQRSTETGMAAEMRKMVRQPSRESTDGSINSYSSEGNLIFPGVRLGADSQFSDFLDGLGPAQLVGRQTLATPAMGDIQIGMEDKKGQLEVEVIRARSLTQKPGSKSTPAPYVKVYLLENGACIAKKKTRIARKTLDPLYQQSLVFDESPQGKVLQVIVWGDYGRMDHKCFMGVAQILLEELDLSSMVIGWYKLFPPSSLVDPTLTPLTRRASQSSLESSTGPPCIRS

SEQ ID NO: 2930 - protein, 1371 aa, Homo sapiens
MSSAVGPRGPRPPTVPPPMQELPDLSHLTEEERNIIMAVMDRQKEEEEKEEAMLKCVVRDMAKPAACKTPRNAENQPHQPSPRLHQQFESYKEQVRKIGEEARRYQGEHKDDAPTCGICHKTKFADGCGHLCSYCRTKFCARCGGRVSLRSNNEDKVVMWVCNLCRKQQEILTKSGAWFFGSGPQQTSQDGTLSDTATGAGSEVPREKKARLQERSRSQTPLSTAAASSQDAAPPSAPPDRSKGAEPSQQALGPEQKQASSRSRSEPPRERKKTPGLSEQNGKGALKSERKRVPKTSAQPVEGAVEERERKERRESRRLEKGRSQDYPDTPEKRDEGKAADEEKQRKEEDYQTRYRSDPNLARYPVKPPPEEQQMRMHARVSRARHERRHSDVALPRTEAGAALPEGKAGKRAPAAARASPPDSPRAYSAERTAETRAPGAKQLTNHSPPAPRHGPVPAEAPELKAQEPLRKQSRLDPSSAVLMRKAKREKVETMLRNDSLSSDQSESVRPSPPKPHRSKRGGKKRQMSVSSSEEEGVSTPEYTSCEDVELESESVSEKGDLDYYWLDPATWHSRETSPISSHPVTWQPSKEGDRLIGRVILNKRTTMPKDSGALLGLKVVGGKMTDLGRLGAFITKVKKGSLADVVGHLRAGDEVLEWNGKPLPGATNEEVYNIILESKSEPQVEIIVSRPIGDIPRIPESSHPPLESSSSSFESQKMERPSISVISPTSPGALKDAPQVLPGQLSVKLWYDKVGHQLIVNVLQATDLPARVDGRPRNPYVKMYFLPDRSDKSKRRTKTVKKILEPKWNQTFVYSHVHRRDFRERMLEITVWDQPRVQEEESEFLGEILIELETALLDDEPHWYKLQTHDESSLPLPQPSPFMPRRHIHGESSSKKLQRSQRISDSDISDYEVDDGIGVVPPVGYRSSARESKSTTLTVPEQQRTTHHRSRSVSPHRGNDQGKPRSRLPNVPLQRSLDEIHPTRRSRSPTRHHDASRSPVDHRTRDVDSQYLSEQDSELLMLPRAKRGRSAECLHTTSELQPFLDRARSASTNCLRPDTSLHSPERERGRWSPSLDRRRPPSPRIQIQHASPENDRMHRQRSPTQSPPADTSFSSRRGRQLPQVPVRSGSIEQESGHKKLKSTIQRSTETGMAAEMRKMVRQPSRESTDGSINSYSSEGNLIFPGVRLGADSQFSDFLDGLGPAQLVGRQTLATPAMGDIQIGMEDKKGQLEVEVIRARSLTQKPGSKSTPAPYVKVYLLENGACIAKKKTRIARKTLDPLYQQSLVFDESPQGKVLQVIVWGDYGRMDHKCFMGVAQILLEELDLSSMVIGWYKLFPPSSLVDPTLTPLTRRASQSSLESSTGPPCIRS

SEQ ID NO: 2931 - protein, 1342 aa, Homo sapiens
MSSAVGPRGPRPPTVPPPMQELPDLSHLTEEERNIIMAVMDRQKEEEEKEEAMLKCVVRDMAKPAACKTPRNAENQPHQPSPRLHQQFESYKEQVRKIGEEARRYQGEHKDDAPTCGICHKTKFADGCGHLCSYCRTKFCARCGGRVSLRSNNEDKVVMWVCNLCRKQQEILTKSGAWFFGSGPQQTSQDGTLSDTATGAGSEVPREKKARLQERSRSQTPLSTAAASSQDAAPPSAPPDRSKGAEPSQQALGPEQKQASSRSRSEPPRERKKTPGLSEQNGKGALKSERKRVPKTSAQPVEGAVEERERKERRESRRLEKGRSQDYPDTPEKRDEGKAADEEKQRKEEDYQTRYRSDPNLARYPVKPPPEEQQMRMHARVSRARHERRHSDVALPRTEAGAALPEGKAGKRAPAAARASPPDSPRAYSAERTAETRAPGAKQLTNHSPPAPRHGPVPAEAPELKAQEPLRKQSRLDPSSAVLMRKAKREKVETMLRNDSLSSDQSESVRPSPPKPHRSKRGGKKRQMSVSSSEEEGVSTPEYTSCEDVELESESVSEKGDLDYYWLDPATWHSRETSPISSHPVTWQPSKEGDRLIGRVILNKRTTMPKDSGALLGLKVVGGKMTDLGRLGAFITKVKKGSLADVVGHLRAGDEVLEWNGKPLPGATNEEVYNIILESKSEPQVEIIVSRPIGDIPRIPESSHPPLESSSSSFESQKMERPSISVISPTSPGALKDAPQVLPGQLSVKLWYDKVGHQLIVNVLQATDLPARVDGRPRNPYVKMYFLPDRSDKSKRRTKTVKKILEPKWNQTFVYSHVHRRDFRERMLEITVWDQPRVQEEESEFLGEILIELETALLDDEPHWYKLQTHDESSLPLPQPSPFMPRRHIHGESSSKKLQRSQRISDSDISDYEVDDGIGVVPPGYRSSARESKSTTLTVPEQQRTTHHRSRSVSPHRGNDQGKPRSRLPNVPLQRSLDEIHPTRRSRSPTRHHDASRSPVDHRTRDVDSQYLSEQDSELLMLPRAKRGRSAECLHTTSELQPFLDRARSASTNCLRPDTSLHSPERERMHRQRSPTQSPPADTSFSSRRGRQLPQVPVRSGSIEQESGHKKLKSTIQRSTETGMAAEMRKMVRQPSRESTDGSINSYSSEGNLIFPGVRLGADSQFSDFLDGLGPAQLVGRQTLATPAMGDIQIGMEDKKGQLEVEVIRARSLTQKPGSKSTPAPYVKVYLLENGACIAKKKTRIARKTLDPLYQQSLVFDESPQGKVLQVIVWGDYGRMDHKCFMGVAQILLEELDLSSMVIGWYKLFPPSSLVDPTLTPLTRRASQSSLESSTGPPCIRS

SEQ ID NO: 2932 - protein, 1291 aa, Homo sapiens
MSSAVGPRGPRPPTVPPPMQELPDLSHLTEEERNIIMAVMDRQKEEEEKEEAMLKCVVRDMAKPAACKTPRNAENQPHQPSPRLHQQFESYKEQVRKIGEEARRYQGEHKDDAPTCGICHKTKFADGCGHLCSYCRTKFCARCGGRVSLRSNNEDKVVMWVCNLCRKQQEILTKSGAWFFGSGPQQTSQDGTLSDTATGAGSEVPREKKARLQERSRSQTPLSTAAASSQDAAPPSAPPDRSKGAEPSQQALGPEQKQASSRSRSEPPRERKKTPGLSEQNGKGALKSERKRVPKTSAQPVEGAVEERERKERRESRRLEKGRSQDYPDTPEKRDEGKAADEEKQRKEEDYQTRYRSDPNLARYPVKPPPEEQQMRMHARVSRARHERRHSDVALPRTEAGAALPEGKAGKRAPAAARASPPDSPRAYSAERTAETRAPGAKQLTNHSPPAPRHGPVPAEAPELKAQEPLRKQSRLDPSSAVLMRKAKREKVETMLRNDSLSSDQSESVRPSPPKPHRSKRGGKKRQMSVSSSEEEGVSTPEYTSCEDVELESESVSEKGDLDYYWLDPATWHSRETSPISSHPVTWQPSKEGDRLIGRVILNKRTTMPKDSGALLGLKVVGGKMTDLGRLGAFITKVKKGSLADVVGHLRAGDEVLEWNGKPLPGATNEEVYNIILESKSEPQVEIIVSRPIGDIPRIPESSHPPLESSSSSFESQKMERPSISVISPTSPGALKDAPQVLPGQLSVKLWYDKVGHQLIVNVLQATDLPARVDGRPRNPYVKMYFLPDRSDKSKRRTKTVKKILEPKWNQTFVYSHVHRRDFRERMLEITVWDQPRVQEEESEFLGEILIELETALLDDEPHWYKLQTHDESSLPLPQPSPFMPRRHIHGESSSKKLQRSQRISDSDISDYEVDDGIGVVPPGYRSSARESKSTTLTVPEQQRTTHHRSRSVSPHRGNDQGKPRSRLPNVPLQRSLDEIHPTRRSRSPTRHHDASRSPVDHRTRDVDSQYLSEQDRMHRQRSPTQSPPADTSFSSRRGRQLPQVPVRSGSIEQESGHKKLKSTIQRSTETGMAAEMRKMVRQPSRESTDGSINSYSSEGNLIFPGVRLGADSQFSDFLDGLGPAQLVGRQTLATPAMGDIQIGMEDKKGQLEVEVIRARSLTQKPGSKSTPAPYVKVYLLENGACIAKKKTRIARKTLDPLYQQSLVFDESPQGKVLQVIVWGDYGRMDHKCFMGVAQILLEELDLSSMVIGWYKLFPPSSLVDPTLTPLTRRASQSSLESSTGPPCIRS

SEQ ID NO: 2933 - protein, 826 aa, Homo sapiens
MFAGFLQFLLLHTLHSGTGDLDYYWLDPATWHSRETSPISSHPVTWQPSKEGDRLIGRVILNKRTTMPKDSGALLGLKVVGGKMTDLGRLGAFITKVKKGSLADVVGHLRAGDEVLEWNGKPLPGATNEEVYNIILESKSEPQVEIIVSRPIGDIPRIPESSHPPLESSSSSFESQKMERPSISVISPTSPGALKDAPQVLPGQLSVKLWYDKVGHQLIVNVLQATDLPARVDGRPRNPYVKMYFLPDRSDKSKRRTKTVKKILEPKWNQTFVYSHVHRRDFRERMLEITVWDQPRVQEEESEFLGEILIELETALLDDEPHWYKLQTHDESSLPLPQPSPFMPRRHIHGESSSKKLQRSQRISDSDISDYEVDDGIGVVPPVGYRSSARESKSTTLTVPEQQRTTHHRSRSVSPHRGNDQGKPRSRLPNVPLQRSLDEIHPTRRSRSPTRHHDASRSPVDHRTRDVDSQYLSEQDSELLMLPRAKRGRSAECLHTTSELQPFLDRARSASTNCLRPDTSLHSPERERHSRKSERSSIQKQTRKGTASDAERMHRQRSPTQSPPADTSFSSRRGRQLPQVPVRSGSIEQESGHKKLKSTIQRSTETGMAAEMRKMVRQPSRESTDGSINSYSSEGNLIFPGVRLGADSQFSDFLDGLGPAQLVGRQTLATPAMGDIQIGMEDKKGQLEVEVIRARSLTQKPGSKSTPAPYVKVYLLENGACIAKKKTRIARKTLDPLYQQSLVFDESPQGKVLQVIVWGDYGRMDHKCFMGVAQILLEELDLSSMVIGWYKLFPPSSLVDPTLTPLTRRASQSSLESSTGPPCIRS

SEQ ID NO: 2934 - protein, 760 aa, Homo sapiens
MPKDSGALLGLKVVGGKMTDLGRLGAFITKVKKGSLADVVGHLRAGDEVLEWNGKPLPGATNEEVYNIILESKSEPQVEIIVSRPIGDIPRIPESSHPPLESSSSSFESQKMERPSISVISPTSPGALKDAPQVLPGQLSVKLWYDKVGHQLIVNVLQATDLPARVDGRPRNPYVKMYFLPDRSDKSKRRTKTVKKILEPKWNQTFVYSHVHRRDFRERMLEITVWDQPRVQEEESEFLGEILIELETALLDDEPHWYKLQTHDESSLPLPQPSPFMPRRHIHGESSSKKLQRSQRISDSDISDYEVDDGIGVVPPVGYRSSARESKSTTLTVPEQQRTTHHRSRSVSPHRGNDQGKPRSRLPNVPLQRSLDEIHPTRRSRSPTRHHDASRSPVDHRTRDVDSQYLSEQDSELLMLPRAKRGRSAECLHTTSELQPFLDRARSASTNCLRPDTSLHSPERERHSRKSERSSIQKQTRKGTASDAERMHRQRSPTQSPPADTSFSSRRGRQLPQVPVRSGSIEQESGHKKLKSTIQRSTETGMAAEMRKMVRQPSRESTDGSINSYSSEGNLIFPGVRLGADSQFSDFLDGLGPAQLVGRQTLATPAMGDIQIGMEDKKGQLEVEVIRARSLTQKPGSKSTPAPYVKVYLLENGACIAKKKTRIARKTLDPLYQQSLVFDESPQGKVLQVIVWGDYGRMDHKCFMGVAQILLEELDLSSMVIGWYKLFPPSSLVDPTLTPLTRRASQSSLESSTGPPCIRS

SEQ ID NO: 2935 - protein, 219 aa, Homo sapiens
MAAEMRKMVRQPSRESTDGSINSYSSEGNLIFPGVRLGADSQFSDFLDGLGPAQLVGRQTLATPAMGDIQIGMEDKKGQLEVEVIRARSLTQKPGSKSTPAPYVKVYLLENGACIAKKKTRIARKTLDPLYQQSLVFDESPQGKVLQVIVWGDYGRMDHKCFMGVAQILLEELDLSSMVIGWYKLFPPSSLVDPTLTPLTRRASQSSLESSTGPPCIRS

SEQ ID NO: 2936 - protein, 1012 aa, Homo sapiens
MCAPGIHVSSEGWEEVRSVDSEEGTIEARRAVAGDLDYYWLDPATWHSRETSPISSHPVTWQPSKEGDRLIGRVILNKRTTMPKDSGALLGLKVVGGKMTDLGRLGAFITKVKKGSLADVVGHLRAGDEVLEWNGKPLPGATNEEVYNIILESKSEPQVEIIVSRPIGDIPRIPESSHPPLESSSSSFESQKMERPSISVISPTSPGALKDAPQVLPGQLSVKLWYDKVGHQLIVNVLQATDLPARVDGRPRNPYVKMYFLPDRSDKSKRRTKTVKKILEPKWNQTFVYSHVHRRDFRERMLEITVWDQPRVQEEESEFLGEILIELETALLDDEPHWYKLQTHDESSLPLPQPSPFMPRRHIHGESSSKKLQRSQRISDSDISDYEVDDGIGVVPPGYRSSARESKSTTLTVPEQQRTTHHRSRSVSPHRGNDQGKPRSRLPNVPLQRSLDEIHPTRRSRSPTRHHDASRSPVDHRTRDVDSQYLSEQDSELLMLPRAKRGRSAECLHTTSELQPFLDRARSASTNCLRPDTSLHSPERERHSRKSERSSIQKQTRKGTASDAERMHRQRSPTQSPPADTSFSSRRGRQLPQVPVRSGSIEQASLVVEERTRQMKMKVHRFKQTTGSGSSQELDREQYSKYNIHKDQYRSCDNVSAKSSDSDVSDVSAISRTSSASRLSSTSFMSEQSERPRGRISSFTPKMQGRRMGTSGRSIMKSTSVSGEMYTLEHNDGSQSDTAVGTVGAGGKKRRSSLSAKVVAIVSRRSRSTSQLSQTESGHKKLKSTIQRSTETGMAAEMRKMVRQPSRESTDGSINSYSSEGNLIFPGVRLGADSQFSDFLDGLGPAQLVGRQTLATPAMGDIQIGMEDKKGQLEVEVIRARSLTQKPGSKSTPAPYVKVYLLENGACIAKKKTRIARKTLDPLYQQSLVFDESPQGKVLQVIVWGDYGRMDHKCFMGVAQILLEELDLSSMVIGWYKLFPPSSLVDPTLTPLTRRASQSSLESSTGPPCIRS

SEQ ID NO: 2937 - protein, 817 aa, Homo sapiens
MCAPGIHVSSEGWEEVRSVDSEEGTIEARRAVAGDLDYYWLDPATWHSRETSPISSHPVTWQPSKEGDRLIGRVILNKRTTMPKDSGALLGLKVVGGKMTDLGRLGAFITKVKKGSLADVVGHLRAGDEVLEWNGKPLPGATNEEVYNIILESKSEPQVEIIVSRPIGDIPRIPESSHPPLESSSSSFESQKMERPSISVISPTSPGALKDAPQVLPGQLSVKLWYDKVGHQLIVNVLQATDLPARVDGRPRNPYVKMYFLPDRSDKSKRRTKTVKKILEPKWNQTFVYSHVHRRDFRERMLEITVWDQPRVQEEESEFLGEILIELETALLDDEPHWYKLQTHDESSLPLPQPSPFMPRRHIHGESSSKKLQRSQRISDSDISDYEVDDGIGVVPPVGYRSSARESKSTTLTVPEQQRTTHHRSRSVSPHRGNDQGKPRSRLPNVPLQRSLDEIHPTRRSRSPTRHHDASRSPVDHRTRDVDSQYLSEQDSELLMLPRAKRGRSAECLHTTSELQPFLDRARSASTNCLRPDTSLHSPERERMHRQRSPTQSPPADTSFSSRRGRQLPQVPVRSGSIEQESGHKKLKSTIQRSTETGMAAEMRKMVRQPSRESTDGSINSYSSEGNLIFPGVRLGADSQFSDFLDGLGPAQLVGRQTLATPAMGDIQIGMEDKKGQLEVEVIRARSLTQKPGSKSTPAPYVKVYLLENGACIAKKKTRIARKTLDPLYQQSLVFDESPQGKVLQVIVWGDYGRMDHKCFMGVAQILLEELDLSSMVIGWYKLFPPSSLVDPTLTPLTRRASQSSLESSTGPPCIRS

SEQ ID NO: 2938 - protein, 148 aa, Homo sapiens [sequence omitted]

SEQ ID NO: 2939 - protein, 142 aa, Homo sapiens
MAPVKISHVVSFSSQDPKYPVENLLNPDSPRRPWLGCPQDKSGQLKVELQLERAVPTGYIDVGNCGCAFLQIDVGHSSWPLDRPFITLLPATTLMSLTDSKQGKNRSGVRMFKDGKEGKSRKDGGGLYEKQRCSTKEDCECY

SEQ ID NO: 2940 - protein, 858 aa, Homo sapiens [sequence omitted]

SEQ ID NO: 2941 - protein, 240 aa, Homo sapiens
MGNCQAGHNLHLCLAHHPPLVCATLILLLLGLSGLGLGSFLLTHRTGLRSPDIPQDWVSFLRSFGQLTLCPRNGTVTGKWRGSHVVGLLTTLNFGDGPDRNKTRTFQATVLGSQMGLKGSSAGQLVLITARVTTERTAGTCLYFSAVPGILPSSQPPISCSEEGAGNATLSPRMGEECVSVWSHEGLVLTKLLTSEELALCGSRLLVLGSFLLLFCGLLCCVTAMCFHPRRESHWSRTRL

SEQ ID NO: 2942 - protein, 269 aa, Homo sapiens
MSDEEVEQVEEQYEEEEEAQEEAAEVHEEVHEPEEVQEDTAEEDAEEEKPRPKLTAPKIPEGEKVDFDDIQKKRQNKDLMELQALIDSHFEARKKEEEELVALKERIEKRRAERAEQQRIRAEKERERQNRLAEEKARREEEDAKRRAEDDLKKKKALSSMGANYSSYLAKADQKRGKKQTAREMKKKILAERRKPLNIDHLGEDKLRDKAKELWETLHQLEIDKFEFGEKLKRQKYDITTLRSRIDQAQKHSKKAGTPAKGKVGGRWK

SEQ ID NO: 2943 - protein, 258 aa, Homo sapiens
MSDEEVEQVEEQYEEEEEAQEEEEVQEDTAEEDAEEEKPRPKLTAPKIPEGEKVDFDDIQKKRQNKDLMELQALIDSHFEARKKEEEELVALKERIEKRRAERAEQQRIRAEKERERQNRLAEEKARREEEDAKRRAEDDLKKKKALSSMGANYSSYLAKADQKRGKKQTAREMKKKILAERRKPLNIDHLGEDKLRDKAKELWETLHQLEIDKFEFGEKLKRQKYDITTLRSRIDQAQKHSKKAGTPAKGKVGGRWK

SEQ ID NO: 2944 - protein, 261 aa, Homo sapiens
MSDEEVEQVEEQYEEEEEAQEEAAEVHEEVHEPEEVQEEEKPRPKLTAPKIPEGEKVDFDDIQKKRQNKDLMELQALIDSHFEARKKEEEELVALKERIEKRRAERAEQQRIRAEKERERQNRLAEEKARREEEDAKRRAEDDLKKKKALSSMGANYSSYLAKADQKRGKKQTAREMKKKILAERRKPLNIDHLGEDKLRDKAKELWETLHQLEIDKFEFGEKLKRQKYDITTLRSRIDQAQKHSKKAGTPAKGKVGGRWK

SEQ ID NO: 2945 - protein, 250 aa, Homo sapiens
MSDEEVEQVEEQYEEEEEAQEEEEVQEEEKPRPKLTAPKIPEGEKVDFDDIQKKRQNKDLMELQALIDSHFEARKKEEEELVALKERIEKRRAERAEQQRIRAEKERERQNRLAEEKARREEEDAKRRAEDDLKKKKALSSMGANYSSYLAKADQKRGKKQTAREMKKKILAERRKPLNIDHLGEDKLRDKAKELWETLHQLEIDKFEFGEKLKRQKYDIMNVRARVQMLAKFSKKAGTPAKGKVGGRWK

SEQ ID NO: 2946 - protein, 245 aa, Homo sapiens
MSDEEVEQVEEQYEEEEEAQEEEEKPRPKLTAPKIPEGEKVDFDDIQKKRQNKDLMELQALIDSHFEARKKEEEELVALKERIEKRRAERAEQQRIRAEKERERQNRLAEEKARREEEDAKRRAEDDLKKKKALSSMGANYSSYLAKADQKRGKKQTAREMKKKILAERRKPLNIDHLGEDKLRDKAKELWETLHQLEIDKFEFGEKLKRQKYDITTLRSRIDQAQKHSKKAGTPAKGKVGGRWK

SEQ ID NO: 2947 - protein, 256 aa, Homo sapiens
MSDEEVEQVEEQYEEEEEAQEEAAEVHEEVHEPEEKPRPKLTAPKIPEGEKVDFDDIQKKRQNKDLMELQALIDSHFEARKKEEEELVALKERIEKRRAERAEQQRIRAEKERERQNRLAEEKARREEEDAKRRAEDDLKKKKALSSMGANYSSYLAKADQKRGKKQTAREMKKKILAERRKPLNIDHLGEDKLRDKAKELWETLHQLEIDKFEFGEKLKRQKYDITTLRSRIDQAQKHSKKAGTPAKGKVGGRWK

SEQ ID NO: 2948 - protein, 250 aa, Homo sapiens
MSDEEVEQVEEQYEEEEEAQEEEEVQEEEKPRPKLTAPKIPEGEKVDFDDIQKKRQNKDLMELQALIDSHFEARKKEEEELVALKERIEKRRAERAEQQRIRAEKERERQNRLAEEKARREEEDAKRRAEDDLKKKKALSSMGANYSSYLAKADQKRGKKQTAREMKKKILAERRKPLNIDHLGEDKLRDKAKELWETLHQLEIDKFEFGEKLKRQKYDITTLRSRIDQAQKHSKKAGTPAKGKVGGRWK

SEQ ID NO: 2949 - protein, 568 aa, Homo sapiens
MESSKKMDSPGALQTNPPLKLHTDRSAGTPVFVPEQGGYKEKFVKTVEDKYKCEKCHLVLCSPKQTECGHRFCESCMAALLSSSSPKCTACQESIVKDKVFKDNCCKREILALQIYCRNESRGCAEQLMLGHLLVHLKNDCHFEELPCVRPDCKEKVLRKDLRDHVEKACKYREATCSHCKSQVPMIALQKHEDTDCPCVVVSCPHKCSVQTLLRSELSAHLSECVNAPSTCSFKRYGCVFQGTNQQIKAHEASSAVQHVNLLKEWSNSLEKKVSLLQNESVEKNKSIQSLHNQICSFEIEIERQKEMLRNNESKILHLQRVIDSQAEKLKELDKEIRPFRQNWEEADSMKSSVESLQNRVTELESVDKSAGQVARNTGLLESQLSRHDQMLSVHDIRLADMDLRFQVLETASYNGVLIWKIRDYKRRKQEAVMGKTLSLYSQPFYTGYFGYKMCARVYLNGDGMGKGTHLSLFFVIMRGEYDALLPWPFKQKVTLMLMDQGSSRRHLGDAFKPDPNSSSFKKPTGEMNIASGCPVFVAQTVLENGTYIKDDTIFIKVIVDTSDLPDP

SEQ ID NO: 2950 - protein, 485 aa, Homo sapiens
MESSKKMDSPGALQTNPPLKLHTDRSAGTPVFVPEQGGYKEKFVKTVEDKYKCEKCHLVLCSPKQTECGHRFCESCMAALLSSSSPKCTACQESIVKDKVFKDNCCKREILALQIYCRNESRGCAEQLMLGHLLVHLKNDCHFEELPCVRPDCKEKVLRKDLRDHVEKACKYREATCSHCKSQVPMIALQVSLLQNESVEKNKSIQSLHNQICSFEIEIERQKEMLRNNESKILHLQRVIDSQAEKLKELDKEIRPFRQNWEEADSMKSSVESLQNRVTELESVDKSAGQVARNTGLLESQLSRHDQMLSVHDIRLADMDLRFQVLETASYNGVLIWKIRDYKRRKQEAVMGKTLSLYSQPFYTGYFGYKMCARVYLNGDGMGKGTHLSLFFVIMRGEYDALLPWPFKQKVTLMLMDQGSSRRHLGDAFKPDPNSSSFKKPTGEMNIASGCPVFVAQTVLENGTYIKDDTIFIKVIVDTSDLPDP

SEQ ID NO: 2951 - protein, 437 aa, Homo sapiens
MSKRLSPQLQHNITEDAYCETHLEPTRLFCDVDQITLCSKCFQSQEHKHHMVCGIQEAAENYRKLFQEILNTSREKLEAAKSILTDEQERMAMIQEEEQNFKKMIESEYSMRLRLLNEECEQNLQRQQECISDLNLRETLLNQAIKLATELEEMFQEMLQRLGRVGRENMEKLKESEARASEQVRSLLKLIVELEKKCGEGTLALLKNAKYSLERSKSLLLEHLEPAHITDLSLCHIRGLSSMFRVLQRHLTLDPETAHPCLALSEDLRTMRLRHGQQDGAGNPERLDFSAMVLAAESFTSGRHYWEVDVEKATRWQVGIYHGSADAKGSTARASGEKVLLTGSVMGTEWTLWVFPPLKRLFLEKKLDTVGVFLDCEHGQISFYNVTEMSLIYNFSHCAFQGALRPVFSLCIPNGDTSPDSLTILQHGPSCDATVSP

SEQ ID NO: 2952 - protein, 221 aa, Homo sapiens
MSKRLSPQLQHNITEDAYCETHLEPTRLFCDVDQITLCSKCFQSQEHKHHMVCGIQEAAENYRKLFQEILNTSREKLEAAKSILTDEQERMAMIQEEEQNFKKMIESEYSMRLRLLNEECEQNLQRQQECISDLNLRETLLNQAIKLATELEEMFQEMLQRLGRVGRENMEKLKESEARASEQVRSLLKLIVELEKKCGEGTLALLKVRCWEKENKIHSSI

SEQ ID NO: 2953 - protein, 563 aa, Homo sapiens
MGLQACLLGLFALILSGKCSYSPEPDQRRTLPPGWVSLGRADPEEELSLTFALRQQNVERLSELVQAVSDPSSPQYGKYLTLENVADLVRPSPLTLHTVQKWLLAAGAQKCHSVITQDFLTCWLSIRQAELLLPGAEFHHYVGGPTETHVVRSPHPYQLPQALAPHVDFVGGLHRFPPTSSLRQRPEPQVTGTVGLHLGVTPSVIRKRYNLTSQDVGSGTSNNSQACAQFLEQYFHDSDLAQFMRLFGGNFAHQASVARVVGQQGRGRAGIEASLDVQYLMSAGANISTWVYSSPGRHEGQEPFLQWLMLLSNESALPHVHTVSYGDDEDSLSSAYIQRVNTELMKAAARGLTLLFASGDSGAGCWSVSGRHQFRPTFPASSPYVTTVGGTSFQEPFLITNEIVDYISGGGFSNVFPRPSYQEEAVTKFLSSSPHLPPSSYFNASGRAYPDVAALSDGYWVVSNRVPIPWVSGTSASTPVFGGILSLINEHRILSGRPPLGFLNPRLYQQHGAGLFDVTRGCHESCLDEEVEGQGFCSGPGWDPVTGWGTPNFPALLKTLLNP

SEQ ID NO: 2954 - protein, 320 aa, Homo sapiens
MRLFGGNFAHQASVARVVGQQGRGRAGIEASLDVQYLMSAGANISTWVYSSPGRHEGQEPFLQWLMLLSNESALPHVHTVSYGDDEDSLSSAYIQRVNTELMKAAARGLTLLFASGDSGAGCWSVSGRHQFRPTFPASSPYVTTVGGTSFQEPFLITNEIVDYISGGGFSNVFPRPSYQEEAVTKFLSSSPHLPPSSYFNASGRAYPDVAALSDGYWVVSNRVPIPWVSGTSASTPVFGGILSLINEHRILSGRPPLGFLNPRLYQQHGAGLFDVTRGCHESCLDEEVEGQGFCSGPGWDPVTGWGTPNFPALLKTLLNP

SEQ ID NO: 2955 - protein, 857 aa, Homo sapiens
MESEDLSGRELTIDSIMNKVRDIKNKFKNEDLTDELSLNKISADTTDNSGTVNQIMMMANNPEDWLSLLLKLEKNSVPLSDALLNKLIGRYSQAIEALPPDKYGQNESFARIQVRFAELKAIQEPDDARDYFQMARANCKKFAFVHISFAQFELSQGNVKKSKQLLQKAVERGAVPLEMLEIALRNLNLQKKQLLSEEEKKNLSASTVLTAQESFSGSLGHLQNRNNSCDSRGQTTKARFLYGENMPPQDAEIGYRNSLRQTNKTKQSCPFGRVPVNLLNSPDCDVKTDDSVVPCFMKRQTSRSECRDLVVPGSKPSGNDSCELRNLKSVQNSHFKEPLVSDEKSSELIITDSITLKNKTESSLLAKLEETKEYQEPEVPESNQKQWQSKRKSECINQNPAASSNHWQIPELARKVNTEQKHTTFEQPVFSVSKQSPPISTSKWFDPKSICKTPSSNTLDDYMSCFRTPVVKNDFPPACQLSTPYGQPACFQQQQHQILATPLQNLQVLASSSANECISVKGRIYSILKQIGSGGSSKVFQVLNEKKQIYAIKYVNLEEADNQTLDSYRNEIAYLNKLQQHSDKIIRLYDYEITDQYIYMVMECGNIDLNSWLKKKKSIDPWERKSYWKNMLEAVHTIHQHGIVHSDLKPANFLIVDGMLKLIDFGIANQMQPDTTSVVKDSQVGTVNYMPPEAIKDMSSSRENGKSKSKISPKSDVWSLGCILYYMTYGKTPFQQIINQISKLHAIIDPNHEIEFPDIPEKDLQDVLKCCLKRDPKQRISIPELLAHPYVQIQTHPVNQMAKGTTEEMKYVLGQLVGLNSPNSILKAAKTLYEHYSGGESHNSSSSKTFEKKRGKK

SEQ ID NO: 2956 - protein, 856 aa, Homo sapiens
MESEDLSGRELTIDSIMNKVRDIKNKFKNEDLTDELSLNKISADTTDNSGTVNQIMMMANNPEDWLSLLLKLEKNSVPLSDALLNKLIGRYSQAIEALPPDKYGQNESFARIQVRFAELKAIQEPDDARDYFQMARANCKKFAFVHISFAQFELSQGNVKKSKQLLQKAVERGAVPLEMLEIALRNLNLQKKQLLSEEEKKNLSASTVLTAQESFSGSLGHLQNRNNSCDSRGQTTKARFLYGENMPPQDAEIGYRNSLRQTNKTKQSCPFGRVPVNLLNSPDCDVKTDDSVVPCFMKRQTSRSECRDLVVPGSKPSGNDSCELRNLKSVQNSHFKEPLVSDEKSSELIITDSITLKNKTESSLLAKLEETKEYQEPEVPESNQKQWQSKRKSECINQNPAASSNHWQIPELARKVNTEKHTTFEQPVFSVSKQSPPISTSKWFDPKSICKTPSSNTLDDYMSCFRTPVVKNDFPPACQLSTPYGQPACFQQQQHQILATPLQNLQVLASSSANECISVKGRIYSILKQIGSGGSSKVFQVLNEKKQIYAIKYVNLEEADNQTLDSYRNEIAYLNKLQQHSDKIIRLYDYEITDQYIYMVMECGNIDLNSWLKKKKSIDPWERKSYWKNMLEAVHTIHQHGIVHSDLKPANFLIVDGMLKLIDFGIANQMQPDTTSVVKDSQVGTVNYMPPEAIKDMSSSRENGKSKSKISPKSDVWSLGCILYYMTYGKTPFQQIINQISKLHAIIDPNHEIEFPDIPEKDLQDVLKCCLKRDPKQRISIPELLAHPYVQIQTHPVNQMAKGTTEEMKYVLGQLVGLNSPNSILKAAKTLYEHYSGGESHNSSSSKTFEKKRGKK

SEQ ID NO: 2957 - protein, 516 aa, Homo sapiens
MPSSTSPDQGDDLENCILRFSDLDLKDMSLINPSSSLKAELDGSTKKKYSFAKKKAFALFVKTKEVPTKRSFECKEKLWKCCRQLFTDQTSIHRHVATQHADEIYHQTASILKQLAVTLSTSKSLSSADEKNPLKECLPHSHDVSAWLPDISCFNPDELISGQGSEEGEVLLYYCYHDLEDPQWICAWQTALCQHLHLTGKIRIAAEGINGTVGGSKLATRLYVEVMLSFPLFKDDLCKDDFKTSKGGAHCFPELRVGVFEEIVPMGISPKKISYKKPGIHLSPGEFHKEVEKFLSQANQEQSDTILLDCRNFYESKIGRFQGCLAPDIRKFSYFPSYVDKNLELFREKRVLMYCTGGIRCERGSAYLKAKGVCKEVFQLKGGIHKYLEEFPDGFYKGKLFVFDERYALSYNSDVVSECSYCGARWDQYKLCSTPQCRQLVLTCPACQGQGFTACCVTCQDKGSRKVSGPMQDSFKEECECTARRPRIPRELLQHVRQPVSPEPGPDADEDGPVLM

SEQ ID NO: 2958 - protein, 167 aa, Homo sapiens
MDLCLADSSVSAPAPHRQGIHLSPGEFHKEVEKFLSQANQEQSDTILLDCRNFYESKIGRFQGCLAPDIRKFSYFPSYVDKNLELFREKRVLMYCTGGIRCERGSAYLKAKGVCKEVFQLKGGIHKYLEEFPDGFYKGKLFVFDERYALSYNSDVVSGRSAQAQSPN

SEQ ID NO: 2959 - protein, 237 aa, Homo sapiens
MAGVSACIKYSMFTFNFLFWLCGILILALAIWVRVSNDSQAIFGSEDVGSSSYVAVDILIAVGAIIMILGFLGCCGAIKESRCMLLLFFIGLLLILLLQVATGILGAVFKSKSDRIVNETLYENTKLLSATGESEKQFQEAIIVFQEEFKCCGLVNGAADWGNNFQHYPELCACLDKQRPCQSYNGKQVYKETCISFIKDFLAKNLIIVIGISFGLAVIEILGLVFSMVLYCQIGNK

SEQ ID NO: 2960 - protein, 217 aa, Homo sapiens
MEDRAGEQEQERHSLRLEKLQHWARHRQSGHLLVLAVSQLWLAVVVVPLAVSVACLNSDCHMATALPLGPGASGLLTGTVTLELRRAPRLWKVRAMMIFNTFNLILGFIVVVVEVMKTALGPAPTASSQHAGLLVLELSAEAFTLGGVLVSVHALFLLSQRKPGCCRSQSLHYQELQEGFSELEEVPGLENGPTVASTGANERVGQREQTRAALLPP

SEQ ID NO: 2961 - protein, 1347 aa, Homo sapiens
MAEPRRVAFISLSPVRRREAEYPGPEREPEYPREPPRLEPQPYREPARAEPPAPREPAPRSDAQPPSREKPLPQREVSRAEPPMSLQREPPRPEPPPPFPPLPLQPPPPRESASRAEQPPRPPRETVRLELVLKDPTDESCVEFSYPELLLCGEQRKKLIHTEDPFNDEHQERQEVEMLAKKFEMKYGGKPRKHRKDRLQDLIDIGFGYDETDPFIDNSEAYDELVPASLTTKYGGFYINTGTLQFRQASDTEEDDITDNQKHKPPKVPKIKEDDIEMKKRKRKEEGEKEKKPRKKVPKQLGVVALNSHKSEKKKKRYKDSLSLAAMIRKFQKEKDALKKESNPKVPVTLSTPSLNKPPCAAAALGNDVPDLNLSSGDPDLPIFVSTNEHELFQEAENALEMLDDFDFDRLLDAASDGSPLSESGGENGTTTQPTYTSQVMPKVVPTLPEGLPVLLEKRIEDLRVAAKLFDEEGRKKFFTQDMNNILLDIELQLQELGPVIRSGVYSHLEAFVPCNKETLVKRLKKLHLNVQDDRLREPLQKLKLAVSNVMPEQLFKYQEDCQARSQAKCAKLQTDEEREKNGSEEDDDEKPGKRVIGPRKKFHWDDTIRTLLCNLVEIKLGCYELEPNKSQSAEDYLKSFMETEVKPLWPKGWMQARMLFKESRSVHNHLTSAPAKKKVIPAPKPKVKEVMVKTLPLHSFPTMLKECSPKKDQKTPTSLVASVSGPPTSSSTAAIAAASSSSAPAQETICLDDSLDEDLSFHSPSLDLVSEALAVINNGNKGPPVGSRISMPTTKPRPGLREEKLASIMSKLPLATPKKLDSTQTTHSSSLIAGHTGPVPKKPQDLAHTGISSGLIAGSSIQNPKVSLEPLPARLLQQGLQRSSQIHTSSSSQTHVSSSSQAQIAASSHALGTSEAQDASSLTQVTKVHQHSAVQQNYVSPLQATISKSQTNPVVKLSNNPQLSCSSSLIKTSDKPLMYRLPLSTPSPGNGSQGSHPLVSRTVPSTTTSSNYLAKAMVSQISTQGFKSPFSMAASPKLAASPKPATSPKPLPSPKPSASPKPSLSAKPSVSTKLISKSNPTPKPTVSPSSSSPNALVAQGSHSSTNSPVHKQPSGMNISRQSPTLNLLPSSRTSGLPPTKNLQAPSKLTNSSSTGTVGKNSLSGIAMNVPASRGSNLNSSGANRTSLSGGTGSGTQGATKPLSTPHRPSTASGSSVVTASVQSTAGASLLANASPLTLMTSPLSVTNQNVTPFGMLGGLVPVTMPFQFPLEIFGFGTDTAGVTTTSGSTSAAFHHSLTQNLLKGLQPGGAQHAATLSHSPLPAHLQQAFHDGGQSKGDTKLPRKSQ

SEQ ID NO: 2962 - protein, 970 aa, Homo sapiens
MAEPRRVAFISLSPVRRREAEYPGPEREPEYPREPPRLEPQPYREPARAEPPAPREPAPRSDAQPPSREKPLPQREVSRAEPPMSLQREPPRPEPPPPFPPLPLQPPPPRESASRAEQPPRPPRETVRLELVLKDPTDESCVEFSYPELLLCGEQRKKLIHTEDPFNDEHQERQEVEMLAKKFEMKYGGKPRKHRKDRLQDLIDIGFGYDETDPFIDNSEAYDELVPASLTTKYGGFYINTGTLQFRQASDTEEDDITDNQKHKPPKVPKIKEDDIEMKKRKRKEEGEKEKKPRKKVPKQLGVVALNSHKSEKKKKRYKDSLSLAAMIRKFQKEKDALKKESNPKVPVTLSTPSLNKPPCAAAALGNDVPDLNLSSGDPDLPIFVSTNEHELFQEAENALEMLDDFDFDRLLDAASDGSPLSESGGENGTTTQPTYTSQVMPKVVPTLPEGLPVLLEKRIEDLRVAAKLFDEEGRKKFFTQDMNNILLDIELQLQELGPVIRSGVYSHLEAFVPCNKETLVKRLKKLHLNVQDDRLREPLQKLKLAVSNVMPEQLFKYQEDCQARSQAKCAKLQTDEEREKNGSEEDDDEKPGKRVIGPRKKFHWDDTIRTLLCNLVEIKLGCYELEPNKSQSAEDYLKSFMETEVKPLWPKGWMQARMLFKESRSVHNHLTSAPAKKKVIPAPKPKVKEVMVKTLPLHSFPTMLKECSPKKDQKTPTSLVASVSGPPTSSSTAAIAAASSSSAPAQETICLDDSLDEDLSFHSPSLDLVSEALAVINNGNKGPPVGSRISMPTTKPRPGLREEKLASIMSKLPLATPKKLDSTQTTHSSSLIAGHTGPVPKKPQDLAHTGISSGLIAGSSIQNPKVSLEPLPARLLQQGLQRSSQIHTSSSSQTHVSSSSQAQIAASSHALGTSEAQDASSLTQVTKVHQHSAVQQNYVSPLQATISKSQTNPVVKGPCLRDVSEQFGP

SEQ ID NO: 2963 - protein, 385 aa, Homo sapiens
MGRWCQTVARGQRPRTSAPSRAGALLLLLLLLRSAGCWGAGEAPGALSTADPADQSVQCVPKATCPSSRPRLLWQTPTTQTLPSTTMETQFPVSEGKVDPYRSCGFSYEQDPTLRDPEAVARRWPWMVSVRANGTHICAGTIIASQWVLTVAHCLIWRDVIYSVRVGSPWIDQMTQTASDVPVLQVIMHSRYRAQRFWSWVGQANDIGLLKLKQELKYSNYVRPICLPGTDYVLKDHSRCTVTGWGLSKADGMWPQFRTIQEKEVIILNNKECDNFYHNFTKIPTLVQIIKSQMMCAEDTHREKFCYELTGEPLVCSMEGTWYLVGLVSWGAGCQKSEAPPIYLQVSSYQHWIWDCLNGQALALPAPSRTLLLALPLPLSLLAAL

SEQ ID NO: 2964 - protein, 961 aa, Homo sapiens
MLAPRGAAVLLLHLVLQRWLAAGAQATPQVFDLLPSSSQRLNPGALLPVLTDPALNDLYVISTFKLQTKSSATIFGLYSSTDNSKYFEFTVMGRLNKAILRYLKNDGKVHLVVFNNLQLADGRRHRILLRLSNLQRGAGSLELYLDCIQVDSVHNLPRAFAGPSQKPETIELRTFQRKPQDFLEELKLVVRGSLFQVASLQDCFLQQSEPLAATGTGDFNRQFLGQMTQLNQLLGEVKDLLRQQVKETSFLRNTIAECQACGPLKFQSPTPSTVVPPAPPAPPTRPPRRCDSNPCFRGVQCTDSRDGFQCGPCPEGYTGNGITCIDVDECKYHPCYPGVHCINLSPGFRCDACPVGFTGPMVQGVGISFAKSNKQVCTDIDECRNGACVPNSICVNTLGSYRCGPCKPGYTGDQIRGCKAERNCRNPELNPCSVNAQCIEERQGDVTCVCGVGWAGDGYICGKDVDIDSYPDEELPCSARNCKKDNCKYVPNSGQEDADRDGIGDACDEDADGDGILNEQDNCVLIHNVDQRNSDKDIFGDACDNCLSVLNNDQKDTDGDGRGDACDDDMDGDGIKNILDNCPKFPNRDQRDKDGDGVGDACDSCPDVSNPNQSDVDNDLVGDSCDTNQDSDGDGHQDSTDNCPTVINSAQLDTDKDGIGDECDDDDDNDGIPDLVPPGPDNCRLVPNPAQEDSNSDGVGDICESDFDQDQVIDRIDVCPENAEVTLTDFRAYQTVVLDPEGDAQIDPNWVVLNQGMEIVQTMNSDPGLAVGYTAFNGVDFEGTFHVNTQTDDDYAGFIFGYQDSSSFYVVMWKQTEQTYWQATPFRAVAEPGIQLKAVKSKTGPGEHLRNSLWHTGDTSDQVRLLWKDSRNVGWKDKVSYRWFLQHRPQVGYIRVRFYEGSELVADSGVTIDTTMRGGRLGVFCFSQENIIWSNLKYRCNDTIPEDFQEFQTQNFDRFDN

SEQ ID NO: 2965 - protein, 246 aa, Homo sapiens
MAAAAATKILLCLPLLLLLSGWSRAGRADPHSLCYDITVIPKFRPGPRWCAVQGQVDEKTFLHYDCGNKTVTPVSPLGKKLNVTTAWKAQNPVLREVVDILTEQLRDIQLENYTPKEPLTLQARMSCEQKAEGHSSGSWQFSFDGQIFLLFDSEKRMWTTVHPGARKMKEKWENDKVVAMSFHYFSMGDCIGWLEDFLMGMDSTLEPSAGAPLAMSSGTTQLRATATTLILCCLLIILPCFILPGI

SEQ ID NO: 2966 - protein, 85 aa, Homo sapiens
MSKVSFKITLTSDPRLPYKVLSVPESTPFTAVLKFAAEEFKVPAATSAIITNDGIGINPAQTAGNVFLKHGSELRIIPRDRVGSC

SEQ ID NO: 2967 - protein, 103 aa, Homo sapiens
MIRAFPTTTPRSLHLFTSSTFLARALPGAFPTGACEERLSVPESTPFTAVLKFAAEEFKVPAATSAIITNDGIGINPAQTAGNVFLKHGSELRIIPRDRVGSC

SEQ ID NO: 2968 - protein, 44 aa, Homo sapiens
MSDKPGMAEIEKFDKSKLKKTETQEKNPLSSKETIEQERQAGES

SEQ ID NO: 2969 - protein, 3546 aa, Homo sapiens
MCENCADLVEVLNEISDVEGGDGLQLRKEHTLKIFTYINSWTQRQCLCCFKEYKHLEIFNQVVCALINLVIAQVQVLRDQLCKHCTTINIDSTWQDESNQAEEPLNIDRECNEGSTERQKSIEKKSNSTRICNLTEEESSKSSDPFSLWSTDEKEKLLLCVAKIFQIQFPLYTAYKHNTHPTIEDISTQESNILGAFCDMNDVEVPLHLLRYVCLFCGKNGLSLMKDCFEYGTPETLPFLIAHAFITVVSNIRIWLHIPAVMQHIIPFRTYVIRYLCKLSDQELRQSAARNMADLMWSTVKEPLDTTLCFDKESLDLAFKYFMSPTLTMRLAGLSQITNQLHTFNDVCNNESLVSDTETSIAKELADWLISNNVVEHIFGPNLHIEIIKQCQVILNFLAAEGRLSTQHIDCIWAAAQLKHCSRYIHDLFPSLIKNLDPVPLRHLLNLVSALEPSVHTEQTLYLASMLIKALWNNALAAKAQLSKQSSFASLLNTNIPIGNKKEEEELRRTAPSPWSPAASPQSSDNSDTHQSGGSDIEMDEQLINRTKHVQQRLSDTEESMQGSSDETANSGEDGSSGPGSSSGHSDGSSNEVNSSHASQSAGSPGSEVQSEDIADIEALKEEDEDDDHGHNPPKSSCGTDLRNRKLESQAGICLGDSQGMSERNGTSSGTGKDLVFNTESLPSVDNRMRMLDACSHSEDPEHDISGEMNATHIAQGSQESCITRTGDFLGETIGNELFNCRQFIGPQHHHHHHHHHHHHDGHMVDDMLSADDVSCSSSQVSAKSEKNMADFDGEESGCEEELVQINSHAELTSHLQQHLPNLASIYHEHLSQGPVVHKHQFNSNAVTDINLDNVCKKGNTLLWDIVQDEDAVNLSEGLINEAEKLLCSLVCWFTDRQIRMRFIEGCLENLGNNRSVVISLRLLPKLFGTFQQFGSSYDTHWITMWAEKELNMMKLFFDNLVYYIQTVREGRQKHALYSHSAEVQVRLQFLTCVFSTLGSPDHFRLSLEQVDILWHCLVEDSECYDDALHWFLNQVRSKDQHAMGMETYKHLFLEKMPQLKPETISMTGLNLFQHLCNLARLATSAYDGCSNSELCGMDQFWGIALRAQSGDVSRAAIQYINSYYINGKTGLEKEQEFISKCMESLMIASSSLEQESHSSLMVIERGLLMLKTHLEAFRRRFAYHLRQWQIEGTGISSHLKALSDKQSLPLRVVCQPAGLPDKMTIEMYPSDQVADLRAEVTHWYENLQKEQINQQAQLQEFGQSNRKGEFPGGLMGPVRMISSGHELTTDYDEKALHELGFKDMQMVFVSLGAPRRERKGEGVQLPASCLPPPQKDNIPMLLLLQEPHLTTLFDLLEMLASFKPPSGKVAVDDSESLRCEELHLHAENLSRRVWELLMLLPTCPNMLMAFQNISDEQSNDGFNWKELLKIKSAHKLLYALEIIEALGKPNRRIRRESTGSYSDLYPDSDDSSEDQVENSKNSWSCKFVAAGGLQQLLEIFNSGILEPKEQESWTVWQLDCLACLLKLICQFAVDPSDLDLAYHDVFAWSGIAESHRKRTWPGKSRKAAGDHAKGLHIPRLTEVFLVLVQGTSLIQRLMSVAYTYDNLAPRVLKAQSDHRSRHEVSHYSMWLLVSWAHCCSLVKSSLADSDHLQDWLKKLTLLIPETAVRHESCSGLYKLSLSGLDGGDSINRSFLLLAASTLLKFLPDAQALKPIRIDDYEEEPILKPGCKEYFWLLCKLVDNIHIKDASQTTLLDLDALARHLADCIRSREILDHQDGNVEDDGLTGLLRLATSVVKHKPPFKFSREGQEFLRDIFNLLFLLPSLKDRQQPKCKSHSSRAAAYDLLVEMVKGSVENYRLIHNWVMAQHMQSHAPYKWDYWPHEDVRAECRFVGLTNLGATCYLASTIQQLYMIPEARQAVFTAKYSEDMKHKTTLLELQKMFTYLMESECKAYNPRPFCKTYTMDKQPLNTGEQKDMTEFFTDLITKIEEMSPELKNTVKSLFGGVITNNVVSLDCEHVSQTAEEFYTVRCQVADMKNIYESLDEVTIKDTLEGDNMYTCSHCGKKVRAEKRACFKKLPRILSFNTMRYTFNMVTMMKEKVNTHFSFPLRLDMTPYTEDFLMGKSERKEGFKEVSDHSKDSESYEYDLIGVTVHTGTADGGHYYSFIRDIVNPHAYKNNKWYLFNDAEVKPFDSAQLASECFGGEMTTKTYDSVTDKFMDFSFEKTHSAYMLFYKRMEPEEENGREYKFDVSSELLEWIWHDNMQFLQDKNIFEHTYFGFMWQLCSCIPSTLPDPKAVSLMTAKLSTSFVLETFIHSKEKPTMLQWIELLTKQFNNSQAACEWFLDRMADDDWWPMQILIKCPNQIVRQMFQRLCIHVIQRLRPVHAHLYLQPGMEDGSDDMDTSVEDIGGRSCVTRFVRTLLLIMEHGVKPHSKHLTEYFAFLYEFAKMGEEESQFLLSLQAISTMVHFYMGTKGPENPQVEVLSEEEGEEEEEEEDILSLAEEKYRPAALEKMIALVALLVEQSRSERHLTLSQTDMAALTGGKGFPFLFQHIRDGINIRQTCNLIFSLCRYNNRLAEHIVSMLFTSIAKLTPEAANPFFKLLTMLMEFAGGPPGMPPFASYILQRIWEVIEYNPSQCLDWLAVQTPRNKLAHSWVLQNMENWVERFLLAHNYPRVRTSAAYLLVSLIPSNSFRQMFRSTRSLHIPTRDLPLSPDTTVVLHQVYNVLLGLLSRAKLYVDAAVHGTTKLVPYFSFMTYCLISKTEKLMFSTYFMDLWNLFQPKLSEPAIATNHNKQALLSFWYNVCADCPENIRLIVQNPVVTKNIAFNYILADHDDQDVVLFNRGMLPAYYGILRLCCEQSPAFTRQLASHQNIQWAFKNLTPHASQYPGAVEELFNLMQLFIAQRPDMREEELEDIKQFKKTTISCYLRCLDGRSCWTTLISAFRILLESDEDRLLVVFNRGLILMTESFNTLHMMYHEATACHVTGDLVELLSIFLSVLKSTRPYLQRKDVKQALIQWQERIEFAHKLLTLLNSYSPPELRNACIDVLKELVLLSPHDFLHTLVPFLQHNHCTYHHSNIPMSLGPYFPCRENIKLIGGKSNIRPPRPELNMCLLPTMVETSKGKDDVYDRMLLDYFFSYHQFIHLLCRVAINCEKFTETLVKLSVLVAYEGLPLHLALFPKLWTELCQTQSAMSKNCIKLLCEDPVFAEYIKCILMDERTFLNNNIVYTFMTHFLLKVQSQVFSEANCANLISTLITNLISQYQNLQSDFSNRVEISKASASLNGDLRALALLLSVHTPKQLNPALIPTLQELLSKCRTCLQQRNSLQEQEAKERKTKDDEGATPIKRRRVSSDEEHTVDSCISDMKTETREVLTPTSTSDNETRDSSIIDPGTEQDLPSPENSSVKEYRMEVPSSFSEDMSNIRSQHAEEQSNNGRYDDCKEFKDLHCSKDSTLAEEESEFPSTSISAVLSDLADLRSCDGQALPSQDPEVALSLSCGHSRGLFSHMQQHDILDTLCRTIESTIHVVTRISGKGNQAAS

SEQ ID NO: 2970 - protein, 3395 aa, Homo sapiens
MRRKNSYYVWQKIFQIQFPLYTAYKHNTHPTIEDISTQESNILGAFCDMNDVEVPLHLLRYVCLFCGKNGLSLMKDCFEYGTPETLPFLIAHAFITVVSNIRIWLHIPAVMQHIIPFRTYVIRYLCKLSDQELRQSAARNMADLMWSTVKEPLDTTLCFDKESLDLAFKYFMSPTLTMRLAGLSQITNQLHTFNDVCNNESLVSDTETSIAKELADWLISNNVVEHIFGPNLHIEIIKQCQVILNFLAAEGRLSTQHIDCIWAAAQLKHCSRYIHDLFPSLIKNLDPVPLRHLLNLVSALEPSVHTEQTLYLASMLIKALWNNALAAKAQLSKQSSFASLLNTNIPIGNKKEEEELRRTAPSPWSPAASPQSSDNSDTHQSGGSDIEMDEQLINRTKHVQQRLSDTEESMQGSSDETANSGEDGSSGPGSSSGHSDGSSNEVNSSHASQSAGSPGSEVQSEDIADIEALKEEDEDDDHGHNPPKSSCGTDLRNRKLESQAGICLGDSQGMSERNGTSSGTGKDLVFNTESLPSVDNRMRMLDACSHSEDPEHDISGEMNATHIAQGSQESCITRTGDFLGETIGNELFNCRQFIGPQHHHHHHHHHHHHDGHMVDDMLSADDVSCSSSQVSAKSEKNMADFDGEESGCEEELVQINSHAELTSHLQQHLPNLASIYHEHLSQGPVVHKHQFNSNAVTDINLDNVCKKGNTLLWDIVQDEDAVNLSEGLINEAEKLLCSLVCWFTDRQIRMRFIEGCLENLGNNRSVVISLRLLPKLFGTFQQFGSSYDTHWITMWAEKELNMMKLFFDNLVYYIQTVREGRQKHALYSHSAEVQVRLQFLTCVFSTLGSPDHFRLSLEQVDILWHCLVEDSECYDDALHWFLNQVRSKDQHAMGMETYKHLFLEKMPQLKPETISMTGLNLFQHLCNLARLATSAYDGCSNSELCGMDQFWGIALRAQSGDVSRAAIQYINSYYINGKTGLEKEQEFISKCMESLMIASSSLEQESHSSLMVIERGLLMLKTHLEAFRRRFAYHLRQWQIEGTGISSHLKALSDKQSLPLRVVCQPAGLPDKMTIEMYPSDQVADLRAEVTHWYENLQKEQINQQAQLQEFGQSNRKGEFPGGLMGPVRMISSGHELTTDYDEKALHELGFKDMQMVFVSLGAPRRERKGEGVQLPASCLPPPQKDNIPMLLLLQEPHLTTLFDLLEMLASFKPPSGKVAVDDSESLRCEELHLHAENLSRRVWELLMLLPTCPNMLMAFQNISDEQSNDGFNWKELLKIKSAHKLLYALEIIEALGKPNRRIRRESTGSYSDLYPDSDDSSEDQVENSKNSWSCKFVAAGGLQQLLEIFNSGILEPKEQESWTVWQLDCLACLLKLICQFAVDPSDLDLAYHDVFAWSGIAESHRKRTWPGKSRKAAGDHAKGLHIPRLTEVFLVLVQGTSLIQRLMSVAYTYDNLAPRVLKAQSDHRSRHEVSHYSMWLLVSWAHCCSLVKSSLADSDHLQDWLKKLTLLIPETAVRHESCSGLYKLSLSGLDGGDSINRSFLLLAASTLLKFLPDAQALKPIRIDDYEEEPILKPGCKEYFWLLCKLVDNIHIKDASQTTLLDLDALARHLADCIRSREILDHQDGNVEDDGLTGLLRLATSVVKHKPPFKFSREGQEFLRDIFNLLFLLPSLKDRQQPKCKSHSSRAAAYDLLVEMVKGSVENYRLIHNWVMAQHMQSHAPYKWDYWPHEDVRAECRFVGLTNLGATCYLASTIQQLYMIPEARQAVFTAKYSEDMKHKTTLLELQKMFTYLMESECKAYNPRPFCKTYTMDKQPLNTGEQKDMTEFFTDLITKIEEMSPELKNTVKSLFGGVITNNVVSLDCEHVSQTAEEFYTVRCQVADMKNIYESLDEVTIKDTLEGDNMYTCSHCGKKVRAEKRACFKKLPRILSFNTMRYTFNMVTMMKEKVNTHFSFPLRLDMTPYTEDFLMGKSERKEGFKEVSDHSKDSESYEYDLIGVTVHTGTADGGHYYSFIRDIVNPHAYKNNKWYLFNDAEVKPFDSAQLASECFGGEMTTKTYDSVTDKFMDFSFEKTHSAYMLFYKRMEPEEENGREYKFDVSSELLEWIWHDNMQFLQDKNIFEHTYFGFMWQLCSCIPSTLPDPKAVSLMTAKLSTSFVLETFIHSKEKPTMLQWIELLTKQFNNSQAACEWFLDRMADDDWWPMQILIKCPNQIVRQMFQRLCIHVIQRLRPVHAHLYLQPGMEDGSDDMDTSVEDIGGRSCVTRFVRTLLLIMEHGVKPHSKHLTEYFAFLYEFAKMGEEESQFLLSLQAISTMVHFYMGTKGPENPQVEVLSEEEGEEEEEEEDILSLAEEKYRPAALEKMIALVALLVEQSRSERHLTLSQTDMAALTGGKGFPFLFQHIRDGINIRQTCNLIFSLCRYNNRLAEHIVSMLFTSIAKLTPEAANPFFKLLTMLMEFAGGPPGMPPFASYILQRIWEVIEYNPSQCLDWLAVQTPRNKLAHSWVLQNMENWVERFLLAHNYPRVRTSAAYLLVSLIPSNSFRQMFRSTRSLHIPTRDLPLSPDTTVVLHQVYNVLLGLLSRAKLYVDAAVHGTTKLVPYFSFMTYCLISKTEKLMFSTYFMDLWNLFQPKLSEPAIATNHNKQALLSFWYNVCADCPENIRLIVQNPVVTKNIAFNYILADHDDQDVVLFNRGMLPAYYGILRLCCEQSPAFTRQLASHQNIQWAFKNLTPHASQYPGAVEELFNLMQLFIAQRPDMREEELEDIKQFKKTTISCYLRCLDGRSCWTTLISAFRILLESDEDRLLVVFNRGLILMTESFNTLHMMYHEATACHVTGDLVELLSIFLSVLKSTRPYLQRKDVKQALIQWQERIEFAHKLLTLLNSYSPPELRNACIDVLKELVLLSPHDFLHTLVPFLQHNHCTYHHSNIPMSLGPYFPCRENIKLIGGKSNIRPPRPELNMCLLPTMVETSKGKDDVYDRMLLDYFFSYHQFIHLLCRVAINCEKFTETLVKLSVLVAYEGLPLHLALFPKLWTELCQTQSAMSKNCIKLLCEDPVFAEYIKCILMDERTFLNNNIVYTFMTHFLLKVQSQVFSEANCANLISTLITNLISQYQNLQSDFSNRVEISKASASLNGDLRALALLLSVHTPKQLNPALIPTLQELLSKCRTCLQQRNSLQEQEAKERKTKDDEGATPIKRRRVSSDEEHTVDSCISDMKTETREVLTPTSTSDNETRDSSIIDPGTEQDLPSPENSSVKEYRMEVPSSFSEDMSNIRSQHAEEQSNNGRYDDCKEFKDLHCSKDSTLAEEESEFPSTSISAVLSDLADLRSCDGQALPSQDPEVALSLSCGHSRGLFSHMQQHDILDTLCRTIESTIHVVTRISGKGNQAAS

SEQ ID NO: 2971 - protein, 3312 aa, Homo sapiens
MRRKNSYYVWQKIFQIQFPLYTAYKHNTHPTIEDISTQESNILGAFCDMNDVEVPLHLLRYVCLFCGKNGLSLMKDCFEYGTPETLPFLIAHAFITVVSNIRIWLHIPAVMQHIIPFRTYVIRYLCKLSDQELRQSAARNMADLMWSTVKEPLDTTLCFDKESLDLAFKYFMSPTLTMRLAGLSQITNQLHTFNDVCNNESLVSDTETSIAKELADWLISNNVVEHIFGPNLHIEIIKQCQVILNFLAAEGRLSTQHIDCIWAAAQLKHCSRYIHDLFPSLIKNLDPVPLRHLLNLVSALEPSVHTEQTLYLASMLIKALWNNALAAKAQLSKQSSFASLLNTNIPIGNKKEEEELRRTAPSPWSPAASPQSSDNSDTHQSGGSDIEMDEQLINRTKHVQQRLSDTEESMQGSSDETANSGEDGSSGPGSSSGHSDGSSNEVNSSHASQSAGSPGSEVQSEDIADIEALKEEDEDDDHGHNPPKSSCGTDLRNRKLESQAGICLGDSQGMSERNGTSSGTGKDLVFNTESLPSVDNRMRMLDACSHSEDPEHDISGEMNATHIAQGSQESCITRTGDFLGETIGNELFNCRQFIGPQHHHHHHHHHHHHDGHMVDDMLSADDVSCSSSQVSAKSEKNMADFDGEESGCEEELVQINSHAELTSHLQQHLPNLASIYHEHLSQGPVVHKHQFNSNAVTDINLDNVCKKGNTLLWDIVQDEDAVNLSEGLINEAEKLLCSLVCWFTDRQIRMRFIEGCLENLGNNRSVVISLRLLPKLFGTFQQFGSSYDTHWITMWAEKELNMMKLFFDNLVYYIQTVREGRQKHALYSHSAEVQVRLQFLTCVFSTLGSPDHFRLSLEQVDILWHCLVEDSECYDDALHWFLNQVRSKDQHAMGMETYKHLFLEKMPQLKPETISMTGLNLFQHLCNLARLATSAYDGCSNSELCGMDQFWGIALRAQSGDVSRAAIQYINSYYINGKTGLEKEQEFISKCMESLMIASSSLEQESHSSLMVIERGLLMLKTHLEAFRRRFAYHLRQWQIEGTGISSHLKALSDKQSLPLRVVCQPAGLPDKMTIEMYPSDQVADLRAEVTHWYENLQKEQINQQAQLQEFGQSNRKGEFPGGLMGPVRMISSGHELTTDYDEKALHELGFKDMQMVFVSLGAPRRERKGEGVQLPASCLPPPQKDNIPMLLLLQEPHLTTLFDLLEMLASFKPPSGKVAVDDSESLRCEELHLHAENLSRRVWELLMLLPTCPNMLMAFQNISDEQSNDGFNWKELLKIKSAHKLLYALEIIEALGKPNRRIRRESTGSYSDLYPDSDDSSEDQVENSKNSWSCKFVAAGGLQQLLEIFNSGILEPKEQESWTVWQLDCLACLLKLICQFAVDPSDLDLAYHDVFAWSGIAESHRKRTWPGKSRKAAGDHAKGLHIPRLTEVFLVLVQGTSLIQRLMSVAYTYDNLAPRVLKAQSDHRSRHEVSHYSMWLLVSWAHCCSLVKSSLADSDHLQDWLKKLTLLIPETAVRHESCSGLYKLSLSGLDGGDSINRSFLLLAASTLLKFLPDAQALKPIRIDDYEEEPILKPGCKEYFWLLCKLVDNIHIKDASQTTLLDLDALARHLADCIRSREILDHQDGNVEDDGLTGLLRLATSVVKHKPPFKFSREGQEFLRDIFNLLFLLPSLKDRQQPKCKSHSSRAAAYDLLVEMVKGSVENYRLIHNWVMAQHMQSHAPYKWDYWPHEDVRAECRFVGLTNLGATCYLASTIQQLYMIPEARQAVFTAKYSEDMKHKTTLLELQKMFTYLMESECKAYNPRPFCKTYTMDKQPLNTGEQKDMTEFFTDLITKIEEMSPELKNTVKSLFGGVITNNVVSLDCEHVSQTAEEFYTVRCQVADMKNIYESLDEVTIKDTLEGDNMYTCSHCGKKVRAEKRACFKKLPRILSFNTMRYTFNMVTMMKEKVNTHFSFPLRLDMTPYTEDFLMGKSERKEGFKEVSDHSKDSESYEYDLIGVTVHTGTADGGHYYSFIRDIVNPHAYKNNKWYLFNDAEVKPFDSAQLASECFGGEMTTKTYDSVTDKFMDFSFEKTHSAYMLFYKRMEPEEENGREYKFDVSSELLEWIWHDNMQFLQDKNIFEHTYFGFMWQLCSCIPSTLPDPKAVSLMTAKLSTSFVLETFIHSKEKPTMLQWIELLTKQFNNSQAACEWFLDRMADDDWWPMQILIKCPNQIVRQMFQRLCIHVIQRLRPVHAHLYLQPGMEDGSDDMDTSVEDIGGRSCVTRFVRTLLLIMEHGVKPHSKHLTEYFAFLYEFAKMGEEESQFLLSLQAISTMVHFYMGTKGPENPQVEVLSEEEGEEEEEEEDILSLAEEKYRPAALEKMIALVALLVEQSRSERHLTLSQTDMAALTGGKGFPFLFQHIRDGINIRQTCNLIFSLCRYNNRLAEHIVSMLFTSIAKLTPEAANPFFKLLTMLMEFAGGPPGMPPFASYILQRIWEVIEYNPSQCLDWLAVQTPRNKLAHSWVLQNMENWVERFLLAHNYPRVRTSAAYLLVSLIPSNSFRQMFRSTRSLHIPTRDLPLSPDTTVVLHQVYNVLLGLLSRAKLYVDAAVHGTTKLVPYFSFMTYCLISKTEKLMFSTYFMDLWNLFQPKLSEPAIATNHNKQALLSFWYNVCADCPENIRLIVQNPVVTKNIAFNYILADHDDQDVVLFNRGMLPAYYGILRLCCEQSPAFTRQLASHQNIQWAFKNLTPHASQYPGAVEELFNLMQLFIAQRPDMREEELEDIKQFKKTTISCYLRCQALIQWQERIEFAHKLLTLLNSYSPPELRNACIDVLKELVLLSPHDFLHTLVPFLQHNHCTYHHSNIPMSLGPYFPCRENIKLIGGKSNIRPPRPELNMCLLPTMVETSKGKDDVYDRMLLDYFFSYHQFIHLLCRVAINCEKFTETLVKLSVLVAYEGLPLHLALFPKLWTELCQTQSAMSKNCIKLLCEDPVFAEYIKCILMDERTFLNNNIVYTFMTHFLLKVQSQVFSEANCANLISTLITNLISQYQNLQSDFSNRVEISKASASLNGDLRALALLLSVHTPKQLNPALIPTLQELLSKCRTCLQQRNSLQEQEAKERKTKDDEGATPIKRRRVSSDEEHTVDSCISDMKTETREVLTPTSTSDNETRDSSIIDPGTEQDLPSPENSSVKEYRMEVPSSFSEDMSNIRSQHAEEQSNNGRYDDCKEFKDLHCSKDSTLAEEESEFPSTSISAVLSDLADLRSCDGQALPSQDPEVALSLSCGHSRGLFSHMQQHDILDTLCRTIESTIHVVTRISGKGNQAAS

SEQ ID NO: 2972 - protein, 794 aa, Homo sapiens
MADAWEEIRRLAADFQRAQFAEATQRLSERNCIEIVNKLIAQKQLEVVHTLDGKEYITPAQISKEMRDELHVRGGRVNIVDLQQVINVDLIHIENRIGDIIKSEKHVQLVLGQLIDENYLDRLAEEVNDKLQESGQVTISELCKTYDLPGNFLTQALTQRLGRIISGHIDLDNRGVIFTEAFVARHKARIRGLFSAITRPTAVNSLISKYGFQEQLLYSVLEELVNSGRLRGTVVGGRQDKAVFVPDIYSRTQSTWVDSFFRQNGYLEFDALSRLGIPDAVSYIKKRYKTTQLLFLKAACVGQGLVDQVEASVEEAISSGTWVDIAPLLPTSLSVEDAAILLQQVMRAFSKQASTVVFSDTVVVSEKFINDCTELFRELMHQKAEKEMKNNPVHLITEEDLKQISTLESVSTSKKDKKDERRRKATEGSGSMRGGGGGNAREYKIKKVKKKGRKDDDSDDESQSSHTGKKKPEISFMFQDEIEDFLRKHIQDAPEEFISELAEYLIKPLNKTYLEVVRSVFMSSTTSASGTGRKRTIKDLQEEVSNLYNNIRLFEKGMKFFADDTQAALTKHLLKSVCTDITNLIFNFLASDLMMAVDDPAAITSEIRKKILSKLSEETKVALTKLHNSLNEKSIEDFISCLDSAAEACDIMVKRGDKKRERQILFQHRQALAEQLKVTEDPALILHLTSVLLFQFSTHSMLHAPGRCVPQIIAFLNSKIPEDQHALLVKYQGLVVKQLVSQSKKTGQGDYPLNNELDKEQEDVASTTRKELQELSSSIKDLVLKSRKSSVTEE

SEQ ID NO: 2973 - protein, 729 aa, Homo sapiens
MRDELHVRGGRVNIVDLQQVINVDLIHIENRIGDIIKSEKHVQLVLGQLIDENYLDRLAEEVNDKLQESGQVTISELCKTYDLPGNFLTQALTQRLGRIISGHIDLDNRGVIFTEAFVARHKARIRGLFSAITRPTAVNSLISKYGFQEQLLYSVLEELVNSGRLRGTVVGGRQDKAVFVPDIYSRTQSTWVDSFFRQNGYLEFDALSRLGIPDAVSYIKKRYKTTQLLFLKAACVGQGLVDQVEASVEEAISSGTWVDIAPLLPTSLSVEDAAILLQQVMRAFSKQASTVVFSDTVVVSEKFINDCTELFRELMHQKAEKEMKNNPVHLITEEDLKQISTLESVSTSKKDKKDERRRKATEGSGSMRGGGGGNAREYKIKKVKKKGRKDDDSDDESQSSHTGKKKPEISFMFQDEIEDFLRKHIQDAPEEFISELAEYLIKPLNKTYLEVVRSVFMSSTTSASGTGRKRTIKDLQEEVSNLYNNIRLFEKGMKFFADDTQAALTKHLLKSVCTDITNLIFNFLASDLMMAVDDPAAITSEIRKKILSKLSEETKVALTKLHNSLNEKSIEDFISCLDSAAEACDIMVKRGDKKRERQILFQHRQALAEQLKVTEDPALILHLTSVLLFQFSTHSMLHAPGRCVPQIIAFLNSKIPEDQHALLVKYQGLVVKQLVSQSKKTGQGDYPLNNELDKEQEDVASTTRKELQELSSSIKDLVLKSRKSSVTEE

SEQ ID NO: 2974 - protein, 509 aa, Homo sapiens
MADAWEEIRRLAADFQRAQFAEATQRLSERNCIEIVNKLIAQKQLEVVHTLDGKEYITPAQISKEMRDELHVRGGRVNIVDLQQVINVDLIHIENRIGDIIKSEKHVQLVLGQLIDENYLDRLAEEVNDKLQESGQVTISELCKTYDLPGNFLTQALTQRLGRIISGHIDLDNRGVIFTEAFVARHKARIRGLFSAITRPTAVNSLISKYGFQEQLLYSVLEELVNSGRLRGTVVGGRQDKAVFVPDIYSRTQSTWVDSFFRQNGYLEFDALSRLGIPDAVSYIKKRYKTTQLLFLKAACVGQGLVDQVEASVEEAISSGTWVDIAPLLPTSLSVEDAAILLQQVMRAFSKQASTVVFSDTVVVSEKFINDCTELFRELMHQKAEKEMKNNPVHLITEEDLKQISTLESVSTSKKDKKDERRRKATEGSGSMRGGGGGNAREYKIKKVKKKGRKDDDSDDESQSSHTGKKKPEISFMFQDEIEDFLRKHIQDAPEEFISELAEYLIKQV

SEQ ID NO: 2975 - protein, 259 aa, Homo sapiens
MSSTSSKRAPTTATQRLKQDYLRIKKDPVPYICAEPLPSNILEWHYVVRGPEMTPYEGGYYHGKLIFPREFPFKPPSIYMITPNGRFKCNTRLCLSITDFHPDTWNPAWSVSTILTGLLSFMVEKGPTLGSIETSDFTKRQLAVQSLAFNLKDKVFCELFPEVVEEIKQKQKAQDELSSRPQTLPLPDVVPDGETHLVQNGIQLLNGHAPGAVPNLAGLQQANRHHGLLGGALANLFVIVGFAAFAYTVKYVLRSIAQE

SEQ ID NO: 2976 - protein, 224 aa, Homo sapiens
MWPQDIAGRHYVVRGPEMTPYEGGYYHGKLIFPREFPFKPPSIYMITPNGRFKCNTRLCLSITDFHPDTWNPAWSVSTILTGLLSFMVEKGPTLGSIETSDFTKRQLAVQSLAFNLKDKVFCELFPEVVEEIKQKQKAQDELSSRPQTLPLPDVVPDGETHLVQNGIQLLNGHAPGAVPNLAGLQQANRHHGLLGGALANLFVIVGFAAFAYTVKYVLRSIAQE

SEQ ID NO: 2977 - protein, 275 aa, Homo sapiens
MSSTSSKRAPTTATQRLKQDYLRIKKDPVPYICAEPLPSNILEWFKRFSWLSLLSSWDYRHYVVRGPEMTPYEGGYYHGKLIFPREFPFKPPSIYMITPNGRFKCNTRLCLSITDFHPDTWNPAWSVSTILTGLLSFMVEKGPTLGSIETSDFTKRQLAVQSLAFNLKDKVFCELFPEVVEEIKQKQKAQDELSSRPQTLPLPDVVPDGETHLVQNGIQLLNGHAPGAVPNLAGLQQANRHHGLLGGALANLFVIVGFAAFAYTVKYVLRSIAQE

SEQ ID NO: 2978 - protein, 624 aa, Homo sapiens
MAENGESSGPPRPSRGPAAAQGSAAAPAEPKIIKVTVKTPKEKEEFAVPENSSVQQFKEAISKRFKSQTDQLVLIFAGKILKDQDTLIQHGIHDGLTVHLVIKSQNRPQGQSTQPSNAAGTNTTSASTPRSNSTPISTNSNPFGLGSLGGLAGLSSLGLSSTNFSELQSQMQQQLMASPEMMIQIMENPFVQSMLSNPDLMRQLIMANPQMQQLIQRNPEISHLLNNPDIMRQTLEIARNPAMMQEMMRNQDLALSNLESIPGGYNALRRMYTDIQEPMLNAAQEQFGGNPFASVGSSSSSGEGTQPSRTENRDPLPNPWAPPPATQSSATTSTTTSTGSGSGNSSSNATGNTVAAANYVASIFSTPGMQSLLQQITENPQLIQNMLSAPYMRSMMQSLSQNPDLAAQMMLNSPLFTANPQLQEQMRPQLPAFLQQMQNPDTLSAMSNPRAMQALMQIQQGLQTLATEAPGLIPSFTPGVGVGVLGTAIGPVGPVTPIGPIGPIVPFTPIGPIGPIGPTGPAAPPGSTGSGGPTGPTVSSAAPSETTSPTSESGPNQQFIQQMVQALAGANAPQLPNPEVRFQQQLEQLNAMGFLNREANLQALIATGGDINAAIERLLGSQPS

SEQ ID NO: 2979 - protein, 448 aa, Homo sapiens
MRENVVVSNMERESGKPVAVVAVVTEPWFTQRYREYLQRQKLFDTQHRVEKMPDGSVALPVLGETLPEQHLQELRNRVAPGSPCMLTQLPDPVPSKRAQGCSPAQKLCLEVSRWVEGRGVKWSAELEADLPRSWQRHGNLLLLSEDCFQAKQWKNLGPELWETVALALGVQRLAKRGRVSPDGTRTPAVTLLLGDHGWVEHVDNGIRYKFDVTQCMFSFGNITEKLRVASLSCAGEVLVDLYAGIGYFTLPFLVHAGAAFVHACEWNPHAVVALRNNLEINGVADRCQIHFGDNRKLKLSNIADRVILGLIPSSEEGWPIACQVLRQDAGGILHIHQNVESFPGKNLQALGVSKVEKEHWLYPQQITTNQWKNGATRDSRGKMLSPATKPEWQRWAESAETRIATLLQQVHGKPWKTQILHIQPVKSYAPHVDHIVLDLECCPCPSVG

SEQ ID NO: 2980 - protein, 246 aa, Homo sapiens
MSPKPRASGPPAKAKEAGKRKSSSQPSPSDPKKKTTKVAKKGKAVRRGRRGKKGAATKMAAVTAPEAESGPAAPGPSDQPSQELPQHELPPEEPVSEGTQHDPLSQESELEEPLSQESEVEEPLSQESQVEEPLSQESEVEEPLSQESQVEEPLSQESEVEEPLSQESEVEEPLSQESQVEEPLSQESEVEEPLSQESQVEEPLSQESEMEEPLSQESQVEEPLSQESEMEEPLSQESEMEELPSV

SEQ ID NO: 2981 - protein, 216 aa, Homo sapiens
MSPKPRASGPPAKAKEAGKRKSSSQPSPSDPKKKTTKVAKKGKAVRRGRRGKKGAATKMAAVTAPEAESGPAAPGPSDQPSQELPQHELPPEEPVSEGTQHDPLSQESELEEPLSQESEVEEPLSQESQVEEPLSQESEVEEPLSQESQVEEPLSQESEVEEPLSQESQVEEPLSQESEMEEPLSQESQVEEPLSQESEMEEPLSQESEMEELPSV

SEQ ID NO: 2982 - protein, 145 aa, Homo sapiens
MSWAPVLLMLFVYCTGCGPQPVLHQPPAMSSALGTTIRLTCTLRNDHDIGVYSVYWYQQRPGHPPRFLLRYFSQSDKSQGPQVPPRFSGSKDVARNRGYLSISELQPEDEAMYYCAMGARSSEKEEREREWEEEMEPTAARTRVP

SEQ ID NO: 2983 - protein, 973 aa, Homo sapiens
MASILDEYENSLSRSAVLQPGCPSVGIPHSGYVNAQLEKEVPIFTKQRIDFTPSERITSLVVSSNQLCMSLGKDTLLRIDLGKANEPNHVELGRKDDAKVHKMFLDHTGSHLLIALSSTEVLYVNRNGQKVRPLARWKGQLVESVGWNKALGTESSTGPILVGTAQGHIFEAELSASEGGLFGPAPDLYFRPLYVLNEEGGPAPVCSLEAERGPDGRSFVIATTRQRLFQFIGRAAEGAEAQGFSGLFAAYTDHPPPFREFPSNLGYSELAFYTPKLRSAPRAFAWMMGDGVLYGALDCGRPDSLLSEERVWEYPEGVGPGASPPLAIVLTQFHFLLLLADRVEAVCTLTGQVVLRDHFLEKFGPLKHMVKDSSTGQLWAYTERAVFRYHVQREARDVWRTYLDMNRFDLAKEYCRERPDCLDTVLAREADFCFRQRRYLESARCYALTQSYFEEIALKFLEARQEEALAEFLQRKLASLKPAERTQATLLTTWLTELYLSRLGALQGDPEALTLYRETKECFRTFLSSPRHKEWLFASRASIHELLASHGDTEHMVYFAVIMQDYERVVAYHCQHEAYEEALAVLARHRDPQLFYKFSPILIRHIPRQLVDAWIEMGSRLDARQLIPALVNYSQGGEVQQVSQAIRYMEFCVNVLGETEQAIHNYLLSLYARGRPDSLLAYLEQAGASPHRVHYDLKYALRLCAEHGHHRACVHVYKVLELYEEAVDLALQVDVDLAKQCADLPEEDEELRKKLWLKIARHVVQEEEDVQTAMACLASCPLLKIEDVLPFFPDFVTIDHFKEAICSSLKAYNHHIQELQREMEEATASAQRIRRDLQELRGRYGTVEPQDKCATCDFPLLNRPFYLFLCGHMFHADCLLQAVRPGLPAYKQARLEELQRKLGAAPPPAKGSARAKEAEGGAATAGPSREQLKADLDELVAAECVYCGELMIRSIDRPFIDPQRYEEEQLSWL

SEQ ID NO: 2984 - protein, 101 aa, Homo sapiens
MERPDKAALNALQPPEFRNESSLASTLKTLLFFTALMITVPIGLYFTTKSYIFEGALGMSNRDSYFYAAIVAVVAVHVVLALFVYVAWNEGSRQWREGKQD

SEQ ID NO: 2985 - protein, 156 aa, Homo sapiens
MLGSPCGPQLSDRDADEDQCSREFRGRRSRRPPRRTMLRGKSRLNVEWLGYSPGLLLEHRPLLAGRTPRSHRRNESSLASTLKTLLFFTALMITVPIGLYFTTKSYIFEGALGMSNRDSYFYAAIVAVVAVHVVLALFVYVAWNEGSRQWREGKQD

SEQ ID NO: 2986 - protein, 156 aa, Homo sapiens
WASQVSENRPVCKAIIQGKQFEGLVDTGADVSIIALNQWPKNWPKQKAVIGLVGIGTASEVYQSMEILHCLGPDNQESTVQPMITSIPLNLWGRDLLQQWGAEITMPAPLYSPTSQKIMTKRGYIPGKGLGKNEDGIKIPFEAKINQKREGIGYPF

SEQ ID NO: 2987 - protein, 386 aa, Homo sapiens
MDRFVWTSGLLEINETLVIQQRGVRIYDGEEKIKFDAGTLLLSTHRLIWRDQKNHECCMAILLSQIVFIEEQAAGIGKSAKIVVHLHPAPPNKEPGPFQSSKNSYIKLSFKEHGQIEFYRRLSEEMTQRRWENMPVSQSLQTNRGPQPGRIRAVGIVGIERKLEEKRKETDKNISEAFEDLSKLMIKAKEMVELSKSIANKIKDKQGDITEDETIRFKSYLLSMGIANPVTRETYGSGTQYHMQLAKQLAGILQVPLEERGGIMSLTEVYCLVNRARGMELLSPEDLVNACKMLEALKLPLRLRVFDSGVMVIELQSHKEEEMVASALETVSEKGSLTSEEFAKLVGMSVLLAKERLLLAEKMGHLCRDDSVEGLRFYPNLFMTQS

SEQ ID NO: 2988 - protein, 328 aa, Homo sapiens
MAILLSQIVFIEEQAAGIGKSAKIVVHLHPAPPNKEPGPFQSSKNSYIKLSFKEHGQIEFYRRLSEEMTQRRWENMPVSQSLQTNRGPQPGRIRAVGIVGIERKLEEKRKETDKNISEAFEDLSKLMIKAKEMVELSKSIANKIKDKQGDITEDETIRFKSYLLSMGIANPVTRETYGSGTQYHMQLAKQLAGILQVPLEERGGIMSLTEVYCLVNRARGMELLSPEDLVNACKMLEALKLPLRLRVFDSGVMVIELQSHKEEEMVASALETVSEKGSLTSEEFAKLVGMSVLLAKERLLLAEKMGHLCRDDSVEGLRFYPNLFMTQS

SEQ ID NO: 2989 - protein, 251 aa, Homo sapiens
MYRARAARAGPEPGSPGRFGILSTGQLRDLLQDEPKLDRIVRLSRKFQGLQLEREACLASNYALAKENLALRPRLEMGRAALAIKYQELREVAENCADKLQRLEESMHRWSPHCALGWLQAELEEAEQEAEEQMEQLLLGEQSLEAFLPAFQRGRALAHLRRTQAEKLQELLRRRERSAQPAPTSAADPPKSFPAAAVLPTGAARGPPAVPRSLPPLDSRPVPPLKGSPGCPLGPAPLLSPRPSQPEPPHR

SEQ ID NO: 2990 - protein, 498 aa, Homo sapiens
MPLVTRNIEPRHLCRQTLPSVRSELECVTNITLANVIRQLGSLSKYAEDIFGELFTQANTFASRVSSLAERVDRLQVKVTQLDPKEEEVSLQGINTRKAFRSSTIQDQKLFDRNSLPVPVLETYNTCDTPPPLNNLTPYRDDGKEALKFYTDPSYFFDLWKEKMLQDTKDIMKEKRKHRKEKKDNPNRGNVNPRKIKTRKEEWEKMKMGQEFVESKEKLGTSGYPPTLVYQNGSIGCVENVDASSYPPPPQSDSASSPSPSFSEDNLPPPPAEFSYPVDNQRGSGLAGPKRSSVVSPSHPPPAPPLGSPPGPKPGFAPPPAPPPPPPPMIGIPPPPPPVGFGSPGTPPPPSPPSFPPHPDFAAPPPPPPPPAADYPTLPPPPLSQPTGGAPPPPPPPPPPGPPPPPFTGADGQPAIPPPLSDTTKPKSSLPAVSDARSDLLSAIRQGFQLRRVEEQREQEKRDVVGNDVATILSRRIAVEYSDSEDDSSEFDEDDWSD

SEQ ID NO: 2991 - protein, 281 aa, Homo sapiens
MPLVTRNIEPRHLCRQTLPSVRSELECVTNITLANVIRQLGSLSKYAEDIFGELFTQANTFASRVSSLAERVDRLQVKVTQLDPKEEEVSLQGINTRKAFRSSTIQDQKLFDRNSLPVPVLETYNTCDTPPPLNNLTPYRDDGKEALKFYTDPSYFFDLWKEKMLQDTKDIMKEKRKHRKEKKDNPNRGNVNPRKIKTRKEEWEKMKMGQEFVESKEKLGTSGYPPTLVYQNGSIGCVENVDASSYPPPPQSDSASSPSPSFSEDNLPPPPAEFRFSAAQG

SEQ ID NO: 2992 - protein, 306 aa, Homo sapiens
MAAVDDLQFEEFGNAATSLTANPDATTVNIEDPGETPKHQPGSPRGSGREEDDELLGNDDSDKTELLAGQKKSSPFWTFEYYQTFFDVDTYQVFDRIKGSLLPIPGKNFVRLYIRSNPDLYGPFWICATLVFAIAISGNLSNFLIHLGEKTYHYVPEFRKVSIAATIIYAYAWLVPLALWGFLMWRNSKVMNIVSYSFLEIVCVYGYSLFIYIPTAILWIIPQKAVRWILVMIALGISGSLLAMTFWPAVREDNRRVALATIVTIVLLHMLLSVGCLAYFFDAPEMDHLPTTTATPNQTVAAAKSS

SEQ ID NO: 2993 - protein, 123 aa, Homo sapiens
MWRNSKVMNIVSYSFLEIVCVYGYSLFIYIPTAILWIIPQKAVRWILVMIALGISGSLLAMTFWPAVREDNRRVALATIVTIVLLHMLLSVGCLAYFFDAPEMDHLPTTTATPNQTVAAAKSS

SEQ ID NO: 2994 - protein, 141 aa, Homo sapiens
MISAHCSNLHFLGSSESPTLASQVGEITGTHHHTRLIFVFLVETGFHHVGHAGLELLTSSDPPTLASRSAGITGMSHRARPHGISRGEQVTLGLPLELLECVSWPLCGSPLRRAQIVSTPPSPLAALRVPVGAEGWGGTEQ

SEQ ID NO: 2995 - protein, 49 aa, Homo sapiens
MPYDQDSFSTLLGFLQASRKYSEFTLKCPICIYVPCQCFAVGFLKQSDQ

SEQ ID NO: 2996 - protein, 589 aa, Homo sapiens
MNNRKEDMEITSHYRHLLRELNEQRQHGVLCDVCVVVEGKVFKAHKNVLLGSSRYFKTLYCQVQKTSEQATVTHLDIVTAQGFKAIIDFMYSAHLALTSRNVIEVMSAASFLQMTDIVQACHDFIKAALDISIKSDASDELAEFEIGASSSSSTEALISAVMAGRSISPWLARRTSPANSSGDSAIASCHDGGSSYGKEDQEPKADGPDDVSSQPLWPGDVGYGPLRIKEEQVSPSQYGGSELPSAKDGAVQNSFSEQSAGDAWQPTGRRKNRKNKETVRHITQQVEDDSRASSPVPSFLPTSGWPFSSRDSNADLSVTEASSSDSRGERAELYAQVEEGLLGGEASYLGPPLTPEKDDALHQATAVANLRAALMSKNSLLSLKADVLGDDGSLLFEYLPRGAHSLSLNEFTVIRKKFKCPYCSFSAMHQCILKRHMRSHTGERPYPCEICGKKFTRREHMKRHTLVHSKDKKYVCKVCSRVFMSAASVGIRHGSRRHGVCTDCAGRGMAGPLDHGGGGGEGSPEALFPGDGPYLEDPEDPRGEAEELGEDDEGLAPEDALLADDKDEEDSPRPRSPPGGPDKDFAWLS

SEQ ID NO: 2997 - protein, 531 aa, Homo sapiens
MDEESLESALQTYRAQLQQVELALGAGLDSSEQADLRQLQGDLKELIELTEASLVSVRKSSLLAALDEERPGRQEDAEYQAFREAITEAVEAPAAARGSGSETVPKAEAGPESAAGGQEEEEGEDEEELSGTKVSAPYYSSWGTLEYHNAMVVGTEEAEDGSAGVRVLYLYPTHKSLKPCPFFLEGKCRFKENCRFSHGQVVSLDELRPFQDPDLSSLQAGSACLAKHQDGLWHAARITDVDNGYYTVKFDSLLLREAVVEGDGILPPLRTEATESDSDSDGTGDSSYARVVGSDAVDSAQSSALCPSLAVVGSDAVDSGTCSSAFAGWEVHTRGIGSRLLTKMGYEFGKGLGRHAEGRVEPIHAVVLPRGKSLDQCVETLQKQTRVGKAGTNKPPRCRGRGARPGGRPAPRNVFDFLNEKLQGQAPGALEAGAAPAGRRSKDMYHASKSAKRALSLRLFQTEEKIERTQRDIRSIQEALARNAGRHSVASAQLQEKLAGAQRQLGQLRAQEAGLQQEQRKADTHKKMTEF

SEQ ID NO: 2998 - protein, 511 aa, Homo sapiens
MDEESLESALQTYRAQLQQVELALGAGLDSSEQADLRQLQGDLKELIELTEASLVSVRKSSLLAALDEERPGRQEDAEYQAFREAITEAVEAPAAARGSGSETVPKAEAGPESAAGGQEEEEGEDEEELSGTKVSAPYYSSWGTLEYHNAMVVGTEEAEDGSAGVRVLYLYPTHKSLKPCPFFLEGKCRFKENCRFSHGQVVSLDELRPFQDPDLSSLQAGSACLAKHQDGLWHAARITDVDNGYYTVKFDSLLLREAVVEGDGILPPLRTEATESDSDSDGTGDSSYARVVGSDAVDSGTCSSAFAGWEVHTRGIGSRLLTKMGYEFGKGLGRHAEGRVEPIHAVVLPRGKSLDQCVETLQKQTRVGKAGTNKPPRCRGRGARPGGRPAPRNVFDFLNEKLQGQAPGALEAGAAPAGRRSKDMYHASKSAKRALSLRLFQTEEKIERTQRDIRSIQEALARNAGRHSVASAQLQEKLAGAQRQLGQLRAQEAGLQQEQRKADTHKKMTEF

SEQ ID NO: 2999 - protein, 502 aa, Homo sapiens
MDEESLESALQTYRAQLQQVELALGAGLDSSEQADLRQLQGDLKELIELTEASLVSVRKSSLLAALDEERPGRQEDAEYQAFREAITEAVEAPAAARGSGSETVPKAEAGPESAAGGQEEEEGEDEEELSGTKVSAPYYSSWGTLEYHNAMVVGTEEAEDGSAGVRVLYLYPTHKSLKPCPFFLEGKCRFKENCRFSHGQVVSLDELRPFQDPDLSSLQAGSACLAKHQDGLWHAARITDVDNGYYTVKFDSLLLREAVVEGDGILPPLRTEATESDSDSDVVGSDAVDSGTCSSAFAGWEVHTRGIGSRLLTKMGYEFGKGLGRHAEGRVEPIHAVVLPRGKSLDQCVETLQKQTRVGKAGTNKPPRCRGRGARPGGRPAPRNVFDFLNEKLQGQAPGALEAGAAPAGRRSKDMYHASKSAKRALSLRLFQTEEKIERTQRDIRSIQEALARNAGRHSVASAQLQEKLAGAQRQLGQLRAQEAGLQQEQRKADTHKKMTEF

SEQ ID NO: 3000 - protein, 188 aa, Homo sapiens
MGYEFGKGLGRHAEGRVEPIHAVVLPRGKSLDQCVETLQKQTRVGKAGTNKPPRCRGRGARPGGRPAPRNVFDFLNEKLQGQAPGALEAGAAPAGRRSKDMYHASKSAKRALSLRLFQTEEKIERTQRDIRSIQEALARNAGRHSVASAQLQEKLAGAQRQLGQLRAQEAGLQQEQRKADTHKKMTEF

SEQ ID NO: 3001 - protein, 148 aa, Homo sapiens
MRCVTRTRNWWRRAARMPRAGSSAWWVAVCKQVCTRVGTYAVCWCSWNTGRFTGCPSWKDFWKPVGPALHVFNVKCEAQRGLKLTQPFTVACKIDPVLCKSGLGFPPQLFTGCVYLSTYTYPWQAQAECVRCPRDSNRCKRITPSACL

SEQ ID NO: 3002 - protein, 420 aa, Homo sapiens
MSRSSPSGKGHSRMAEPRFNNPYFWPPPPTMPSQLDNLVLINKIKEQLMAEKIRPPHLPPTSASSQQPLLVPPAPAESSQAVMSLPKLQQVPGLHPQAVPQPDVALHARPATSTVTGLGLSTRTPSVSTSESSAGAGTGTGTSTPSTPTTTSQSRLIASSPTLISGITSPPLLDSIKTIQGHGLLGPPKSERGRKKIKAENPGGPPVLVVPYPILASGETAKEGKTYRCKVCPLTFFTKSEMQIHSKSHTEAKPHKCPHCSKSFANASYLAQHLRIHLGVKPYHCSYCDKSFRQLSHLQQHTRIHTGDRPYKCPHPGCEKAFTQLSNLQSHQRQHNKDKPYKCPNCYRAYSDSASLQIHLSAHAIKHAKAYCCSMCGRAYTSETYLMKHMSKHTVVEHLVSHHSPQRTESPGIPVRISLI

SEQ ID NO: 3003 - protein, 202 aa, Homo sapiens
MLVETGFCRVGQAGLELLSSSDKAAGLDLPKCWDYRHEPPRLAPLLIFNPHPSTVLSCNCEYNSFFEFCDSLQQIVIPERVLGTPRHIFPLPLLFSHFLWSKLKEAPACLLQGSSEHTEIICDLISSSKQFIKKFLSNKPSALHGGDADENDFLQLITRLQKLLFKSLSMYVCVHIHQHTHACPQLSCLHQNQDEELFYCQN

SEQ ID NO: 3004 - protein, 315 aa, Homo sapiens
MSLCSPTHSAEMSLFLQGPEEMLPLSSEGSEMGSEKEQSPEPHLPEEGEGGKPWRVDDSEGSWIPPGEKEHGQESLSDELQETHPKKPWQKVTVRARELGDPIAHPRHEADEKPFICAQCGKTFNNTSNLRTHQRIHTGEKPYKCSECGKSFSRSSNRIRHERIHLEEKHYKCPKCQESFRRRSDLTTHQQDHLGKRPYRCDICGKSFSQSATLAVHHRTHLEPAPYICCECGKSFSNSSSFGVHHRTHTGERPYECTECGRTFSDISNFGAHQRTHRGEKPYRCTVCGKHFSRSSNLIRHQKTHLGEQAGKDSS

SEQ ID NO: 3005 - protein, 284 aa, Homo sapiens
MGSEKEQSPEPHLPEEGEGGKPWRVDDSEGSWIPPGEKEHGQESLSDELQETHPKKPWQKVTVRARELGDPIAHPRHEADEKPFICAQCGKTFNNTSNLRTHQRIHTGEKPYKCSECGKSFSRSSNRIRHERIHLEEKHYKCPKCQESFRRRSDLTTHQQDHLGKRPYRCDICGKSFSQSATLAVHHRTHLEPAPYICCECGKSFSNSSSFGVHHRTHTGERPYECTECGRTFSDISNFGAHQRTHRGEKPYRCTVCGKHFSRSSNLIRHQKTHLGEQAGKDSS

SEQ ID NO: 3006 - protein, 852 aa, Homo sapiens
MTKSLESVSFKDVTVDFSRDEWQQLDLAQKSLYREVMLENYFNLISVGCQVPKPEVIFSLEQEEPCMLDGEIPSQSRPDGDIGFGPLQQRMSEEVSFQSEININLFTRDDPYSILEELWKDDEHTRKCGENQNKPLSRVVFINKKTLANDSIFEYKDIGEIVHVNTHLVSSRKRPHNCNSCGKNLEPIITLYNRNNATENSDKTIGDGDIFTHLNSHTEVTACECNQCGKPLHHKQALIQQQKIHTRESLYLFSDYVNVFSPKSHAFAHESICAEEKQHECHECEAVFTQKSQLDGSQRVYAGICTEYEKDFSLKSNRQKTPYEGNYYKCSDYGRAFIQKSDLFRCQRIHSGEKPYEYSECEKNLPQNSNLNIHKKIHTGGKHFECTECGKAFTRKSTLSMHQKIHTGEKPYVCTECGKAFIRKSHFITHERIHTGEKPYECSDCGKSFIKKSQLHVHQRIHTGENPFICSECGKVFTHKTNLIIHQKIHTGERPYICTVCGKAFTDRSNLIKHQKIHTGEKPYKCSDCGKSFTWKSRLRIHQKCHTGERHYECSECGKAFIQKSTLSMHQRIHRGEKPYVCTECGKAFFHKSHFITHERIHTGEKPYECSICGKSFTKKSQLHVHQQIHTGEKPYRCAECGKAFTDRSNLFTHQKIHTGEKPYKCSDCGKAFTRKSGLHIHQQSHTGERHYECSECGKAFARKSTLIMHQRIHTGEKPYICNECGKSFIQKSHLNRHRRIHTGEKPYECSDCGKSFIKKSQLHEHHRIHTGEKPYICAECGKAFTIRSNLIKHQKIHTKQKPYKCSDLGKALNWKPQLSMPQKSDNGEVECSMPQLWCGDSEGDQGQLSSI

SEQ ID NO: 3007 - protein, 816 aa, Homo sapiens
MLENYFNLISVGCQVPKPEVIFSLEQEEPCMLDGEIPSQSRPDGDIGFGPLQQRMSEEVSFQSEININLFTRDDPYSILEELWKDDEHTRKCGENQNKPLSRVVFINKKTLANDSIFEYKDIGEIVHVNTHLVSSRKRPHNCNSCGKNLEPIITLYNRNNATENSDKTIGDGDIFTHLNSHTEVTACECNQCGKPLHHKQALIQQQKIHTRESLYLFSDYVNVFSPKSHAFAHESICAEEKQHECHECEAVFTQKSQLDGSQRVYAGICTEYEKDFSLKSNRQKTPYEGNYYKCSDYGRAFIQKSDLFRCQRIHSGEKPYEYSECEKNLPQNSNLNIHKKIHTGGKHFECTECGKAFTRKSTLSMHQKIHTGEKPYVCTECGKAFIRKSHFITHERIHTGEKPYECSDCGKSFIKKSQLHVHQRIHTGENPFICSECGKVFTHKTNLIIHQKIHTGERPYICTVCGKAFTDRSNLIKHQKIHTGEKPYKCSDCGKSFTWKSRLRIHQKCHTGERHYECSECGKAFIQKSTLSMHQRIHRGEKPYVCTECGKAFFHKSHFITHERIHTGEKPYECSICGKSFTKKSQLHVHQQIHTGEKPYRCAECGKAFTDRSNLFTHQKIHTGEKPYKCSDCGKAFTRKSGLHIHQQSHTGERHYECSECGKAFARKSTLIMHQRIHTGEKPYICNECGKSFIQKSHLNRHRRIHTGEKPYECSDCGKSFIKKSQLHEHHRIHTGEKPYICAECGKAFTIRSNLIKHQKIHTKQKPYKCSDLGKALNWKPQLSMPQKSDNGEVECSMPQLWCGDSEGDQGQLSSI

SEQ ID NO: 3008 - protein, 854 aa, Homo sapiens
MSVLSLPESVSFKDVTVDFSRDEWQQLDLAQKSLYREVMLENYFNLISVGCQVPKPEVIFSLEQEEPCMLDGEIPSQSRPDGDIGFGPLQQRMSEEVSFQSEININLFTRDDPYSILEELWKDDEHTRKCGENQNKPLSRVVFINKKTLANDSIFEYKDIGEIVHVNTHLVSSRKRPHNCNSCGKNLEPIITLYNRNNATENSDKTIGDGDIFTHLNSHTEVTACECNQCGKPLHHKQALIQQQKIHTRESLYLFSDYVNVFSPKSHAFAHESICAEEKQHECHECEAVFTQKSQLDGSQRVYAGICTEYEKDFSLKSNRQKTPYEGNYYKCSDYGRAFIQKSDLFRCQRIHSGEKPYEYSECEKNLPQNSNLNIHKKIHTGGKHFECTECGKAFTRKSTLSMHQKIHTGEKPYVCTECGKAFIRKSHFITHERIHTGEKPYECSDCGKSFIKKSQLHVHQRIHTGENPFICSECGKVFTHKTNLIIHQKIHTGERPYICTVCGKAFTDRSNLIKHQKIHTGEKPYKCSDCGKSFTWKSRLRIHQKCHTGERHYECSECGKAFIQKSTLSMHQRIHRGEKPYVCTECGKAFFHKSHFITHERIHTGEKPYECSICGKSFTKKSQLHVHQQIHTGEKPYRCAECGKAFTDRSNLFTHQKIHTGEKPYKCSDCGKAFTRKSGLHIHQQSHTGERHYECSECGKAFARKSTLIMHQRIHTGEKPYICNECGKSFIQKSHLNRHRRIHTGEKPYECSDCGKSFIKKSQLHEHHRIHTGEKPYICAECGKAFTIRSNLIKHQKIHTKQKPYKCSDLGKALNWKPQLSMPQKSDNGEVECSMPQLWCGDSEGDQGQLSSI

SEQ ID NO: 3009 - protein, 219 aa, Homo sapiens
MLRAGAPTGDLPRAGEVHTGTTIMAVEFDGGVVMGSDSRVSAGEAVVNRVFDKLSPLHERIYCALSGSAADAQAVADMAAYQLELHGIELEEPPLVLAAANVVRNISYKYREDLSAHLMVAGWDQREGGQVYGTLGGMLTRQPFAIGGSGSTFIYGYVDAAYKPGMSPEECRRFTTDAIALAMSRDGSSGGVIYLVTITAAGVDHRVILGNELPKFYDE

SEQ ID NO: 3010 - protein, 209 aa, Homo sapiens
MLRAGEVHTGTTIMAVEFDGGVVMGSDSRVSAGEAVVNRVFDKLSPLHERIYCALSGSAADAQAVADMAAYQLELHGIELEEPPLVLAAANVVRNISYKYREDLSAHLMVAGWDQREGGQVYGTLGGMLTRQPFAIGGSGSTFIYGYVDAAYKPGMSPEECRRFTTDAIALAMSRDGSSGGVIYLVTITAAGVDHRVILGNELPKFYDE

SEQ ID NO: 3011 - protein, 418 aa, Homo sapiens
MSGTEEAILGGRDSHPAAGGGSVLCFGQCQYTAEEYQAIQKALRQRLGPEYISSRMAGGGQKVCYIEGHRVINLANEMFGYNGWAHSITQQNVDFVDLNNGKFYVGVCAFVRVQLKDGSYHEDVGYGVSEGLKSKALSLEKARKEAVTDGLKRALRSFGNALGNCILDKDYLRSLNKLPRQLPLEVDLTKAKRQDLEPSVEEARYNSCRPNMALGHPQLQQVTSPSRPSHAVIPADQDCSSRSLSSSAVESEATHQRKLRQKQLQQQFRERMEKQQVRVSTPSAEKSEAAPPAPPVTHSTPVTVSEPLLEKDFLAGVTQELIKTLEDNSEKWAVTPDAGDGVVKPSSRADPAQTSDTLALNNQMVTQNRTPHSVCHQKPQAKSGSWDLQTYSADQRTTGNWESHRKSQDMKKRKYDPS

SEQ ID NO: 3012 - protein, 226 aa, Homo sapiens
MSGTEEAILGGRDSHPAAGGGSVLCFGQCQYTAEEYQAIQKALRQRLGPEYISSRMAGGGQKVCYIEGHRVINLANEMFGYNGWAHSITQQNVDFVDLNNGKFYVGVCAFVRVQLKDGSYHEDVGYGVSEGLKSKALSLEKARKEAVTDGLKRALRLPLLGVSGRILYSLFSVHSVMCAGGLPTPTASAQTAPSSPCSSAVLRYAQEFWECTWKLYSGQRLPEITK

SEQ ID NO: 3013 - protein, 139 aa, Homo sapiens
MSGTEEAILGGRDSHPAAGGGSVLCFGQCQYTAEEYQAIQKALRQRLGPEYISSRMAGGGQKVCYIEGHRVINLANEMFGYNGWAHSITQQNVDFVDLNNGKFYVGVCAFVRVQLKVRGWSRPAARKDQWVVGEGWFIS

SEQ ID NO: 3014 - protein, 118 aa, Homo sapiens
MSGTEEAILGGRDSHPAAGGGSVLCFGQCQYTAEEYQAIQKALRQRLGPEYISSRMAGGGQKVCYIEGHRVINLANEMFGYNGWAHSITQQNVGEYALQQWGLLHCPAPAESLLWVRR

SEQ ID NO: 3015 - protein, 364 aa, Homo sapiens
MVKLFIGNLPREATEQEIRSLFEQYGKVLECDIIKNYGFVHIEDKTAAEDAIRNLHHYKLHGVNINVEASKNKSKTSTKLHVGNISPTCTNKELRAKFEEYGPVIECDIVKDYAFVHMERAEDAVEAIRGLDNTEFQGKRMHVQLSTSRLRTAPGMGDQSGCYRCGKEGHWSKECPIDRSGRVADLTEQYNEQYGAVRTPYTMSYGDSLYYNNAYGALDAYYKRCRAARSYEAVAAAAASVYNYAEQTLSQLPQVQNTAMASHLTSTSLDPYDRHLLPTSGAAATAAAAAAAAAAVTAASTSYYGRDRSPLRRATAPVPTVGEGYGYGHESELSQASAAARNSLYDMARYEREQYADRARYSAF

SEQ ID NO: 3016 - protein, 177 aa, Homo sapiens
MVKLFIGNLPREATEQEIRSLFEQYGKVLECDIIKNYGFVHIEDKTAAEDAIRNLHHYKLHGVNINVEASKNKSKTSTKLHVGNISPTCTNKELRAKFEEYGPVIECDIVKDYAFVHMERAEDAVEAIRGLDNTEFQGEPPSLGRGLNTRLCAENGWISKRRGLVKITAVGWLVMKK

SEQ ID NO: 3017 - protein, 143 aa, Homo sapiens
MVKLFIGNLPREATEQEIRSLFEQYGKVLECDIIKNYGFVHIEDKTAAEDAIRNLHHYKLHGVNINVEASKNKSKTSTKLHVGNISPTCTNKELRAKFEEYGPVIECDIVKDYAFVHMERAEDAVEAIRGLDNTEFQGGMCVG

SEQ ID NO: 3018 - protein, 173 aa, Homo sapiens
MVKLFIGNLPREATEQEIRSLFEQYGKVLECDIIKNYGFVHIEDKTAAEDAIRNLHHYKLHGVNINVEASKNKSKTSTKLHVGNISPTCTNKELRAKFEEYGPVIECDIVKDYAFVHMERAEDAVEAIRGLDNTEFQGKITPVTEGYCCCNKGHTYIFKNCNLILESRKSRRC

SEQ ID NO: 3019 - protein, 322 aa, Homo sapiens
MNPLTKVKLINELNEREVQLGVADKVSWHSEYKDSAWIFLGGLPYELTEGDIICVFSQYGEIVNINLVRDKKTGKSKGFCFLCYEDQRSTILAVDNFNGIKIKGRTIRVDHVSNYRAPKDSEEIDDVTRQLQEKGCGARTPSPSLSESSEDEKPTKKHKKDKKEKKKKKKEKEKADREVQAEQPSSSSPRRKTVKEKDDTGPKKHSSKNSERAQKSEPREGQKLPKSRTAYSGGAEDLERELKKEKPKHEHKSSSRREAREEKTRIRDRGRSSDAHSSWYNGRSEGRSYRSRSRSRDKSHRHKRARRSRERESSNPSDRWRH

SEQ ID NO: 3020 - protein, 1792 aa, Homo sapiens
MSCVHYKFSSKLNYDTVTFDGLHISLCDLKKQIMGREKLKAADCDLQITNAQTKEEYTDDNALIPKNSSVIVRRIPIGGVKSTSKTYVISRTEPAMATTKAIDDSSASISLAQLTKTANLAEANASEEDKIKAMMSQSGHEYDPINYMKKPLGPPPPSYTCFRCGKPGHYIKNCPTNGDKNFESGPRIKKSTGIPRSFMMEVKDPNMKGAMLTNTGKYAIPTIDAEAYAIGKKEKPPFLPEEPSSSSEEDDPIPDELLCLICKDIMTDAVVIPCCGNSYCDECIRTALLESDEHTCPTCHQNDVSPDALIANKFLRQAVNNFKNETGYTKRLRKQLPPPPPPIPPPRPLIQRNLQPLMRSPISRQQDPLMIPVTSSSTHPAPSISSLTSNQSSLAPPVSGNPSSAPAPVPDITATVSISVHSEKSDGPFRDSDNKILPAAALASEHSKGTSSIAITALMEEKGYQVPVLGTPSLLGQSLLHGQLIPTTGPVRINTARPGGGRPGWEHSNKLGYLVSPPQQIRRGERSCYRSINRGRHHSERSQRTQGPSLPATPVFVPVPPPPLYPPPPHTLPLPPGVPPPQFSPQFPPGQPPPAGYSVPPPGFPPAPANLSTPWVSSGVQTAHSNTIPTTQAPPLSREEFYREQRRLKEEEKKKSKLDEFTNDFAKELMEYKKIQKERRRSFSRSKSPYSGSSYSRSSYTYSKSRSGSTRSRSYSRSFSRSHSRSYSRSPPYPRRGRGKSRNYRSRSRSHGYHRSRSRSPPYRRYHSRSRSPQAFRGQSPNKRNVPQGETEREYFNRYREVPPPYDMKAYYGRSVDFRDPFEKERYREWERKYREWYEKYYKGYAAGAQPRPSANRENFSPERFLPLNIRNSPFTRGRREDYVGGQSHRSRNIGSNYPEKLSARDGHNQKDNTKSKEKESENAPGDGKGNKHKKHRKRRKGEESEGFLNPELLETSRKSREPTGVEENKTDSLFVLPSRDDATPVRDEPMDAESITFKSVSEKDKRERDKPKAKGDKTKRKNDGSAVSKKENIVKPAKGPQEKVDGERERSPRSEPPIKKAKEETPKTDNTKSSSSSQKDEKITGTPRKAHSKSAKEHQETKPVKEEKVKKDYSKDVKSEKLTTKEEKAKKPNEKNKPLDNKGEKRKRKTEEKGVDKDFESSSMKISKLEVTEIVKPSPKRKMEPDTEKMDRTPEKDKISLSAPAKKIKLNRETGKKIGSTENISNTKEPSEKLESTSSKVKQEKVKGKVRRKVTGTEGSSSTLVDYTSTSSTGGSPVRKSEEKTDTKRTVIKTMEEYNNDNTAPAEDVIIMIQVPQSKWDKDDFESEEEDVKSTQPISSVGKPASVIKNVSTKPSNIVKYPEKESEPSEKIQKFTKDVSHEIIQHEVKSSKNSASSEKGKTKDRDYSVLEKENPEKRKNSTQPEKESNLDRLNEQGNFKSLSQSSKEARTSDKHDSTRASSNKDFTPNRDKKTDYDTREYSSSKRRDEKNELTRRKDSPSRNKDSASGQKNKPREERDLPKKGTGDSKKSNSSPSRDRKPHDHKATYDTKRPNEETKSVDKNPCKDREKHVLEARNNKESSGNKLLYILNPPETQVEKEQITGQIDKSTVKPKPQLSHSSRLSSDLTRETDEAAFEPDYNESDSESNVSVKEEESSGNISKDLKDKIVEKAKESLDTAAVVQVGISRNQSHSSPSVSPSRSHSPSGSQTRSHSSSASSAESQDSKKKKKKKEKKKHKKHKKHKKHKKHAGTEVELEKSQKHKHKKKKSKKNKDKEKEKEKDDQKVKSVTV

SEQ ID NO: 3021 - protein, 1758 aa, Homo sapiens
MSCVHYKFSSKLNYDTVTFDGLHISLCDLKKQIMGREKLKAADCDLQITNAQTKEEYTDDNALIPKNSSVIVRRIPIGGVKSTSKTYVISRTEPAMATTKAIDDSSASISLAQLTKTANLAEANASEEDKIKAMMSQSGHEYDPINYMKKPLGPPPPSYTCFRCGKPGHYIKNCPTNGDKNFESGPRIKKSTGIPRSFMMEVKDPNMKGAMLTNTGKYAIPTIDAEAYAIGKKEKPPFLPEEPSSSSEEDDPIPDELLCLICKDIMTDAVVIPCCGNSYCDECIRTALLESDEHTCPTCHQNDVSPDALIANKFLRQAVNNFKNETGYTKRLRKQLPPPPPPIPPPRPLIQRNLQPLMRSPISRQQDPLMIPVTSSSTHPAPSISSLTSNQSSLAPPVSGNPSSAPAPVPDITATVSISVHSEKSDGPFRDSDNKILPAAALASEHSKGTSSIAITALMEEKGYQVPVLGTPSLLGQSLLHGQLIPTTGPVRINTARPGGGRPGWEHSNKLGYLVSPPQQIRRGERSCYRSINRGRHHSERSQRTQGPSLPATPVFVPVPPPPLYPPPPHTLPLPPGVPPPQFSPQFPPGQPPPAGYSVPPPGFPPAPANLSTPWVSSGVQTAHSNTIPTTQAPPLSREEFYREQRRLKEESKSPYSGSSYSRSSYTYSKSRSGSTRSRSYSRSFSRSHSRSYSRSPPYPRRGRGKSRNYRSRSRSHGYHRSRSRSPPYRRYHSRSRSPQAFRGQSPNKRNVPQGETEREYFNRYREVPPPYDMKAYYGRSVDFRDPFEKERYREWERKYREWYEKYYKGYAAGAQPRPSANRENFSPERFLPLNIRNSPFTRGRREDYVGGQSHRSRNIGSNYPEKLSARDGHNQKDNTKSKEKESENAPGDGKGNKHKKHRKRRKGEESEGFLNPELLETSRKSREPTGVEENKTDSLFVLPSRDDATPVRDEPMDAESITFKSVSEKDKRERDKPKAKGDKTKRKNDGSAVSKKENIVKPAKGPQEKVDGERERSPRSEPPIKKAKEETPKTDNTKSSSSSQKDEKITGTPRKAHSKSAKEHQETKPVKEEKVKKDYSKDVKSEKLTTKEEKAKKPNEKNKPLDNKGEKRKRKTEEKGVDKDFESSSMKISKLEVTEIVKPSPKRKMEPDTEKMDRTPEKDKISLSAPAKKIKLNRETGKKIGSTENISNTKEPSEKLESTSSKVKQEKVKGKVRRKVTGTEGSSSTLVDYTSTSSTGGSPVRKSEEKTDTKRTVIKTMEEYNNDNTAPAEDVIIMIQVPQSKWDKDDFESEEEDVKSTQPISSVGKPASVIKNVSTKPSNIVKYPEKESEPSEKIQKFTKDVSHEIIQHEVKSSKNSASSEKGKTKDRDYSVLEKENPEKRKNSTQPEKESNLDRLNEQGNFKSLSQSSKEARTSDKHDSTRASSNKDFTPNRDKKTDYDTREYSSSKRRDEKNELTRRKDSPSRNKDSASGQKNKPREERDLPKKGTGDSKKSNSSPSRDRKPHDHKATYDTKRPNEETKSVDKNPCKDREKHVLEARNNKESSGNKLLYILNPPETQVEKEQITGQIDKSTVKPKPQLSHSSRLSSDLTRETDEAAFEPDYNESDSESNVSVKEEESSGNISKDLKDKIVEKAKESLDTAAVVQVGISRNQSHSSPSVSPSRSHSPSGSQTRSHSSSASSAESQDSKKKKKKKEKKKHKKHKKHKKHKKHAGTEVELEKSQKHKHKKKKSKKNKDKEKEKEKDDQKVKSVTV

SEQ ID NO: 3022 - protein, 118 aa, Homo sapiens
MSCVHYKFSSKLNYDTVTFDGLHISLCDLKKQIMGREKLKAADCDLQITNAQTKEEYTDDNALIPKNSSVIVRRIPIGGVKSTSKTYVISRTEPAMATTKAVCKNTISHFFYTLLLPL

SEQ ID NO: 3023 - protein, 952 aa, Homo sapiens
MSCVHYKFSSKLNYDTVTFDGLHISLCDLKKQIMGREKLKAADCDLQITNAQTKEEYTDDNALIPKNSSVIVRRIPIGGVKSTSKTYVISRTEPAMATTKAIDDSSASISLAQLTKTANLAEANASEEDKIKAMMSQSGHEYDPINYMKKPLGPPPPSYTCFRCGKPGHYIKNCPTNGDKNFESGPRIKKSTGIPRSFMMEVKDPNMKGAMLTNTGKYAIPTIDAEAYAIGKKEKPPFLPEEPSSSSEEDDPIPDELLCLICKDIMTDAVVIPCCGNSYCDECIRTALLESDEHTCPTCHQNDVSPDALIANKFLRQAVNNFKNETGYTKRLRKQLPPPPPPIPPPRPLIQRNLQPLMRSPISRQQDPLMIPVTSSSTHPAPSISSLTSNQSSLAPPVSGNPSSAPAPVPDITATVSISVHSEKSDGPFRTSSTGGSPVRKSEEKTDTKRTVIKTMEEYNNDNTAPAEDVIIMIQVPQSKWDKDDFESEEEDVKSTQPISSVGKPASVIKNVSTKPSNIVKYPEKESEPSEKIQKFTKDVSHEIIQHEVKSSKNSASSEKGKTKDRDYSVLEKENPEKRKNSTQPEKESNLDRLNEQGNFKSLSQSSKEARTSDKHDSTRASSNKDFTPNRDKKTDYDTREYSSSKRRDEKNELTRRKDSPSRNKDSASGQKNKPREERDLPKKGTGDSKKSNSSPSRDRKPHDHKATYDTKRPNEETKSVDKNPCKDREKHVLEARNNKESSGNKLLYILNPPETQVEKEQITGQIDKSTVKPKPQLSHSSRLSSDLTRETDEAAFEPDYNESDSESNVSVKEEESSGNISKDLKDKIVEKAKESLDTAAVVQVGISRNQSHSSPSVSPSRSHSPSGSQTRSHSSSASSAESQDSKKKKKKKEKKKHKKHKKHKKHKKHAGTEVELEKSQKHKHKKKKSKKNKDKEKEKEKDDQKVKSVTV

SEQ ID NO: 3024 - protein, 441 aa, Homo sapiens
MLRKGCCVELLLLLVAAELPLGGGCPRDCVCYPAPMTVSCQAHNFAAIPEGIPVDSERVFLQNNRIGLLQPGHFSPAMVTLWIYSNNITYIHPSTFEGFVHLEELDLGDNRQLRTLAPETFQGLVKLHALYLYKCGLSALPAGVFGGLHSLQYLYLQDNHIEYLQDDIFVDLVNLSHLFLHGNKLWSLGPGTFRGLVNLDRLLLHENQLQWVHHKAFHDLRRLTTLFLFNNSLSELQGECLAPLGALEFLRLNGNPWDCGCRARSLWEWLQRFRGSSSAVPCVSPGLRHGQDLKLLRAEDFRNCTGPASPHQIKSHTLTTTDRAARKEHHSPHGPTRSKGHPHGPRPGHRKPGKNCTNPRNRNQISKAGAGKQAPELPDYAPDYQHKFSFDIMPTARPKRKGKCARRTPIRAPSGVQQASSASSLGASLLAWTLGLAVTLR

SEQ ID NO: 3025 - protein, 137 aa, Homo sapiens
MSGGRRKEEPPQPQLANGALKVSVWSKVLRSDAAWEDKDEFLDVIYWFRQIIAVVLGVIWGVLPLRGFLGIAGFCLINAGVLYLYFSNYLQIDEEEYGGTWELTKEGFMTSFALFMVCVADSFTTGHLDHLLHCHPL

SEQ ID NO: 3026 - protein, 129 aa, Homo sapiens
MSGGRRKEEPPQPQLANGALKVSVWSKVLRSDAAWEDKDEFLDVIYWFRQIIAVVLGVIWGVLPLRGFLGIAGFCLINAGVLYLYFSNYLQIDEEEYGGTWELTKEGFMTSFALFMVIWIIFYTAIHYD

SEQ ID NO: 3027 - protein, 128 aa, Homo sapiens
MSGGRRKEEPPQPQLANGALKVSVWSKVLRSDAAWEDKDEFLDVIYWFRQIIAVVLGVIWGVLPLRGFLGIAGFCLINAGVLYLYFSNYLQIDEEEYGGTWELTKEGFMTSFALFMVILDHLLHCHPL

SEQ ID NO: 3028 - protein, 87 aa, Homo sapiens
MSGGRRKEEPPQPQLANGALKVSVWSKVLRSDAAWEDKDEFLDVIYWFRQIIAVVLGVIWGVLPLRGFLGIAGKGHCCSGAVCVCDD

SEQ ID NO: 3029 - protein, 143 aa, Homo sapiens
MSGGRRKEEPPQPQLANGALKVSVWSKVLRSDAAWEDKDEFLDVIYWFRQIIAVVLGVIWGVLPLRGFLGIAGSFGSSFTLPSIMTDGVQLPSAPYPVQRTLLITAQELDRWGTPAPWNLEDPCFLDRESVCWASVFSARVVT

SEQ ID NO: 3030 - protein, 213 aa, Homo sapiens
MAITQFRLFKFCTCLATVFSFLKRLICRSGRGRKLSGDQITLPTTVDYSSVPKQTDVEEWTSWDEDAPTSVKIEGGNGNVATQQNSLEQLEPDYFKDMTPTIRKTQKIVIKKREPLNFGIPDGSTGFSSRLAATQDLPFIHQSSELGDLDTWQENTNAWEEEEDAAWQAEEVLRQQKLADREKRAAEQQRKKMEKEAQRLMKKEQNKIGVKLS

SEQ ID NO: 3031 - protein, 258 aa, Homo sapiens
MAITQFRLFKFCTCLATVFSFLKRLICRSGRGRKLSGDQITLPTTVDYSSVPKQTDVEEWTSWDEDAPTSVKIEGGNGNVATQQNSLEQLEPDYFKDMTPTIRKTQKIVIKKREPLNFGIPDGSTGFSSRLAATQDLPFIHQSSELGDLDTWQENTNAWEEEEDAAWQAEEVLRSRTNVCLLCSLLFHHPTPTSTPYINQSVKIERVSLGQWSYGKSKEQQKLADREKRAAEQQRKKMEKEAQRLMKKEQNKIGVKLS

SEQ ID NO: 3032 - protein, 741 aa, Homo sapiens
MDIEDEENMSSSSTDVKENRNLDNVSPKDGSTPGPGEGSQLSNGGGGGPGRKRPLEEGSNGHSKYRLKKRRKTPGPVLPKNALMQLNEIKPGLQYTLLSQTGPVHAPLFVMSVEVNGQVFEGSGPTKKKAKLHAAEKALRSFVQFPNASEAHLAMGRTLSVNTDFTSDQADFPDTLFNGFETPDKAEPPFYVGSNGDDSFSSSGDLSLSASPVPASLAQPPLPVLPPFPPPSGKNPVMILNELRPGLKYDFLSESGESHAKSFVMSVVVDGQFFEGSGRNKKLAKARAAQSALAAIFNLHLDQTPSRQPIPSEGLQLHLPQVLADAVSRLVLGKFGDLTDNFSSPHARRKVLAGVVMTTGTDVKDAKVISVSTGTKCINGEYMSDRGLALNDCHAEIISRRSLLRFLYTQLELYLNNKDDQKRSIFQKSERGGFRLKENVQFHLYISTSPCGDARIFSPHEPILEGSRSYTQAGVQWCNHGSLQPRPPGLLSDPSTSTFQGAGTTEPADRHPNRKARGQLRTKIESGEGTIPVRSNASIQTWDGVLQGERLLTMSCSDKIARWNVVGIQGSLLSIFVEPIYFSSIILGSLYHGDHLSRAMYQRISNIEDLPPLYTLNKPLLSGISNAEARQPGKAPNFSVNWTVGDSAIEVINATTGKDELGRASRLCKHALYCRWMRVHGKVPSHLLRSKITKPNVYHESKLAAKEYQAAKARLFTAFIKAGLGAWVEKPTEQDQFSLTP

SEQ ID NO: 3033 - protein, 701 aa, Homo sapiens
MDIEDEENMSSSSTDVKENRNLDNVSPKDGSTPGPGEGSQLSNGGGGGPGRKRPLEEGSNGHSKYRLKKRRKTPGPVLPKNALMQLNEIKPGLQYTLLSQTGPVHAPLFVMSVEVNGQVFEGSGPTKKKAKLHAAEKALRSFVQFPNASEAHLAMGRTLSVNTDFTSDQADFPDTLFNGFETPDKAEPPFYVGSNGDDSFSSSGDLSLSASPVPASLAQPPLPVLPPFPPPSGKNPVMILNELRPGLKYDFLSESGESHAKSFVMSVVVDGQFFEGSGRNKKLAKARAAQSALAAIFNLHLDQTPSRQPIPSEGLQLHLPQVLADAVSRLVLGKFGDLTDNFSSPHARRKVLAGVVMTTGTDVKDAKVISVSTGTKCINGEYMSDRGLALNDCHAEIISRRSLLRFLYTQLELYLNNKDDQKRSIFQKSERGGFRLKENVQFHLYISTSPCGDARIFSPHEPILEEPADRHPNRKARGQLRTKIESGEGTIPVRSNASIQTWDGVLQGERLLTMSCSDKIARWNVVGIQGSLLSIFVEPIYFSSIILGSLYHGDHLSRAMYQRISNIEDLPPLYTLNKPLLSGISNAEARQPGKAPNFSVNWTVGDSAIEVINATTGKDELGRASRLCKHALYCRWMRVHGKVPSHLLRSKITKPNVYHESKLAAKEYQAAKARLFTAFIKAGLGAWVEKPTEQDQFSLTP

SEQ ID NO: 3034 - protein, 714 aa, Homo sapiens
MDIEDEENMSSSSTDVKENRNLDNVSPKDGSTPGPGEGSQLSNGGGGGPGRKRPLEEGSNGHSKYRLKKRRKTPGPVLPKNALMQLNEIKPGLQYTLLSQTGPVHAPLFVMSVEVNGQVFEGSGPTKKKAKLHAAEKALRSFVQFPNASEAHLAMGRTLSVNTDFTSDQADFPDTLFNGFETPDKAEPPFYVGSNGDDSFSSSGDLSLSASPVPASLAQPPLPVLPPFPPPSGKNPVMILNELRPGLKYDFLSESGESHAKSFVMSVVVDGQFFEGSGRNKKLAKARAAQSALAAIFNLHLDQTPSRQPIPSEGLQLHLPQVLADAVSRLVLGKFGDLTDNFSSPHARRKVLAGVVMTTGTDVKDAKVISVSTGTKCINGEYMSDRGLALNDCHAEIISRRSLLRFLYTQLELYLNNKDDQKRSIFQKSERGGFRLKENVQFHLYISTSPCGDARIFSPHEPILEGSRSYTQAGVQWCNHGSLQPRPPGLLSDPSTSTFQGAGTTEPADRHPNRKARGQLRTKIESGEGTIPVRSNASIQTWDGVLQGERLLTMSCSDKIARWNVVGIQGSLLSIFVEPIYFSSIILGSLYHGDHLSRAMYQRISNIEDLPPLYTLNKPLLSGISNAEARQPGKAPNFSVNWTVGDSAIEVINATTGKDELGRASRLCKHALYCRWMRVHGKVPSHLLRSKITKPNVYHESKLAAKEYQAAKVH

SEQ ID NO: 3035 - protein, 729 aa, Homo sapiens
MKIPRMKTPCQPDRNSLRQSRNPQKYFAMDIEDEENMSSSSTDVKENRNLDNVSPKDGSTPGPGEGSQLSNGGGGGPGRKRPLEEGSNGHSKYRLKKRRKTPGPVLPKNALMQLNEIKPGLQYTLLSQTGPVHAPLFVMSVEVNGQVFEGSGPTKKKAKLHAAEKALRSFVQFPNASEAHLAMGRTLSVNTDFTSDQADFPDTLFNGFETPDKAEPPFYVGSNGDDSFSSSGDLSLSASPVPASLAQPPLPVLPPFPPPSGKNPVMILNELRPGLKYDFLSESGESHAKSFVMSVVVDGQFFEGSGRNKKLAKARAAQSALAAIFNLHLDQTPSRQPIPSEGLQLHLPQVLADAVSRLVLGKFGDLTDNFSSPHARRKVLAGVVMTTGTDVKDAKVISVSTGTKCINGEYMSDRGLALNDCHAEIISRRSLLRFLYTQLELYLNNKDDQKRSIFQKSERGGFRLKENVQFHLYISTSPCGDARIFSPHEPILEEPADRHPNRKARGQLRTKIESGEGTIPVRSNASIQTWDGVLQGERLLTMSCSDKIARWNVVGIQGSLLSIFVEPIYFSSIILGSLYHGDHLSRAMYQRISNIEDLPPLYTLNKPLLSGISNAEARQPGKAPNFSVNWTVGDSAIEVINATTGKDELGRASRLCKHALYCRWMRVHGKVPSHLLRSKITKPNVYHESKLAAKEYQAAKARLFTAFIKAGLGAWVEKPTEQDQFSLTP

SEQ ID NO: 3036 - protein, 790 aa, Homo sapiens
MASSTTPPLHMGTFFSVMGRRYKRRRKKRSERKDRNSLRQSRNPQKYFAMDIEDEENMSSSSTDVKENRNLDNVSPKDGSTPGPGEGSQLSNGGGGGPGRKRPLEEGSNGHSKYRLKKRRKTPGPVLPKNALMQLNEIKPGLQYTLLSQTGPVHAPLFVMSVEVNGQVFEGSGPTKKKAKLHAAEKALRSFVQFPNASEAHLAMGRTLSVNTDFTSDQADFPDTLFNGFETPDKAEPPFYVGSNGDDSFSSSGDLSLSASPVPASLAQPPLPVLPPFPPPSGKNPVMILNELRPGLKYDFLSESGESHAKSFVMSVVVDGQFFEGSGRNKKLAKARAAQSALAAIFNLHLDQTPSRQPIPSEGLQLHLPQVLADAVSRLVLGKFGDLTDNFSSPHARRKVLAGVVMTTGTDVKDAKVISVSTGTKCINGEYMSDRGLALNDCHAEIISRRSLLRFLYTQLELYLNNKDDQKRSIFQKSERGGFRLKENVQFHLYISTSPCGDARIFSPHEPILEGSRSYTQAGVQWCNHGSLQPRPPGLLSDPSTSTFQGAGTTEPADRHPNRKARGQLRTKIESGEGTIPVRSNASIQTWDGVLQGERLLTMSCSDKIARWNVVGIQGSLLSIFVEPIYFSSIILGSLYHGDHLSRAMYQRISNIEDLPPLYTLNKPLLSGISNAEARQPGKAPNFSVNWTVGDSAIEVINATTGKDELGRASRLCKHALYCRWMRVHGKVPSHLLRSKITKPNVYHESKLAAKEYQAAKARLFTAFIKAGLGAWVEKPTEQDQFSLTP

SEQ ID NO: 3037 - protein, 674 aa, Homo sapiens
MDIEDEENMSSSSTDVKENRNLDNVSPKDGSTPGPGEGSQLSNGGGGGPGRKRPLEEGSNGHSKYRLKKRRKTPGPVLPKNALMQLNEIKPGLQYTLLSQTGPVHAPLFVMSVEVNGQVFEGSGPTKKKAKLHAAEKALRSFVQFPNASEAHLAMGRTLSVNTDFTSDQADFPDTLFNGFETPDKAEPPFYVGSNGDDSFSSSGDLSLSASPVPASLAQPPLPVLPPFPPPSGKNPVMILNELRPGLKYDFLSESGESHAKSFVMSVVVDGQFFEGSGRNKKLAKARAAQSALAAIFNLHLDQTPSRQPIPSEGLQLHLPQVLADAVSRLVLGKFGDLTDNFSSPHARRKVLAGVVMTTGTDVKDAKVISVSTGTKCINGEYMSDRGLALNDCHAEIISRRSLLRFLYTQLELYLNNKDDQKRSIFQKSERGGFRLKENVQFHLYISTSPCGDARIFSPHEPILEEPADRHPNRKARGQLRTKIESGEGTIPVRSNASIQTWDGVLQGERLLTMSCSDKIARWNVVGIQGSLLSIFVEPIYFSSIILGSLYHGDHLSRAMYQRISNIEDLPPLYTLNKPLLSGISNAEARQPGKAPNFSVNWTVGDSAIEVINATTGKDELGRASRLCKHALYCRWMRVHGKVPSHLLRSKITKPNVYHESKLAAKEYQAAKVH

SEQ ID NO: 3038 - protein, 211 aa, Homo sapiens
MDGLRQRVEHFLEQRNLVTEVLGALEAKTGVEKRYLAAGAVTLLSLYLLFGYGASLLCNLIGFVYPAYASIKAIESPSKDDDTVWLTYWVVYALFGLAEFFSDLLLSWFPFYYVGKCAFLLFCMAPRPWNGALMLYQRVVRPLFLRHHGAVDRIMNDLSGRALDAAAGITRNVLQVLARSRAGITPVAVAGPSTPLEADLKPSQTPQPKDK

SEQ ID NO: 3039 - protein, 184 aa, Homo sapiens
MDGLRQRVEHFLEQRNLVTEVLGALEAKTGVEKRYLAAGAVTLLSLYLLFGYGASLLCNLIGFVYPAYASIKAIESPSKDDDTVWLTYWVVYALFGLAEFFSDLLLSWFPFYYVGKCAFLLFCMAPRPWNGALMLYQRVVRPLFLRHHGAVDRIMNDLSGRALDAAAGITRNVKPSQTPQPKDK

SEQ ID NO: 3040 - protein, 441 aa, Homo sapiens
MAGSPSRAAGRRLQLPLLCLFLQGATAVLFAVFVRYNHKTDAALWHRSNHSNADNEFYFRYPSFQDVHAMVFVGFGFLMVFLQRYGFSSVGFTFLLAAFALQWSTLVQGFLHSFHGGHIHVGVESMINADFCAGAVLISFGAVLGKTGPTQLLLMALLEVVLFGINEFVLLHLLGVRDAGGSMTIHTFGAYFGLVLSRVLYRPQLEKSKHRQGSVYHSDLFAMIGTIFLWIFWPSFNAALTALGAGQHRTALNTYYSLAASTLGTFALSALVGEDGRLDMVHIQNAALAGGVVVGTSSEMMLTPFGALAAGFLAGTVSTLGYKFFTPILESKFKVQDTCGVHNLHGMPGVLGALLGVLVAGLATHEAYGDGLESVFPLIAEGQRSATSQAMHQLFGLFVTLMFASVGGGLGGLLLKLPFLDSPPRLPALRGPSSLAGAWRA

SEQ ID NO: 3041 - protein, 411 aa, Homo sapiens
MNFTFATQKSLTLLPRLECNGAISAHCNLHLPGFQDVHAMVFVGFGFLMVFLQRYGFSSVGFTFLLAAFALQWSTLVQGFLHSFHGGHIHVGVESMINADFCAGAVLISFGAVLGKTGPTQLLLMALLEVVLFGINEFVLLHLLGVRDAGGSMTIHTFGAYFGLVLSRVLYRPQLEKSKHRQGSVYHSDLFAMIGTIFLWIFWPSFNAALTALGAGQHRTALNTYYSLAASTLGTFALSALVGEDGRLDMVHIQNAALAGGVVVGTSSEMMLTPFGALAAGFLAGTVSTLGYKFFTPILESKFKVQDTCGVHNLHGMPGVLGALLGVLVAGLATHEAYGDGLESVFPLIAEGQRSATSQAMHQLFGLFVTLMFASVGGGLGGLLLKLPFLDSPPRLPALRGPSSLAGAWRA

SEQ ID NO: 3042 - protein, 409 aa, Homo sapiens
MVFVGFGFLMVFLQRYGFSSVGFTFLLAAFALQWSTLVQGFLHSFHGGHIHVGVESMINADFCAGAVLISFGAVLGKTGPTQLLLMALLEVVLFGINEFVLLHLLGVRVWGGMESGVGGGQGQPLSQERGGGGGVLPLTPPPQVRDAGGSMTIHTFGAYFGLVLSRVLYRPQLEKSKHRQGSVYHSDLFAMIGTIFLWIFWPSFNAALTALGAGQHRTALNTYYSLAASTLGTFALSALVGEDGRLDMVHIQNAALAGGVVVGTSSEMMLTPFGALAAGFLAGTVSTLGYKFFTPILESKFKVQDTCGVHNLHGMPGVLGALLGVLVAGLATHEAYGDGLESVFPLIAEGQRSATSQAMHQLFGLFVTLMFASVGGGLGGLLLKLPFLDSPPRLPALRGPSSLAGAWRA

SEQ ID NO: 3043 - protein, 372 aa, Homo sapiens
MVFVGFGFLMVFLQRYGFSSVGFTFLLAAFALQWSTLVQGFLHSFHGGHIHVGVESMINADFCAGAVLISFGAVLGKTGPTQLLLMALLEVVLFGINEFVLLHLLGVRDAGGSMTIHTFGAYFGLVLSRVLYRPQLEKSKHRQGSVYHSDLFAMIGTIFLWIFWPSFNAALTALGAGQHRTALNTYYSLAASTLGTFALSALVGEDGRLDMVHIQNAALAGGVVVGTSSEMMLTPFGALAAGFLAGTVSTLGYKFFTPILESKFKVQDTCGVHNLHGMPGVLGALLGVLVAGLATHEAYGDGLESVFPLIAEGQRSATSQAMHQLFGLFVTLMFASVGGGLGGLLLKLPFLDSPPRLPALRGPSSLAGAWRA

SEQ ID NO: 3044 - protein, 302 aa, Homo sapiens
MVFVGFGFLMVFLQRYGFSSVGFTFLLAAFALQWSTLVQGFLHSFHGGHIHVGVESMINADFCAGAVLISFGAVLGKTGPTQLLLMALLEVVLFGINEFVLLHLLGVRDAGGSMTIHTFGAYFGLVLSRVLYRPQLEKSKHRQGSVYHSDLFAMIGTIFLWIFWPSFNAALTALGAGQHRTALNTYYSLAASTLGTFALSALVGEDGRLDMVHIQNAALAGGVVVGTSSEMMLTPFGALAAGFLAGTVSTLGYKFFTPILESKFKVQDTCGVHNLHGMPGVLGALLGVLVAGLATHEAYGDG

SEQ ID NO: 3045 - protein, 137 aa, Homo sapiens
MGWLRPGPRPLCPPARASWAFSHRFPSPLAPRRSPTPFFMASLLCCGPKLAACGIVLSAWGVIMLIMLGIFFNVHSAVLIEDVPFTEKDFENGPQNIYNLYEQVSYNCFIAAGLYLLLGGFSFCQVRLNKRKEYMVR

SEQ ID NO: 3046 - protein, 134 aa, Homo sapiens
MVEAGATPPLPPCEGILGFLPPLSEPACTSAIPDSLLYGVAPVLWAEAGRLRHRPQRLGSDHIMLGIFFNVHSAVLIEDVPFTEKDFENGPQNIYNLYEQVSYNCFIAAGLYLLLGGFSFCQVRLNKRKEYMVR

SEQ ID NO: 3047 - protein, 342 aa, Homo sapiens
MAQVLIVGAGMTGSLCAALLRRQTSGPLYLAVWDKAEDSGGRMTTACSPHNPQCTADLGAQYITCTPHYAKKHQRFYDELLAYGVLRPLSSPIEGMVMKEGDCNFVAPQGISSIIKHYLKESGAEVYFRHRVTQINLRDDKWEVSKQTGSPEQFDLIVLTMPVPEILQLQGDITTLISECQRQQLEAVSYSSRYALGLFYEAGTKIDVPWAGQYITSNPCIRFVSIDNKKRNIESSEIGPSLVIHTTVPFGVTYLEHSIEDVQELVFQQLENILPGLPQPIATKCQKWRHSQVTNAAANCPGQMTLHHKPFLACGGDGFTQSNFDGCITSALCVLEALKNYI

SEQ ID NO: 3048 - protein, 315 aa, Homo sapiens
MAQVLIVGAGMTGSLCAALLRRQTSGPLYLAVWDKAEDSGGRMTTACSPHNPQCTADLGAQYITCTPHYAKKHQRFYDELLAYGVLRPLSSPIEGMVMKEGDCNFVAPQGISSIIKHYLKESGAEVYFRHRVTQINLRDDKWEVSKQTGSPEQFDLIVLTMPVPEILQLQGDITTLISECQRQQLEAVSYSSRYALGLFYEAGTKIDVPWAGQYITSNPCIRFVSIDNKKRNIESSEIGPSLVIHTTVPFGVTYLEHSIEDVQELVFQQLENILPGLPQPIATKCQKWRHSQVPSAGVILGCAKSPWMMAIGFPI

SEQ ID NO: 3049 - protein, 184 aa, Homo sapiens
MREYKLVVLGSRGVGKSALTVQFVQGIFVEKYDPTIEDSYREQVEVDAQQCMLEILDTAGTEQFTAMRDLYMKNGQGFALVYSITAQSTFNDLQDLREQILRVKDTDDVPMILVGNKCDLEDERVVGKEQGQNLARQWNNCAFLESSAKSKINVNEIFYDLVRQINRKTPVPGKARKKSSCQLL

SEQ ID NO: 3050 - protein, 363 aa, Homo sapiens
MSMDVTFLGTGAAYPSPTRGASAVVLRCEGECWLFDCGEGTQTQLMKSQLKAGRITKIFITHLHGDHFFGLPGLLCTISLQSGSMVSKQPIEIYGPVGLRDFIWRTMELSHTELVFHYVVHELVPTADQCPAEELKEFAHVNRADSPPKEEQGRTILLDSEENSYLLFDDEQFVVKAFRLFHRIPSFGFSVVEKKRPGKLNAQKLKDLGVPPGPAYGKLKNGISVVLENGVTISPQDVLKKPIVGRKICILGDCSGVVGDGGVKLCFEADLLIHEATLDDAQMDKAKEHGHSTPQMAATFAKLCRAKRLVLTHFSQRYKPVALAREGETDGIAELKKQAESVLDLQEVTLAEDFMVISIPIKK

SEQ ID NO: 3051 - protein, 2400 aa, Homo sapiens
MNSTPRNAQAPSHRECFLPSVARTPSVTKVTPAKKITFLKRGDPRFAGVRLAVHQRAFKTFSALMDELSQRVPLSFGVRSVTTPRGLHSLSALEQLEDGGCYLCSDKKPPKTPSGPGRPQERNPTAQQLRDVEGQREAPGTSSSRKSLKTPRRILLIKNMDPRLQQTVVLSHRNTRNLAAFLGKASDLLRFPVKQLYTTSGKKVDSLQALLHSPSVLVCAGHEAFRTPAMKNARRSEAETLSGLTSRNKNGSWGPKTKPSVIHSRSPPGSTPRLPERPGPSNPPVGPAPGRHPQDTPAQSGPLVAGDDMKKKVRMNEDGSLSVEMKVRFHLVGEDTLLWSRRMGRASALTAASGEDPVLGEVDPLCCVWEGYPWGFSEPGVWGPRPCRVGCREVFGRGGQPGPKYEIWTNPLHASQGERVAARKRWGLAQHVRCSGLWGHGTAGRERCSQDSASPASSTGLPEGSEPESSCCPRTPEDGVDSASPSAQIGAERKAGGSLGEDPGLCIDGAGLGGPEQGGRLTPRARSEEGASSDSSASTGSHEGSSEWGGRPQGCPGKARAETSQQEASEGGDPASPALSLSSLRSDDLQAETQGQGTEQATGAAVTREPLVLGLSCSWDSEGASSTPSTCTSSQQGQRRHRSRASAMSSPSSPGLGRVAPRGHPRHSHYRKDTHSPLDSSVTKQVPRPPERRRACQDGSVPRYSGSSSSTRTQASGNLRPPSSGSLPSQDLLGTSSATVTPAVHSDFVSGVSPHNAPSAGWAGDAGSRTCSPAPIPPHTSDSCSKSGAASLGEEARDTPQPSSPLVLQVGRPEQGAVGPHRSHCCSQPGTQPAQEAQRGPSPEASWLCGRYCPTPPRGRPCPQRRSSSCGSTGSSHQSTARGPGGSPQEGTRQPGPTPSPGPNSGASRRSSASQGAGSRGLSEEKTLRSGGGPQGQEEASGVSPSSLPRSSPEAVVREWLDNIPEEPILMTYELADETTGAAGGGLRGPEVDPGDDHSLEGLGEPAQAGQQSLEGDPGQDPEPEGALLGSSDTGPQSGEGVPQGAAPEGVSEAPAEAGADREAPAGCRVSLRALPGRVSASTQIMRALMGSKQGRPSSVPEVSRPMARRLSCSAGALITCLASLQLFEEDLGSPASKVRFKDSPRYQELLSISKDLWPGCDVGEDQLDSGLWELTWSQALPDLGSHAMTENFTPTSSSGVDISSGSGGSGESSVPCAMDGTLVTQGTELPLKTSNQRPDSRTYESPGDLENQQQCCFPTFLNARACACATNEDEAERDSEEQRASSNLEQLAENTVQEEVQLEETKEGTEGEGLQEEAVQLEETKTEEGLQEEGVQLEETKETEGEGQQEEEAQLEEIEETGGEGLQEEGVQLEEVKEGPEGGLQGEALEEGLKEEGLPEEGSVHGQELSEASSPDGKGSQEDDPVQEEEAGRASASAEPCPAEGTEEPTEPPSHLSETDPSASERQSGSQLEPGLEKPPGATMMGQEHTQAQPTQGAAERSSSVACSAALDCDPIWVSVLLKKTEKAFLAHLASAVAELRARWGLQDNDLLDQMAAELQQDVAQRLQDSTKRELQKLQGRAGRMVLEPPREALTGELLLQTQQRRHRLRGLRNLSAFSERTLGLGPLSFTLEDEPALSTALGSQLGEEAEGEEFCPCEACVRKKVSPMSPKATMGATRGPIKEAFDLQQILQRKRGEHTDGEAAEVAPGKTHTDPTSTRTVQGAEGGLGPGLSQGPGVDEGEDGEGSQRLNRDKDPKLGEAEGDAMAQEREGKTHNSETSAGSELGEAEQEGEGISERGETGGQGSGHEDNLQGEAAAGGDQDPGQSDGAEGIEAPEAEGEAQPESEGVEAPEAEGDAQEAEGEAQPESEDVEAPEAEGEAQPESEDVETPEAEWEVQPESEGAEAPEAEKEAQPETESVEALETEGEDEPESEGAEAQEAEEAAQEAEGQTQPESEVIESQEAEEEAQPESEDVEALEVEVETQEAEGEAQPESEDVEAPEAEGEMQEAEEEAQPESDGVEAQPKSEGEEAQEVEGETQKTEGDAQPESDGVEAPEAEEEAQEAEGEVQEAEGEAHPESEDVDAQEAEGEAQPESEGVEAPEAEGEAQKAEGIEAPETEGEAQPESEGIEAPEAEGEAQPESEGVEAQDAEGEAQPESEGIEAQEAEEEAQPELEGVEAPEAEGEAQPESEGIEAPEAEGEAQPELEGVEAPEAEEEAQPEPEGVETPEAEGEAQPESEGETQGEKKGSPQVSLGDGQSEEASESSSPVPEDRPTPPPSPGGDTPHQRPGSQTGPSSSRASSWGNCWQKDSENDHVLGDTRSPDAKSTGTPHAERKATRMYPESSTSEQEEAPLGSRTPEQGASEGYDLQEDQALGSLAPTEAVGRADGFGQDDLDF

SEQ ID NO: 3052 - protein, 222 aa, Homo sapiens
MNSTPRNAQAPSHRECFLPSVARTPSVTKVTPAKKITFLKRGDPRFAGVRLAVHQRAFKTFSALMDELSQRVPLSFGVRSVTTPRGLHSLSALEQLEDGGCYLCSDKKPPKTPSGPGRPQERNPTAQQLRDVEGQREAPGTSSSRKSLKTPRRILLIKNMDPRLQQTVVLSHRNTRNLAAFLGKASDLLRFPVKQLYTTSGKKVLPDMKFHQRSAEWRMEVD

SEQ ID NO: 3053 - protein, 811 aa, Homo sapiens
MPLSSPNAAATASDMDKNSGSNSSSASSGSSKGQQPPRSASAGPAGESKPKSDGKNSSGSKRYNRKRELSYPKNESFNNQSRRSSSQKSKTFNKMPPQRGGGSSKLFSSSFNGGRRDEVAEAQRAEFSPAQFSGPKKINLNHLLNFTFEPRGQTGHFEGSGHGSWGKRNKWGHKPFNKELFLQANCQFVVSEDQDYTAHFADPDTLVNWDFVEQVRICSHEVPSCPICLYPPTAAKITRCGHIFCWACILHYLSLSEKTWSKCPICYSSVHKKDLKSVVATESHQYVVGDTITMQLMKREKGVLVALPKSKWMNVDHPIHLGDEQHSQYSKLLLASKEQVLHRVVLEEKVALEQQLAEEKHTPESCFIEAAIQELKTREEALSGLAGSRREVTGVVAALEQLVLMAPLAKESVFQPRKGVLEYLSAFDEETTEVCSLDTPSRPLALPLVEEEEAVSEPEPEGLPEACDDLELADDNLKEGTICTESSQQEPITKSGFTRLSSSPCYYFYQAEDGQHMFLHPVNVRCLVREYGSLERSPEKISATVVEIAGYSMSEDVRQRHRYLSHLPLTCEFSICELALQPPVVSKETLEMFSDDIEKRKRQRQKKAREERRRERRIEIEENKKQGKYPEVHIPLENLQQFPAFNSYTCSSDSALGPTSTEGHGALSISPLSRSPGSHADFLLTPLSPTASQGSPSFCVGSLEEDSPFPSFAQMLRVGKAKADVWPKTAPKKDENSLVPPAPVDSDGESDNSDRVPVPSFQNSFSQAIEAAFMKLDTPATSDPLSEEKGGKKRKKQKQKLLFSTSVVHTK

SEQ ID NO: 3054 - protein, 816 aa, Homo sapiens
MPLSSPNAAATASDMDKNSGSNSSSASSGSSKGQQPPRSASAGPAGESKPKSDGKNSSGSKRYNRKRELSYPKNESFNNQSRRSSSQKSKTFNKMPPQRGGGSSKLFSSSFNGGRRDEVAEAQRAEFSPAQFSGPKKINLNHLLNFTFEPRGQTGHFEGSGHGSWGKRNKWGHKPFNKELFLQANCQFVVSEDQDYTAHFADPDTLVNWDFVEQVRICSHEVPSCPICLYPPTAAKITRCGHIFCWACILHYLSLSEKTWSKCPICYSSVHKKDLKSVVATESHQYVVGDTITMQLMKREKGVLVALPKSKWMNVDHPIHLGDEQHSQYSKLLLASKEQVLHRVVLEEKVALEQQLAEEKHTPESCFIEAAIQELKTREEALSGLAGSRREVTGVVAALEQLVLMAPLAKESVFQPRKSLLQQGVLEYLSAFDEETTEVCSLDTPSRPLALPLVEEEEAVSEPEPEGLPEACDDLELADDNLKEGTICTESSQQEPITKSGFTRLSSSPCYYFYQAEDGQHMFLHPVNVRCLVREYGSLERSPEKISATVVEIAGYSMSEDVRQRHRYLSHLPLTCEFSICELALQPPVVSKETLEMFSDDIEKRKRQRQKKAREERRRERRIEIEENKKQGKYPEVHIPLENLQQFPAFNSYTCSSDSALGPTSTEGHGALSISPLSRSPGSHADFLLTPLSPTASQGSPSFCVGSLEEDSPFPSFAQMLRVGKAKADVWPKTAPKKDENSLVPPAPVDSDGESDNSDRVPVPSFQNSFSQAIEAAFMKLDTPATSDPLSEEKGGKKRKKQKQKLLFSTSVVHTK

SEQ ID NO: 3055 - protein, 311 aa, Homo sapiens
MQRPGPFSTLYGRVLAPLPGRAGGAASGGGGNSWDLPGSHVRLPGRAQSGTRGGAGNTSTSCGDSNSICPAPSTMSKAEEAKKLAGRAAVENHVRNNQVLGIGSGSTIVHAVQRIAERVKQENLNLVCIPTSFQARQLILQYGLTLSDLDRHPEIDLAIDGADEVDADLNLIKGGGGCLTQEKIVAGYASRFIVIADFRKDSKNLGDQWHKGIPIEVIPMAYVPVSRAVSQKFGGVVELRMAVNKAGPVVTDNGNFILDWKFDRVHKWSEVNTAIKMIPGVVDTGLFINMAERVYFGMQDGSVNMREKPFC

SEQ ID NO: 3056 - protein, 2156 aa, Homo sapiens
MSDTPSTGFSIIHPTSSEGQVPPPRHLSLTHPVVAKRISFYKSGDPQFGGVRVVVNPRSFKSFDALLDNLSRKVPLPFGVRNISTPRGRHSITRLEELEDGESYLCSHGRKVQPVDLDKARRRPRPWLSSRAISAHSPPHPVAVAAPGMPRPPRSLVVFRNGDPKTRRAVLLSRRVTQSFEAFLQHLTEVMQRPVVKLYATDGRRVPSLQAVILSSGAVVAAGREPFKPGNYDIQKYLLPARLPGISQRVYPKGNAKSESRKISTHMSSSSRSQIYSVSSEKTHNNDCYLDYSFVPEKYLALEKNDSQNLPIYPSEDDIEKSIIFNQDGTMTVEMKVRFRIKEEETIKWTTTVSKTGPSNNDEKSEMSFPGRTESRSSGLKLAACSFSADVSPMERSSNQEGSLAEEINIQMTDQVAETCSSASWENATVDTDIIQGTQDQAKHRFYRPPTPGLRRVRQKKSVIGSVTLVSETEVQEKMIGQFSYSEERESGENKSEYHMFTHSCSKMSSVSNKPVLVQINNNDQMEESSLERKKENSLLKSSAISAGVIEITSQKMLEMSHNNGLPSTISNNSIVEEDVVDCVVLDNKTGIKNFKTYGNTNDRFSPISADATHFSSNNSGTDKNISEAPASEASSTVTARIDRLINEFAQCGLTKLPKNEKKILSSVASKKKKKSRQQAINSRYQDGQLATKGILNKNERINTKGRITKEMIVQDSDSPLKGGILCEEDLQKSDTVIESNTFCSKSNLNSTISKNFHRNKLNTTQNSKVQGLLTKRKSRSLNKISLGAPKKREIGQRDKVFPHNESKYCKSTFENKSLFHVFNILEQKPKDFYAPQSQAEVASGYLRGMAKKSLVSKVTDSHITLKSQKKRKGDKVKASAILSKQHATTRANSLASLKKPDFPEAIAHHSIQNYIQSWLQNINPYPTLKPIKSAPVCRNETSVVNCSNNSFSGNDPHTNSGKISNFVMESNKHITKIAGLTGDNLCKEGDKSFIANDTGEEDLHETQVGSLNDAYLVPLHEHCTLSQSAINDHNTKSHIAAEKSGPEKKLVYQEINLARKRQSVEAAIQVDPIEEETPKDLLPVLMLHQLQASVPGIHKTQNGVVQMPGSLAGVPFHSAICNSSTNLLLAWLLVLNLKGSMNSFCQVDAHKATNKSSETLALLEILKHIAITEEADDLKAAVANLVESTTSHFGLSEKEQDMVPIDLSANCSTVNIQSVPKCSENERTQGISSLDGGCSASEACAPEVCVLEVTCSPCEMCTVNKAYSPKETCNPSDTFFPSDGYGVDQTSMNKACFLGEVCSLTDTVFSDKACAQKENHTYEGACPIDETYVPVNVCNTIDFLNSKENTYTDNLDSTEELERGDDIQKDLNILTDPEYKNGFNTLVSHQNVSNLSSCGLCLSEKEAELDKKHSSLDDFENCSLRKFQDENAYTSFDMEEPRTSEEPGSITNSMTSSERNISELESFEELENHDTDIFNTVVNGGEQATEELIQEEVEASKTLELIDISSKNIMEEKRMNGIIYEIISKRLATPPSLDFCYDSKQNSEKETNEGETKMVKMMVKTMETGSYSESSPDLKKCIKSPVTSDWSDYRPDSDSEQPYKTSSDDPNDSGELTQEKEYNIGFVKRAIEKLYGKADIIKPSFFPGSTRKSQVCPYNSVEFQCSRKASLYDSEGQSFGSSEQVSSSSSMLQEFQEERQDKCDVSAVRDNYCRGDIVEPGTKQNDDSRILTDIEEGVLIDKGKWLLKENHLLRMSSENPGMCGNADTTSVDTLLDNNSSEVPYSHFGNLAPGPTMDELSSSELEELTQPLELKCNYFNMPHGSDSEPFHEDLLDVRNETCAKERIANHHTEEKGSHQSERVCTSVTHSFISAGNKVYPVSDDAIKNQPLPGSNMIHGTLQEADSLDKLYALCGQHCPILTVIIQPMNEEDRGFAYRKESDIENFLGFYLWMKIHPYLLQTDKNVFREENNKASMRQNLIDNAIGDIFDQFYFSNTFDLMGKRRKQKRINFLGLEEEGNLKKFQPDLKERFCMNFLHTSLLVVGNVDSNTQDLSGQTNEIFKAVDENNNLLNNRFQGSRTNLNQVVRENINCHYFFEMLGQACLLDICQVETSLNISNRNILELCMFEGENLFIWEEEDILNLTDLESSREQEDL

SEQ ID NO: 3057 - protein, 826 aa, Homo sapiens
MWALCSLLRSAAGRTMSQGRTISQAPARRERPRKDPLRHLRTREKRGPSGCSGGPNTVYLQVVAAGSRDSGAALYVFSEFNRYLFNCGEGVQRLMQEHKLKVARLDNIFLTRMHWSNVGGLSGMILTLKETGLPKCVLSGPPQLEKYLEAIKIFSGPLKGIELAVRPHSAPEYEDETMTVYQIPIHSEQRRGKHQPWQSPERPLSRLSPERSSDSESNENEPHLPHGVSQRRGVRDSSLVVAFICKLHLKRGNFLVLKAKEMGLPVGTAAIAPIIAAVKDGKSITHEGREILAEELCTPPDPGAAFVVVECPDESFIQPICENATFQRYQGKADAPVALVVHMAPASVLVDSRYQQWMERFGPDTQHLVLNENCASVHNLRSHKIQTQLNLIHPDIFPLLTSFRCKKEGPTLSVPMVQGECLLKYQLRPRREWQRDAIITCNPEEFIVEALQLPNFQQSVQEYRRSAQDGPAPAEKRSQYPEIIFLGTGSAIPMKIRNVSATLVNISPDTSLLLDCGEGTFGQLCRHYGDQVDRVLGTLAAVFVSHLHADHHTGLPSILLQRERALASLGKPLHPLLVVAPNQLKAWLQQYHNQCQEVLHHISMIPAKCLQEGAEISSPAVERLISSLLRTCDLEEFQTCLVRHCKHAFGCALVHTSGWKVVYSGDTMPCEALVRMGKDATLLIHEATLEDGLEEEAVEKTHSTTSQAISVGMRMNAEFIMLNHFSQRYAKVPLFSPNFSEKVGVAFDHMKVCFGDFPTMPKLIPPLKALFAGDIEEMEERREKRELRQVRAALLSRELAGGLEDGEPQQKRAHTEEPQAKKVRAQ

SEQ ID NO: 3058 - protein, 501 aa, Homo sapiens
MQEHKLKVARLDNIFLTRMHWSNVGGLSGMILTLKETGLPKCVLSGPPQLEKYLEAIKIFSGPLKGIELAVRPHSAPEYEDETMTVYQIPIHSEQRRGKHQPWQSPERPLSRLSPERSSDSESNENEPHLPHGVSQRRGVRDSSLVVAFICKLHLKRGNFLVLKAKEMGLPVGTAAIAPIIAAVKDGKSITHEGREILAEELCTPPDPGAAFVVVECPDESFIQPICENATFQRYQGKADAPVALVVHMAPASVLVDSRYQQWMERFGPDTQHLVLNENCASVHNLRSHKIQTQLNLIHPDIFPLLTSFRCKKEGPTLSVPMVQGECLLKYQLRPRREWQRDAIITCNPEEFIVEALQLPNFQQSVQEYRRSAQDGPAPAEKRSQYPEIIFLGTGSAIPMKIRNVSATLVNISPDTSLLLDCGEGTFGQLCRHYGDQVDRVLGTLAAVFVSHLHADHHTVSVGLDHKAGAWRRHCHVELALWLRLFLRFQTCPELLLLISG

SEQ ID NO: 3059 - protein, 454 aa, Homo sapiens
MRTVPQFTTFAATRFKPSSTSSTRTSSPCSPVSAKEGPTLSVPMVQGECLLKYQLRPRREWQRDAIITCNPEEFIVEALQLPNFQQSVQEYRRSAQDGPAPAEKRSQYPEIIFLGTGSAIPMKIRNVSATLVNISPDTSLLLDCGEGTFGQLCRHYGDQVDRVLGTLAAVFVSHLHADHHTGLPSILLQRERALASLGKPLHPLLVVAPNQLKAWLQQYHNQCQEVLHHISMIPAKCLQEGAEISSPAVERLISSLLRTCDLEEFQTCLVRHCKHAFGCALVHTSGWKVVYSGDTMPCEALVRMGKDATLLIHEATLEDGLEEEAVEKTHSTTSQAISVGMRMNAEFIMLNHFSQRYAKVPLFSPNFSEKVGVAFDHMKVCFGDFPTMPKLIPPLKALFAGDIEEMEERREKRELRQVRAALLSRELAGGLEDGEPQQKRAHTEEPQAKKVRAQ

SEQ ID NO: 3060 - protein, 786 aa, Homo sapiens
MWALCSLLRSAAGRTMSQGRTISQAPARRERPRKDPLRHLRTREKRGPSGCSGGPNTVYLQVVAAGSRDSGAALYVFSEFNRYLFNCGEGVQRLMQEHKLKVARLDNIFLTRMHWSNVGGLSGMILTLKETGLPKCVLSGPPQLEKYLEAIKIFSGPLKGIELAVRPHSAPEYEDETMTVYQIPIHSVSQRRGVRDSSLVVAFICKLHLKRGNFLVLKAKEMGLPVGTAAIAPIIAAVKDGKSITHEGREILAEELCTPPDPGAAFVVVECPDESFIQPICENATFQRYQGKADAPVALVVHMAPASVLVDSRYQQWMERFGPDTQHLVLNENCASVHNLRSHKIQTQLNLIHPDIFPLLTSFRCKKEGPTLSVPMVQGECLLKYQLRPRREWQRDAIITCNPEEFIVEALQLPNFQQSVQEYRRSAQDGPAPAEKRSQYPEIIFLGTGSAIPMKIRNVSATLVNISPDTSLLLDCGEGTFGQLCRHYGDQVDRVLGTLAAVFVSHLHADHHTGLPSILLQRERALASLGKPLHPLLVVAPNQLKAWLQQYHNQCQEVLHHISMIPAKCLQEGAEISSPAVERLISSLLRTCDLEEFQTCLVRHCKHAFGCALVHTSGWKVVYSGDTMPCEALVRMGKDATLLIHEATLEDGLEEEAVEKTHSTTSQAISVGMRMNAEFIMLNHFSQRYAKVPLFSPNFSEKVGVAFDHMKVCFGDFPTMPKLIPPLKALFAGDIEEMEERREKRELRQVRAALLSRELAGGLEDGEPQQKRAHTEEPQAKKVRAQ

SEQ ID NO: 3061 - protein, 154 aa, Homo sapiens
MGNCLKSPTSDDISLLHESQSDRASFGEGTEPDQEPPPPYQEQVPVPVYHPTPSQTRLATQLTEEEQIRIAQRIGLIQHLPKGVYDPGRDGSEKKIRECVICMMDFVYGDPIRFLPCMHIYHLDCIDDWLMRSFTCPSCMEPVDAALLSSYETN

SEQ ID NO: 3062 - protein, 624 aa, Homo sapiens
MENSDSNDKGSGDQSAAQRRSQMDRLDREEAFYQFVNNLSEEDYRLMRDNNLLGTPGESTEEELLRRLQQIKEGPPPQNSDENRGGDSSDDVSNGDSIIDWLNSVRQTGNTTRSGQRGNQSWRAVSRTNPNSGDFRFSLEINVNRNNGSQNSENENEPSARRSSGENVENNSQRQVENPRSESTSARPSRSERNSTEALTEVPPTRGQRRARSRSPDHRRTRARAERSRSPLHPMSEIPRRSHHSISSQTFEHPLVNETEGSSRTRHHVTLRQQISGPELLSRGLFAASGTRNASQGAGSSDTAASGESTGSGQRPPTIVLDLQVRRVRPGEYRQRDSIASRTRSRSQTPNNTVTYESERGGFRRTFSRSERAGVRTYVSTIRIPIRRILNTGLSETTSVAIQTMLRQIMTGFGELSYFMYSDSDSEPTGSVSNRNMERAESRSGRGGSGGGSSSGSSSSSSSSSSSSSSSSSSSSPSSSSGGESSETSSDLFEGSNEGSSSSGSSGARREGRHRAPVTFDESGSLPFLSLAQFFLLNEDDDDQPRGLTKEQIDNLAMRSFGENDALKTCSVCITEYTEGNKLRKLPCSHEYHVHCIDRWLSENSTCPICRRAVLASGNRESVV

SEQ ID NO: 3063 - protein, 483 aa, Homo sapiens
MLTRNNGSQNSENENEPSARRSSGENVENNSQRQVENPRSESTSARPSRSERNSTEALTEVPPTRGQRRARSRSPDHRRTRARAERSRSPLHPMSEIPRRSHHSISSQTFEHPLVNETEGSSRTRHHVTLRQQISGPELLSRGLFAASGTRNASQGAGSSDTAASGESTGSGQRPPTIVLDLQVRRVRPGEYRQRDSIASRTRSRSQTPNNTVTYESERGGFRRTFSRSERAGVRTYVSTIRIPIRRILNTGLSETTSVAIQTMLRQIMTGFGELSYFMYSDSDSEPTGSVSNRNMERAESRSGRGGSGGGSSSGSSSSSSSSSSSSSSSSSSSSPSSSSGGESSETSSDLFEGSNEGSSSSGSSGARREGRHRAPVTFDESGSLPFLSLAQFFLLNEDDDDQPRGLTKEQIDNLAMRSFGENDALKTCSVCITEYTEGNKLRKLPCSHEYHVHCIDRWLSENSTCPICRRAVLASGNRESVV

SEQ ID NO: 3064 - protein, 855 aa, Homo sapiens
MSEARRDSTSSLQRKKPPWLKLDIPSAVPLTAEEPSFLQPLRRQAFLRSVSMPAETAHISSPHHELRRPVLQRQTSITQTIRRGTADWFGVSKDSDSTQKWQRKSIRHCSQRYGKLKPQVLRELDLPSQDNVSLTSTETPPPLYVGPCQLGMQKIIDPLARGRAFRVADDTAEGLSAPHTPVTPGAASLCSFSSSRSGFHRLPRRRKRESVAKMSFRAAAALMKGRSVRDGTFRRAQRRSFTPASFLEEDTTDFPDELDTSFFAREGILHEELSTYPDEVFESPSEAALKDWEKAPEQADLTGGALDRSELERSHLMLPLERGWRKQKEGAAAPQPKVRLRQEVVSTAGPRRGQRIAVPVRKLFAREKRPYGLGMVGRLTNRTYRKRIDSFVKRQIEDMDDHRPFFTYWLTFVHSLVTILAVCIYGIAPVGFSQHETVDSVLRNRGVYENVKYVQQENFWIGPSSEALIHLGAKFSPCMRQDPQVHSFIRSAREREKHSACCVRNDRSGCVQTSEEECSSTLAVWVKWPIHPSAPELAGHKRQFGSVCHQDPRVCDEPSSEDPHEWPEDITKWPICTKNSAGNHTNHPHMDCVITGRPCCIGTKGRCEITSREYCDFMRGYFHEEATLCSQVHCMDDVCGLLPFLNPEVPDQFYRLWLSLFLHAGILHCLVSICFQMTVLRDLEKLAGWHRIAIIYLLSGVTGNLASAIFLPYRAEVGPAGSQFGILACLFVELFQSWQILARPWRAFFKLLAVVLFLFTFGLLPWIDNFAHISGFISGLFLSFAFLPYISFGKFDLYRKRCQIIIFQVVFLGLLAGLVVLFYVYPVRCEWCEFLTCIPFTDKFCEKYELDAQLH

SEQ ID NO: 3065 - protein, 380 aa, Homo sapiens
MRSRVLWGAARWLWPRRAVGPARRPLSSGSPPLEELFTRGGPLRTFLERQAGSEAHLKVRRPELLAVIKLLNEKERELRETEHLLHDENEDLRKLAENEITLCQKEITQLKHQIILLLVPSEETDENDLILEVTAGVGGQEAMLFTSEIFDMYQQYAAFKRWHFETLEYFPSELGGLRHASASIGGSEAYRHMKFEGGVHRVQRVPKTEKQGRVHTSTMTVAILPQPTEINLVINPKDLRIDTKRASGAGGQHVNTTDSAVRIVHLPTGVVSECQQERSQLKNKELAMTKLRAKLYSMHLEEEINKRQNARKIQIGSKGRSEKIRTYNFPQNRVTDHRINKTLHDLETFMQGDYLLDELVQSLKEYADYESLVEIISQKV

SEQ ID NO: 3066 - protein, 271 aa, Homo sapiens
MRSRVLWGAARWLWPRRAVGPARRPLSSGSPPLEELFTRGGPLRTFLERQAGSEAHLKVRRPELLAVIKLLNEKERELRETEHLLHDENEDLRKLAENEITLCQKEITQLKHQIILLLVPSEETDENDLILEVTAGVGGQEAMLFTSEIFDMYQQYAAFKRWHFETLEYFPSELGGLRHASASIGGSEAYRHMKFEGGVHRVQRVPKTEKQGRVHTSTMTVAILPQPTEINLVINPKDLRIDTKRASGAGGQHVNTTDSAVRIVHLPTDWK

SEQ ID NO: 3067 - protein, 238 aa, Homo sapiens
MLFTSEIFDMYQQYAAFKRWHFETLEYFPSELGGLRHASASIGGSEAYRHMKFEGGVHRVQRVPKTEKQGRVHTSTMTVAILPQPTEINLVINPKDLRIDTKRASGAGGQHVNTTDSAVRIVHLPTGVVSECQQERSQLKNKELAMTKLRAKLYSMHLEEEINKRQNARKIQIGSKGRSEKIRTYNFPQNRVTDHRINKTLHDLETFMQGDYLLDELVQSLKEYADYESLVEIISQKV

SEQ ID NO: 3068 - protein, 235 aa, Homo sapiens
MRSRVLWGAARWLWPRRAVGPARRPLSSGSPPLEELFTRGGPLRTFLERQAGSEAHLKVRRPELLAVIKLLNEKERELRETEHLLHDENEDLRKLAENEITLCQKEITQLKHQIILLLVPSEETDENDLILEVTAGVGGGLRHASASIGGSEAYRHMKFEGGVHRVQRVPKTEKQGRVHTSTMTVAILPQPTEINLVINPKDLRIDTKRASGAGGQHVNTTDSAVRIVHLPTDWK

SEQ ID NO: 3069 - protein, 191 aa, Homo sapiens
MLSSIKCVLVGDSAVGKTSLLVRFTSETFPEAYKPTVYENTGVDVFMDGIQISLGLWDTAGNDAFRSIRPLSYQQADVVLMCYSVANHNSFLNLKNKWIGEIRSNLPCTPVLVVATQTDQREMGPHRASCVNAMEGKKLAQDVRAKGYLECSALSNRGVQQVFECAVRTAVNQARRRNRRRLFSINECKIF

SEQ ID NO: 3070 - protein, 214 aa, Homo sapiens
MNCKEGTDSSCGCRGNDEKKMLKCVVVGDGAVGKTCLLMSYANDAFPEEYVPTVFDHYAVTVTVGGKQHLLGLYDTAGQEDYNQLRPLSYPNTDVFLICFSVVNPASYHNVQEEWVPELKDCMPHVPYVLIGTQIDLRDDPKTLARLLYMKEKPLTYEHGVKLAKAIGAQCYLECSALTQKGLKAVFDEAILTIFHPKKKKKRCSEGHSCCSII

SEQ ID NO: 3071 - protein, 192 aa, Homo sapiens
MNCKEGTDSSCGCRGNDEKKMLKCVVVGDGAVGKTCLLMSYANDAFPEEYVPTVFDHYAVTVTVGGKQHLLGLYDTAGQEDYNQLRPLSYPNTDVFLICFSVVNPASYHNVQIDLRDDPKTLARLLYMKEKPLTYEHGVKLAKAIGAQCYLECSALTQKGLKAVFDEAILTIFHPKKKKKRCSEGHSCCSII

SEQ ID NO: 3072 - protein, 649 aa, Homo sapiens
MASVSALTEELDSITSELHAVEIQIQELTERQQELIQKKKVLTKKIKQCLEDSDAGASNEYDSSPAAWNKEDFPWSGKVKDILQNVFKLEKFRPLQLETINVTMAGKEVFLVMPTGGGKSLCYQLPALCSDGFTLVICPLISLMEDQLMVLKQLGISATMLNASSSKEHVKWVHAEMVNKNSELKLIYVTPEKIAKSKMFMSRLEKAYEARRFTRIAVDEVHCCSQWGHDFRPDYKALGILKRQFPNASLIGLTATATNHVLTDAQKILCIEKCFTFTASFNRPNLYYEVRQKPSNTEDFIEDIVKLINGRYKGQSGIIYCFSQKDSEQVTVSLQNLGIHAGAYHANLEPEDKTTVHRKWSANEIQVVVATVAFGMGIDKPDVRFVIHHSMSKSMENYYQESGRAGRDDMKADCILYYGFGDIFRISSMVVMENVGQQKLYEMVSYCQNISKCRRVLMAQHFDEVWNSEACNKMCDNCCKDSAFERKNITEYCRDLIKILKQAEELNEKLTPLKLIDSWMGKGAAKLRVAGVVAPTLPREDLEKIIAHFLIQQYLKEDYSFTAYATISYLKIGPKANLLNNEAHAITMQVTKSTQNSFRAESSQTCHSEQGDKKMEEKNSGNFQKKAANMLQQSGSKNTGAKKRKIDDA

SEQ ID NO: 3073 - protein, 110 aa, Homo sapiens
MPFFSSCLCPSHYSGPSLPSSTSSSLPTGPENQLGFVLLQAMVHHANSSCVRNAFWLQITEKLTPALSIIISVVYLRCPEMVENRIGFLLNVKDSKTLSVVGPHPKPCIL

SEQ ID NO: 3074 - protein, 750 aa, Homo sapiens
MLSSRWWPSSWGILGLGPRSPPRGSQLCALYAFTYTGADGQQVSLAEGDRFLLLRKTNSDWWLARRLEAPSTSRPIFVPAAYMIEESIPSQSPTTVIPGQLLWTPGPKLFHGSLEELSQALPSRAQASSEQPPPLPRKMCRSVSTDNLSPSLLKPFQEGPSGRSLSQEDLPSEASASTAGPQPLMSEPPVYCNLVDLRRCPRSPPPGPACPLLQRLDAWEQHLDPNSGRCFYINSLTGCKSWKPPRRSRSETNPGSMEGTQTLKRNNDVLQPQAKGFRSDTGTPEPLDPQGSLSLSQRTSQLDPPALQAPRPLPQLLDDPHEVEKSGLLNMTKIAQGGRKLRKNWGPSWVVLTGNSLVFYREPPPTAPSSGWGPAGSRPESSVDLRGAALAHGRHLSSRRNVLHIRTIPGHEFLLQSDHETELRAWHRALRTVIERLVRWVEARREAPTGRDQGSGDRENPLELRLSGSGPAELSAGEDEEEESELVSKPLLRLSSRRSSIRGPEGTEQNRVRNKLKRLIAKRPPLQSLQERGLLRDQVFGCQLESLCQREGDTVPSFLRLCIAAVDKRGLDVDGIYRVSGNLAVVQKLRFLVDRERAVTSDGRYVFPEQPGQEGRLDLDSTEWDDIHVVTGALKLFLRELPQPLVPPLLLPHFRAALALSESEQCLSQIQELIGSMPKPNHDTLRYLLEHLCRVIAHSDKNRMTPHNLGIVFGPTLFRPEQETSDPAAHALYPGQLVQLMLTNFTSLFP

SEQ ID NO: 3075 - protein, 731 aa, Homo sapiens
MLSSRWWPSSWGILGLGPRSPPRGSQLCALYAFTYTGADGQQVSLAEGDRFLLLRKTNSDWWLARRLEAPSTSRPIFVPAAYMIEESIPSQSPTTVIPGQLLWTPGPKLFHGSLEELSQALPSRAQASSEQPPPLPRKMCRSVSTDNLSPSLLKPFQEGPSGRSLSQEDLPSEASASTAGPQPLMSEPPVYCNLVDLRRCPRSPPPGPACPLLQRLDAWEQHLDPNSGRCFYINSLTGCKSWKPPRRSRSETNPGSMEGTQTLKRNNDVLQPQAKGFRSDTGTPEPLDPQGSLSLSQRTSQLDPPALQAPRPLPQLLDDPHEVEKSGLLNMTKIAQGGRKLRKNWGPSWVVLTGNSLVFYREPPPTAPSSGWGPAGSRPESSVDLRGAALAHGRHLSSRRNVLHIRTIPGHEFLLQSDHETELRAWHRALRTVIERLDRENPLELRLSGSGPAELSAGEDEEEESELVSKPLLRLSSRRSSIRGPEGTEQNRVRNKLKRLIAKRPPLQSLQERGLLRDQVFGCQLESLCQREGDTVPSFLRLCIAAVDKRGLDVDGIYRVSGNLAVVQKLRFLVDRERAVTSDGRYVFPEQPGQEGRLDLDSTEWDDIHVVTGALKLFLRELPQPLVPPLLLPHFRAALALSESEQCLSQIQELIGSMPKPNHDTLRYLLEHLCRVIAHSDKNRMTPHNLGIVFGPTLFRPEQETSDPAAHALYPGQLVQLMLTNFTSLFP

SEQ ID NO: 3076 - protein, 566 aa, Homo sapiens
MSEPPVYCNLVDLRRCPRSPPPGPACPLLQRLDAWEQHLDPNSGRCFYINSLTGCKSWKPPRRSRSETNPGSMEGTQTLKRNNDVLQPQAKGFRSDTGTPEPLDPQGSLSLSQRTSQLDPPALQAPRPLPQLLDDPHEVEKSGLLNMTKIAQGGRKLRKNWGPSWVVLTGNSLVFYREPPPTAPSSGWGPAGSRPESSVDLRGAALAHGRHLSSRRNVLHIRTIPGHEFLLQSDHETELRAWHRALRTVIERLVRWVEARREAPTGRDQGSGDRENPLELRLSGSGPAELSAGEDEEEESELVSKPLLRLSSRRSSIRGPEGTEQNRVRNKLKRLIAKRPPLQSLQERGLLRDQVFGCQLESLCQREGDTVPSFLRLCIAAVDKRGLDVDGIYRVSGNLAVVQKLRFLVDRERAVTSDGRYVFPEQPGQEGRLDLDSTEWDDIHVVTGALKLFLRELPQPLVPPLLLPHFRAALALSESEQCLSQIQELIGSMPKPNHDTLRYLLEHLCRVIAHSDKNRMTPHNLGIVFGPTLFRPEQETSDPAAHALYPGQLVQLMLTNFTSLFP

SEQ ID NO: 3077 - protein, 547 aa, Homo sapiens
MSEPPVYCNLVDLRRCPRSPPPGPACPLLQRLDAWEQHLDPNSGRCFYINSLTGCKSWKPPRRSRSETNPGSMEGTQTLKRNNDVLQPQAKGFRSDTGTPEPLDPQGSLSLSQRTSQLDPPALQAPRPLPQLLDDPHEVEKSGLLNMTKIAQGGRKLRKNWGPSWVVLTGNSLVFYREPPPTAPSSGWGPAGSRPESSVDLRGAALAHGRHLSSRRNVLHIRTIPGHEFLLQSDHETELRAWHRALRTVIERLDRENPLELRLSGSGPAELSAGEDEEEESELVSKPLLRLSSRRSSIRGPEGTEQNRVRNKLKRLIAKRPPLQSLQERGLLRDQVFGCQLESLCQREGDTVPSFLRLCIAAVDKRGLDVDGIYRVSGNLAVVQKLRFLVDRERAVTSDGRYVFPEQPGQEGRLDLDSTEWDDIHVVTGALKLFLRELPQPLVPPLLLPHFRAALALSESEQCLSQIQELIGSMPKPNHDTLRYLLEHLCRVIAHSDKNRMTPHNLGIVFGPTLFRPEQETSDPAAHALYPGQLVQLMLTNFTSLFP

SEQ ID NO: 3078 - protein, 640 aa, Homo sapiens
MLSSRWWPSSWGILGLGPRSPPRGSQLCALYAFTYTGADGQQVSLAEGDRFLLLRKTNSDWWLARRLEAPSTSRPIFVPAAYMIEESIPSQSPTTVIPGQLLWTPGPKLFHGSLEELSQALPSRAQASSEQPPPLPRKMCRSVSTDNLSPSLLKPFQEGPSGRSLSQEDLPSEASASTAGPQPLMSEPPVYCNLVDLRRCPRSPPPGPACPLLQRLDAWEQHLDPNSGRCFYINSLTGCKSWKPPRRSRSETNPGSMEGTQTLKRNNDVLQPQAKGFRSDTGTPEPLDPQGSLSLSQRTSQLDPPALQAPRPLPQLLDDPHEVEKSGLLNMTKIAQGGRKLRKNWGPSWVVLTGNSLVFYREPPPTAPSSGWGPAGSRPESSVDLRGAALAHGRHLSSRRNVLHIRTIPGHEFLLQSDHETELRAWHRALRTVIERLDRENPLELRLSGSGPAELSAGEDEEEESELVSKPLLRLSSRRSSIRGPEGTEQNRVRNKLKRLIAKRPPLQSLQERGLLRDQVFGCQLESLCQREGDTVPSFLRLCIAAVDKRGLDVDGIYRVSGNLAVVQKLRFLVDRERAVTSDGRYVFPEQPGQEGRLDLDSTEWDDIHVVTGALKLFLRELPQPLVPPLLLPHFRAALG

SEQ ID NO: 3079 - protein, 494 aa, Homo sapiens
MATEAQSEGEVPARESGRSDAICSFVICNDSSLRGQPIIFNPDFFVEKLRHEKPEIFTELVVSNITRLIDLPGTELAQLMGEVDLKLPGGAGPASGFFRSLMSLKRKEKGVIFGSPLTEEGIAQIYQLIEYLHKNLRVEGLFRVPGNSVRQQILRDALNNGTDIDLESGEFHSNDVATLLKMFLGELPEPLLTHKHFNAHLKIADLMQFDDKGNKTNIPDKDRQIEALQLLFLILPPPNRNLLKLLLDLLYQTAKKQDKNKMSAYNLALMFAPHVLWPKNVTANDLQENITKLNSGMAFMIKHSQKLFKAPAYIRECARLHYLGSRTQASKDDLDLIASCHTKSFQLAKSQKRNRVDSCPHQEETQHHTEEALRELFQHVHDMPESAKKKQLIRQFNKQSLTQTPGREPSTSQVQKRARSRSFSGLIKRKVLGNQMMSEKKKKNPTPESVAIGELKGTSKENRNLLFSGSPAVTMTPTRLKWSEGKKEGKKGFL

SEQ ID NO: 3080 - protein, 517 aa, Homo sapiens
MATEAQSEGEVPARESGRSDAICSFVICNDSSLRGQPIIFNPDFFVEKLRHEKPEIFTELVVSNITRLIDLPGTELAQLMGEVDLKLPGGAGPASGFFRSLMSLKRKEKGVIFGSPLTEEGIAQIYQLIEYLHKNLRVEGLFRVPGNSVRQQILRDALNNGTDIDLESGEFHSNDVATLLKMFLGELPEPLLTHKHFNAHLKIADLMQFDDKGNKTNIPDKDRQIEALQLLFLILPPPNRNLLKLLLDLLYQTAKKQDKNKMSAYNLALMFAPHVLWPKNVTANDLQENITKLNSGMAFMIKHSQKLFKAPAYIRECARLHYLGSRTQASKDDLDLIASCHTKSFQLAKSQKRNRVDSCPHQEETQHHTEEALRELFQHVHDMPESAKKKQLIRQFNKQSLTQTPGREPSTSQVQKRARSRSFSGLIKRKVLGNQMMSEKKKKNPTPESVAIGELKGTSKENRNLLFSGSPAVTMTPTRLKWSEGKKEGKKGNSMATTSLGSIRMTLRGSSSCGCCS

SEQ ID NO: 3081 - protein, 485 aa, Homo sapiens
MPHQKLSALIDAICSFVICNDSSLRGQPIIFNPDFFVEKLRHEKPEIFTELVVSNITRLIDLPGTELAQLMGEVDLKLPGGAGPASGFFRSLMSLKRKEKGVIFGSPLTEEGIAQIYQLIEYLHKNLRVEGLFRVPGNSVRQQILRDALNNGTDIDLESGEFHSNDVATLLKMFLGELPEPLLTHKHFNAHLKIADLMQFDDKGNKTNIPDKDRQIEALQLLFLILPPPNRNLLKLLLDLLYQTAKKQDKNKMSAYNLALMFAPHVLWPKNVTANDLQENITKLNSGMAFMIKHSQKLFKAPAYIRECARLHYLGSRTQASKDDLDLIASCHTKSFQLAKSQKRNRVDSCPHQEETQHHTEEALRELFQHVHDMPESAKKKQLIRQFNKQSLTQTPGREPSTSQVQKRARSRSFSGLIKRKVLGNQMMSEKKKKNPTPESVAIGELKGTSKENRNLLFSGSPAVTMTPTRLKWSEGKKEGKKGFL

SEQ ID NO: 3082 - protein, 112 aa, Homo sapiens
MPESAKKKQLIRQFNKQSLTQTPGREPSTSQVQKRARSRSFSGLIKRKVLGNQMMSEKKKKNPTPESVAIGELKGTSKENRNLLFSGSPAVTMTPTRLKWSEGKKEGKKGFL

SEQ ID NO: 3083 - protein, 301 aa, Homo sapiens
MATEAQSEGEVPARESGRSDAICSFVICNDSSLRGQPIIFNPDFFVEKLRHEKPEIFTELVVSNITRLIDLPGTELAQLMGEVDLKLPGGAGPASGFFRSLMSLKRKEKGVIFGSPLTEEGIAQIYQLIEYLHKNLRVEGLFRVPGNSVRQQILRDALNNGTDIDLESGEFHSNDVATLLKMFLGELPEPLLTHKHFNAHLKIADLMQFDDKGNKTNIPDKDRQIEALQLLFLILPPPNRNLLKLLLDLLYQTAKKQDKNKMSAYNLALMFAPHVLWPKNGLVLLPTLEESNTITTHCSLI

SEQ ID NO: 3084 - protein, 465 aa, Homo sapiens
MATEAQSEGEVPARESGRSDAICSFVICNDSSLRGQPIIFNPDFFVEKLRHEKPEIFTELVVSNITRLIDLPGTELAQLMGEVDLKLPGGAGPASGFFRSLMSLKRKEKGVIFGSPLTEEGIAQIYQLIEYLHKNLRVEGLFRVPGNSVRQQILRDALNNGTDIDLESGEFHSNDVATLLKMFLGELPEPLLTHKHFNAHLKIADLMQFDDKGNKTNIPDKDRQIEALQLLFLILPPPNRNLLKLLLDLLYQTAKKQDKNKMSAYNLALMFAPHVLWPKNAPAYIRECARLHYLGSRTQASKDDLDLIASCHTKSFQLAKSQKRNRVDSCPHQEETQHHTEEALRELFQHVHDMPESAKKKQLIRQFNKQSLTQTPGREPSTSQVQKRARSRSFSGLIKRKVLGNQMMSEKKKKNPTPESVAIGELKGTSKENRNLLFSGSPAVTMTPTRLKWSEGKKEGKKGFL

SEQ ID NO: 3085 - protein, 479 aa, Homo sapiens
MATEAQSEGEVPARESGRSDAICSFVICNDSSLRGQPIIFNPDFFVEKLRHEKPEIFTELVVSNITRLIDLPGTELAQLMGEVDLKLPGGAGPASGFFRSLMSLKRKEKGVIFGSPLTEEGIAQIYQLIEYLHKNLRVEGLFRVPGNSVRQQILRDALNNGTDIDLESGEFHSNDVATLLKMFLGELPEPLLTHKHFNAHLKIADLMQFDDKGNKTNIPDKDRQIEALQLLFLILPPPNRNLLKLLLDLLYQTAKKQDKNKMSAYNLALMFAPHVLWPKNVTANDLQENITKLNSGMAFMIKHSQKLFKAPAYIRECARLHYLGSRTQASKLAKSQKRNRVDSCPHQEETQHHTEEALRELFQHVHDMPESAKKKQLIRQFNKQSLTQTPGREPSTSQVQKRARSRSFSGLIKRKVLGNQMMSEKKKKNPTPESVAIGELKGTSKENRNLLFSGSPAVTMTPTRLKWSEGKKEGKKGFL

SEQ ID NO: 3086 - protein, 1114 aa, Homo sapiens
MAKATSGAAGLRLLLLLLLPLLGKVALGLYFSRDAYWEKLYVDQAAGTPLLYVHALRDAPEEVPSFRLGQHLYGTYRTRLHENNWICIQEDTGLLYLNRSLDHSSWEKLSVRNRGFPLLTVYLKVFLSPTSLREGECQWPGCARVYFSFFNTSFPACSSLKPRELCFPETRPSFRIRENRPPGTFHQFRLLPVQFLCPNISVAYRLLEGEGLPFRCAPDSLEVSTRWALDREQREKYELVAVCTVHAGAREEVVMVPFPVTVYDEDDSAPTFPAGVDTASAVVEFKRKEDTVVATLRVFDADVVPASGELVRRYTSTLLPGDTWAQQTFRVEHWPNETSVQANGSFVRATVHDYRLVLNRNLSISENRTMQLAVLVNDSDFQGPGAGVLLLHFNVSVLPVSLHLPSTYSLSVSRRARRFAQIGKVCVENCQAFSGINVQYKLHSSGANCSTLGVVTSAEDTSGILFVNDTKALRRPKCAELHYMVVATDQQTSRQAQAQLLVTVEGSYVAEEAGCPLSCAVSKRRLECEECGGLGSPTGRCEWRQGDGKGITRNFSTCSPSTKTCPDGHCDVVETQDINICPQDCLRGSIVGGHEPGEPRGIKAGYGTCNCFPEEEKCFCEPEDIQDPLCDELCRTVIAAAVLFSFIVSVLLSAFCIHCYHKFAHKPPISSAEMTFRRPAQAFPVSYSSSGARRPSLDSMENQVSVDAFKILEDPKWEFPRKNLVLGKTLGEGEFGKVVKATAFHLKGRAGYTTVAVKMLKENASPSELRDLLSEFNVLKQVNHPHVIKLYGACSQDGPLLLIVEYAKYGSLRGFLRESRKVGPGYLGSGGSRNSSSLDHPDERALTMGDLISFAWQISQGMQYLAEMKLVHRDLAARNILVAEGRKMKISDFGLSRDVYEEDSYVKRSQGRIPVKWMAIESLFDHIYTTQSDVWSFGVLLWEIVTLGGNPYPGIPPERLFNLLKTGHRMERPDNCSEEMYRLMLQCWKQEPDKRPVFADISKDLEKMMVKRRDYLDLAASTPSDSLIYDDGLSEEETPLVDCNNAPLPRALPSTWIENKLYGMSDPNWPGESPVPLTRADGTNTGFPRYPNDSVYANWMLSPSAAKLMDTFDS

SEQ ID NO: 3087 - protein, 1072 aa, Homo sapiens
MAKATSGAAGLRLLLLLLLPLLGKVALGLYFSRDAYWEKLYVDQAAGTPLLYVHALRDAPEEVPSFRLGQHLYGTYRTRLHENNWICIQEDTGLLYLNRSLDHSSWEKLSVRNRGFPLLTVYLKVFLSPTSLREGECQWPGCARVYFSFFNTSFPACSSLKPRELCFPETRPSFRIRENRPPGTFHQFRLLPVQFLCPNISVAYRLLEGEGLPFRCAPDSLEVSTRWALDREQREKYELVAVCTVHAGAREEVVMVPFPVTVYDEDDSAPTFPAGVDTASAVVEFKRKEDTVVATLRVFDADVVPASGELVRRYTSTLLPGDTWAQQTFRVEHWPNETSVQANGSFVRATVHDYRLVLNRNLSISENRTMQLAVLVNDSDFQGPGAGVLLLHFNVSVLPVSLHLPSTYSLSVSRRARRFAQIGKVCVENCQAFSGINVQYKLHSSGANCSTLGVVTSAEDTSGILFVNDTKALRRPKCAELHYMVVATDQQTSRQAQAQLLVTVEGSYVAEEAGCPLSCAVSKRRLECEECGGLGSPTGRCEWRQGDGKGITRNFSTCSPSTKTCPDGHCDVVETQDINICPQDCLRGSIVGGHEPGEPRGIKAGYGTCNCFPEEEKCFCEPEDIQDPLCDELCRTVIAAAVLFSFIVSVLLSAFCIHCYHKFAHKPPISSAEMTFRRPAQAFPVSYSSSGARRPSLDSMENQVSVDAFKILEDPKWEFPRKNLVLGKTLGEGEFGKVVKATAFHLKGRAGYTTVAVKMLKENASPSELRDLLSEFNVLKQVNHPHVIKLYGACSQDGPLLLIVEYAKYGSLRGFLRESRKVGPGYLGSGGSRNSSSLDHPDERALTMGDLISFAWQISQGMQYLAEMKLVHRDLAARNILVAEGRKMKISDFGLSRDVYEEDSYVKRSQGRIPVKWMAIESLFDHIYTTQSDVWSFGVLLWEIVTLGGNPYPGIPPERLFNLLKTGHRMERPDNCSEEMYRLMLQCWKQEPDKRPVFADISKDLEKMMVKRRDYLDLAASTPSDSLIYDDGLSEEETPLVDCNNAPLPRALPSTWIENKLYGRISHAFTRF

SEQ ID NO: 3088 - protein, 670 aa, Homo sapiens
MILEERPDGAGAGEESPRLQGCDSLTQIQCGQLQSRRAQIHQQIDKELQMRTGAENLYRATSNNRVRETVALELSYVNSNLQLLKEELEELSGGVDPGRHGSEAVTVPMIPLGLKETKELDWSTPLKELISVHFGEDGASYEAEIRELEALRQAMRTPSRNESGLELLTAYYNQLCFLDARFLTPARSLGLFFHWYDSLTGVPAQQRALAFEKGSVLFNIGALHTQIGARQDRSCTEGARRAMEAFQRAAGAFSLLRENFSHAPSPDMSAASLCALEQLMMAQAQECVFEGLSPPASMAPQDCLAQLRLAQEAAQVAAEYRLVHRTMAQPPVHDYVPVSWTALVHVKAEYFRSLAHYHVAMALCDGSPATEGELPTHEQVFLQPPTSSKPRGPVLPQELEERRQLGKAHLKRAILGQEEALRLHALCRVLREVDLLRAVISQTLQRSLAKYAELDREDDFCEAAEAPDIQPKTHQKPEARMPRLSQGKGPDIFHRLGPLSVFSAKNRWRLVGPVHLTRGEGGFGLTLRGDSPVLIAAVIPGSQAAAAGLKEGDYIVSVNGQPCRWWRHAEVVTELKAAGEAGASLQVVSLLPSSRLPSLGDRRPVLLGPRGLLRSQREHGCKTPASTWASPRPLLNWSRKAQQGKTGGCPQPCAPVKPAPPSSLKHPGWP

SEQ ID NO: 3089 - protein, 1083 aa, Homo sapiens
MSQTQDYECRSHNVDLPESRIPGSNTRLEWVEIIEPRTRERMYANLVTGECVWDPPAGVRIKRTSENQWWELFDPNTSRFYYYNASTQRTVWHRPQGCDIIPLAKLQTLKQNTESPRASAESSPGRGSSVSREGSTSSSLEPEPDTEKAQELPARAGRPAAFGTVKEDSGSSSPPGVFLEKDYEIYRDYSADGQLLHYRTSSLRWNSGAKERMLIKVADREPSFLAAQGNGYAPDGPPGVRSRRPSGSQHSPSLQTFAPEADGTIFFPERRPSPFLKRAELPGSSSPLLAQPRKPSGDSQPSSPRYGYEPPLYEEPPVEYQAPIYDEPPMDVQFEAGGGYQAGSPQRSPGRKPRPFLQPNKQGPPSPCQQLVLTKQKCPERFLSLEYSPAGKEYVRQLVYVEQAGSSPKLRAGPRHKYAPNPGGGSYSLQPSPCLLRDQRLGVKSGDYSTMEGPELRHSQPPTPLPQAQEDAMSWSSQQDTLSSTGYSPGTRKRKSRKPSLCQATSATPTEGPGDLLVEQPLAEEQPPCGTSLAPVKRAEGEAEGARGAAEPFLAQARLAWEAQQAHFHMKQRSSWDSQQDGSGYESDGALPLPMPGPVVRAFSEDEALAQQENRHWRRGTFEKLGFPQILLEKSVSVQTNLASPEPYLHPSQSEDLAACAQFESSRQSRSGVPSSSCVFPTFTLRKPSSETDIENWASKHFNKHTQGLFRRKVSIANMLAWSSESIKKPMIVTSDRHVKKEACELFKLIQMYMGDRRAKADPLHVALEVATKGWSVQGLRDELYIQLCRQTTENFRLESLARGWELMAICLAFFPPTPKFHSYLEGYIYRHMDPVNDTKGVAISTYAKYCYHKLQKAALTGAKKGLKKPNVEEIRHAKNAVFSPSMFGSALQEVMGMQRERYPERQLPWVQTRLSEEVLALNGDQTEGIFRVPGDIDEVNALKLQVDQWKVPTGLEDPHVPASLLKLWYRELEEPLIPHEFYEQCIAHYDSPEAAVAVVHALPRINRMVLCYLIRFLQVFVQPANVAVTKMDVSNLAMVMAPNCLRCQSDDPRVIFENTRKEMSFLRVLIQHLDTSFMEGVL

SEQ ID NO: 3090 - protein, 1114 aa, Homo sapiens
MSQTQDYECRSHNVDLPESRIPGSNTRLEWVEIIEPRTRERMYANLVTGECVWDPPAGVRIKRTSENQWWELFDPNTSRFYYYNASTQRTVWHRPQGCDIIPLAKLQTLKQNTESPRASAESSPGRGSSVSREGSTSSSLEPEPDTEKAQELPARAGRPAAFGTVKEDSGSSSPPGVFLEKDYEIYRDYSADGQLLHYRTSSLRWNSGAKERMLIKVADREPSFLAAQGNGYAPDGPPGVRSRRPSGSQHSPSLQTFAPEADGTIFFPERRPSPFLKRAELPGSSSPLLAQPRKPSGDSQPSSPRYGYEPPLYEEPPVEYQAPIYDEPPMDVQFEAGGGYQAGSPQRSPGRKPRPFLQPNKQGPPSPCQQLVLTKQKCPERFLSLEYSPAGKEYVRQLVYVEQAGSSPKLRAGPRHKYAPNPGGGSYSLQPSPCLLRDQRLGVKSGDYSTMEGPELRHSQPPTPLPQAQEDAMSWSSQQDTLSSTGYSPGTRKRKSRKPSLCQATSATPTEGPGDLLVEQPLAEEQPPCGTSLAPVKRAEGEAEGARGAAEPFLAQARLAWEAQQAHFHMKQRSSWDSQQDGSGYESDGALPLPMPGPVVRAFSEDEALAQQENRHWRRGTFEKLGFPQILLEKSVSVQTNLASPEPYLHPSQSEDLAACAQFESSRQSRSGVPSSSCVFPTFTLRKPSSETDIENWASKHFNKHTQGLFRRKVSIANMLAWSSESIKKPMIVTSDRHVKKEACELFKLIQMYMGDRRAKADPLHVALEVATKGWSVQGLRDELYIQLCRQTTENFRLESLARGWELMAICLAFFPPTPKFHSYLEGYIYRHMDPVNDTKVTQHIKELLERNTKKKSKLRKKPKPYVEEPDGVAISTYAKYCYHKLQKAALTGAKKGLKKPNVEEIRHAKNAVFSPSMFGSALQEVMGMQRERYPERQLPWVQTRLSEEVLALNGDQTEGIFRVPGDIDEVNALKLQVDQWKVPTGLEDPHVPASLLKLWYRELEEPLIPHEFYEQCIAHYDSPEAAVAVVHALPRINRMVLCYLIRFLQVFVQPANVAVTKMDVSNLAMVMAPNCLRCQSDDPRVIFENTRKEMSFLRVLIQHLDTSFMEGVL

SEQ ID NO: 3091 - protein, 152 aa, Homo sapiens
MPVKCCFYRSPTAETMTWSENMDTLLANQAGLDAFRIFLKSEFSEENVEFWLACEDFKKTKNADKIASKAKMIYSEFIEADAPKEINIDFGTRDLISKNIAEPTLKCFDEAQKLIYCLMAKDSFPRFLKSEIYKKLVNSQQVPNHKKWLPFL

SEQ ID NO: 3092 - protein, 1101 aa, Homo sapiens
MKSRQKGKKKGSAKERVFGCDLQEHLQHSGQEVPQVLKSCAEFVEEYGVVDGIYRLSGVSSNIQKLRQEFESERKPDLRRDVYLQDIHCVSSLCKAYFRELPDPLLTYRLYDKFAEAVGVQLEPERLVKILEVLRELPVPNYRTLEFLMRHLVHMASFSAQTNMHARNLAIVWAPNLLRSKDIEASGFNGTAAFMEVRVQSIVVEFILTHVDQLFGGAALSGGEVESGWRSLPGTRASGSPEDLMPRPLPYHLPSILQAGDGPPQMRPYHTIIEIAEHKRKGSLKVRKWRSIFNLGRSGHETKRKLPRGAEDREDKSNKGTLRPAKSMDSLSAAAGASDEPEGLVGPSSPRPSPLLPESLENDSIEAAEGEQEPEAEALGGTNSEPGTPRAGRSAIRAGGSSRAERCAGVHISDPYNVNLPLHITSILSVPPNIISNVSLARLTRGLECPALQHRPSPASGPGPGPGLGPGPPDEKLEASPASSPLADSGPDDLAPALEDSLSQEVQDSFSFLEDSSSSEPEWVGAEDGEVAQAEAAGAAFSPGEDDPGMGYLEELLGVGPQVEEFSVEPPLDDLSLDEAQFVLAPSCCSLDSAGPRPEVEEENGEEVFLSAYDDLSPLLGPKPPIWKGSGSLEGEAAGCGRQALGQGGEEQACWEVGEDKQAEPGGRLDIREEAEGSPETKVEAGKASEDRGEAGGSQETKVRLREGSREETEAKEEKSKGQKKADSMEAKGVEEPGGDEYTDEKEKEIEREEDEQREEAQVEAGRDLEQGAQEDQVAEEKWEVVQKQEAEGVREDEDKGQREKGYHEARKDQGDGEDSRSPEAATEGGAGEVSKERESGDGEAEGDQRAGGYYLEEDTLSEGSGVASLEVDCAKEGNPHSSEMEEVAPQPPQPEEMEPEGQPSPDGCLCPCSLGLGGVGMRLASTLVQVQQVRSVPVVPPKPQFAKMPSAMCSKIHVAPANPCPRPGRLDGTPGERAWGSRASRSSWRNGGSLSFDAAVALARDRQRTEAQGVRRTQTCTEGGDYCLIPRTSPCSMISAHSPRPLSCLELPSEGAEGSGSRSRLSLPPREPQVPDPLLSSQRRSYAFETQANPGKGEGL

SEQ ID NO: 3093 - protein, 890 aa, Homo sapiens
MKSRQKGKKKGSAKERVFGCDLQEHLQHSGQEVPQVLKSCAEFVEEYGVVDGIYRLSGVSSNIQKLRQEFESERKPDLRRDVYLQDIHCVSSLCKAYFRELPDPLLTYRLYDKFAEAVGVQLEPERLVKILEVLRELPVPNYRTLEFLMRHLVHMASFSAQTNMHARNLAIVWAPNLLRSKDIEASGFNGTAAFMEVRVQSIVVEFILTHVDQLFGGAALSGGEVESGWRSLPGTRASGSPEDLMPRPLPYHLPSILQAGDGPPQMRPYHTIIEIAEHKRKGSLKVRKWRSIFNLGRSGHETKRKLPRGAEDREDKSNKGTLRPAKSMDSLSAAAGASDEPEGLVGPSSPRPSPLLPESLENDSIEAAEGEQEPEAEALGGTNSEPGTPRAGRSAIRAGGSSRAERCAGVHISDPYNVNLPLHITSILSVPPNIISNVSLARLTRGLECPALQHRPSPASGPGPGPGLGPGPPDEKLEASPASSPLADSGPDDLAPALEDSLSQEVQDSFSFLEDSSSSEPEWVGAEDGEVAQAEAAGAAFSPGEDDPGMGYLEELLGVGPQVEEFSVEPPLDDLSLDEAQFVLAPSCCSLDSAGPRPEVEEENGEEVFLSAYDDLSPLLGPKPPIWKGSGSLEGEAAGCGRQALGQGGEEQACWEVGEDKQAEPGGRLDIREEAEGSPQPPQPEEMEPEGQPSPDGCLCPCSLGLGGVGMRLASTLVQVQQVRSVPVVPPKPQFAKMPSAMCSKIHVAPANPCPRPGRLDGTPGERAWGSRASRSSWRNGGSLSFDAAVALARDRQRTEAQGVRRTQTCTEGGDYCLIPRTSPCSMISAHSPRPLSCLELPSEGAEGSGSRSRLSLPPREPQVPDPLLSSQRRSYAFETQANPGKGEGL

SEQ ID NO: 3094 - protein, 953 aa, Homo sapiens
MRHLVHMASFSAQTNMHARNLAIVWAPNLLRSKDIEASGFNGTAAFMEVRVQSIVVEFILTHVDQLFGGAALSGGEVESGWRSLPGTRASGSPEDLMPRPLPYHLPSILQAGDGPPQMRPYHTIIEIAEHKRKGSLKVRKWRSIFNLGRSGHETKRKLPRGAEDREDKSNKGTLRPAKSMDSLSAAAGASDEPEGLVGPSSPRPSPLLPESLENDSIEAAEGEQEPEAEALGGTNSEPGTPRAGRSAIRAGGSSRAERCAGVHISDPYNVNLPLHITSILSVPPNIISNVSLARLTRGLECPALQHRPSPASGPGPGPGLGPGPPDEKLEASPASSPLADSGPDDLAPALEDSLSQEVQDSFSFLEDSSSSEPEWVGAEDGEVAQAEAAGAAFSPGEDDPGMGYLEELLGVGPQVEEFSVEPPLDDLSLDEAQFVLAPSCCSLDSAGPRPEVEEENGEEVFLSAYDDLSPLLGPKPPIWKGSGSLEGEAAGCGRQALGQGGEEQACWEVGEDKQAEPGGRLDIREEAEGSPETKVEAGKASEDRGEAGGSQETKVRLREGSREETEAKEEKSKGQKKADSMEAKGVEEPGGDEYTDEKEKEIEREEDEQREEAQVEAGRDLEQGAQEDQVAEEKWEVVQKQEAEGVREDEDKGQREKGYHEARKDQGDGEDSRSPEAATEGGAGEVSKERESGDGEAEGDQRAGGYYLEEDTLSEGSGVASLEVDCAKEGNPHSSEMEEVAPQPPQPEEMEPEGQPSPDGCLCPCSLGLGGVGMRLASTLVQVQQVRSVPVVPPKPQFAKMPSAMCSKIHVAPANPCPRPGRLDGTPGERAWGSRASRSSWRNGGSLSFDAAVALARDRQRTEAQGVRRTQTCTEGGDYCLIPRTSPCSMISAHSPRPLSCLELPSEGAEGSGSRSRLSLPPREPQVPDPLLSSQRRSYAFETQANPGKGEGL

SEQ ID NO: 3095 - protein, 243 aa, Homo sapiens
MKSRQKGKKKGSAKERVFGCDLQEHLQHSGQEVPQVLKSCAEFVEEYGVVDGIYRLSGVSSNIQKLRQEFESERKPDLRRDVYLQDIHCVSSLCKAYFRELPDPLLTYRLYDKFAEAVGVQLEPERLVKILEVLRELPVPNYRTLEFLMRHLVHMASFSAQTNMHARNLAIVWAPNLLRSKDIEASGFNGTAAFMEVRVQSIVVEFILTHVDQLFGGAALSGQCPPCPPHIPLLGSQVSYSEP

SEQ ID NO: 3096 - protein, 134 aa, Homo sapiens
MTRDQNGTWEMESNENFEGYMKALDIDFATRKIAVRLTQTKVIDQDGDNFKTKTTSTFRNYDVDFTVGVEFDEYTKSLDNRHVKALVTWEGDVLVCVQKGEKENRGWKQWIEGDKLYLELTCGDQVCRQVFKKK

SEQ ID NO: 3097 - protein, 749 aa, Homo sapiens
MQTSETGSDTGSTVTLQTSVASQAAVPTQVVQQVPVQQQVQQVQTVQQVQHVYPAQVQYVEGSDTVYTNGAIRTTTYPYTETQMYSQNTGGNYFDTQGSSAQVTTVVSSHSMVGTGGIQMGVTGGQLISSSGGTYLIGNSMENSGHSVTHTTRASPATIEMAIETLQKSDGLSTHRSSLLNSHLQWLLDNYETAEGVSLPRSTLYNHYLRHCQEHKLDPVNAASFGKLIRSIFMGLRTRRLGTRGNSKYHYYGIRVKPDSPLNRLQEDMQYMAMRQQPMQQKQRYKPMQKVDGVADGFTGSGQQTGTSVEQTVIAQSQHHQQFLDASRALPEFGEVEISSLPDGTTFEDIKSLQSLYREHCEAILDVVVNLQFSLIEKLWQTFWRYSPSTPTDGTTITESSNLSEIESRLPKAKLITLCKHESILKWMCNCDHGMYQALVEILIPDVLRPIPSALTQAIRNFAKSLEGWLSNAMNNIPQRMIQTKVAAVSAFAQTLRRYTSLNHLAQAARAVLQNTSQINQMLSDLNRVDFANVQEQASWVCQCDDNMVQRLETDFKMTLQQQSTLEQWAAWLDNVMMQALKPYEGRPSFPKAARQFLLKWSFYSSMVIRDLTLRSAASFGSFHLIRLLYDEYMFYLVEHRVAQATGETPIAVMGEFGDLNAVSPGNLDKDEGSEVESEMDEELDDSSEPQAKREKTELSQAFPVGCMQPVLETGVQPSLLNPIHSEHIVTSTQTIRQCSATGNTYTAV

SEQ ID NO: 3098 - protein, 707 aa, Homo sapiens
MQTSETGSDTGSTVTLQTSVASQAAVPTQVVQQVPVQQQVQQVQTVQQVQHVYPAQVQYVEGSDTVYTNGAIRTTTYPYTETQMYSQNTGGNYFDTQGSSAQVTTVVSSHSMVGTGGIQMGVTGGQLISSSGGTYLIGNSMENSGHSVTHTTRASPATIEMAIETLQKSDGLSTHRSSLLNSHLQWLLDNYETAEGVSLPRSTLYNHYLRHCQEHKLDPVNAASFGKLIRSIFMGLRTRRLGTRGNSKYHYYGIRVKPDSPLNRLQEDMQYMAMRQQPMQQKQRYKPMQKVDGVADGFTGSGQQTGTSVEQTVIAQSQHHQQFLDASRALPEFGEVEISSLPDGTTFEDIKSLQSLYREHCEAILDVVVNLQFSLIEKLWQTFWRYSPSTPTDGTTITESSNLSEIESRLPKAKLITLCKHESILKWMCNCDHGMYQALVEILIPDVLRPIPSALTQAIRNFAKSLEGWLSNAMNNIPQRMIQTKVAAVSAFAQTLRRYTSLNHLAQAARAVLQNTSQINQMLSDLNRVDFANVQEQASWVCQCDDNMVQRLETDFKMTLQQQSTLEQWAAWLDNVMMQALKPYEGRPSFPKAARQFLLKWSFYSSMVIRDLTLRSAASFGSFHLIRLLYDEYMFYLVEHRVAQATGETPIAVMGEVREAERAVTHWVIKNKPELHFSLNTLLIKTMVPNQVSLRARRDCGVIARVP

SEQ ID NO: 3099 - protein, 413 aa, Homo sapiens
MQTSETGSDTGSTVTLQTSVASQAAVPTQVVQQVPVQQQVQQVQTVQQVQHVYPAQVQYVEGSDTVYTNGAIRTTTYPYTETQMYSQNTGGNYFDTQGSSAQVTTVVSSHSMVGTGGIQMGVTGGQLISSSGGTYLIGNSMENSGHSVTHTTRASPATIEMAIETLQKSDGLSTHRSSLLNSHLQWLLDNYETAEGVSLPRSTLYNHYLRHCQEHKLDPVNAASFGKLIRSIFMGLRTRRLGTRGNSKYHYYGIRVKPDSPLNRLQEDMQYMAMRQQPMQQKQRYKPMQKVDGVADGFTGSGQQTGTSVEQTVIAQSQHHQQFLDASRALPEFGEVEISSLPDGTTFEDIKSLQSLYREHCEAILDVVVNLQFSLIEKLWQTFWRYSPSTPTDGTTITESRSESTSFPIHFHG

SEQ ID NO: 3100 - protein, 303 aa, Homo sapiens
MSEPQPDLEPPQHGLYMLFLLVLVFFLMGLVGFMICHVLKKKGYRCRTSRGSEPDDAQLQPPEDDDMNEDTVERIVRCIIQNEANAEALKEMLGDSEGEGTVQLSSVDATSSLQDGAPSHHHTVHLGSAAPCLHCSRSKRPPLVRQGRSKEGKSRPRTGETTVFSVGRFRVTHIEKRYGLHEHRDGSPTDRSWGSGGGQDPGGGQGSGGGQPKAGMPAMERLPPERPQPQVLASPPVQNGGLRDSSLTPRALEGNPRASAEPTLRAGGRGPSPGLPTQEANGQPSKPDTSDHQVSLPQGAGSM

SEQ ID NO: 3101 - protein, 994 aa, Homo sapiens
MSQWTPEYNELYTLKVDMKSEIPSDAPKTQESLKGILLHPEPIGAAKSFPAGVEMINSKVGNEFSHLCDDSQKQEKEMNGNQQEQEKSLVVRKKRKSQQAGPSYVQNCVKENQGILGLRQHLGTPSDEDNDSSFSDCLSSPSSSLHFGDSDTVTSDEDKEVSVRHSQTILNAKSRSHSARSHKWPRTETESVSGLLMKRPCLHGSSLRRLPCRKRFVKNNSSQRTQKQKERILMQRKKREVLARRKYALLPSSSSSSENDLSSESSSSSSTEGEEDLFVSASENHQNNPAVPSGSIDEDVVVIEASSTPQVTANEEINVTSTDSEVEIVTVGESYRSRSTLGHSRSHWSQGSSSHASRPQEPRNRSRISTVIQPLRQNAAEVVDLTVDEDEPTVVPTTSARMESQATSASINNSNPSTSEQASDTASAVTSSQPSTVSETSATLTSNSTTGTSIGDDSRRTTSSAVTETGPPAMPRLPSCCPQHSPCGGSSQNHHALGHPHTSCFQQHGHHFQHHHHHHHTPHPAVPVSPSFSDPACPVERPPQVQAPCGANSSSGTSYHEQQALPVDLSNSGIRSHGSGSFHGASAFDPCCPVSSSRAAIFGHQAAAAAPSQPLSSIDGYGSSMVAQPQPQPPPQPSLSSCRHYMPPPYASLTRPLHHQASACPHSHGNPPPQTQPPPQVDYVIPHPVHAFHSQISSHATSHPVAPPPPTHLASTAAPIPQHLPPTHQPISHHIPATAPPAQRLHPHEVMQRMEVQRRRMMQHPTRAHERPPPHPHRMHPNYGHGHHIHVPQTMSSHPRQAPERSAWELGIEAGVTAATYTPGALHPHLAHYHAPPRLHHLQLGALPLMVPDMAGYPHIRYISSGLDGTSFRGPFRGNFEELIHLEERLGNVNRGASQGTIERCTYPHKYKKVTTDWFSQRKLHCKQDGEEGTEEDTEEKCTICLSILEEGEDVRRLPCMHLFHQVCVDQWLITNKKCPICRVDIEAQLPSES

SEQ ID NO: 3102 - protein, 986 aa, Homo sapiens
MSQWTPEYNELYTLKVDMKSEIPSDAPKTQESLKGILLHPEPIGAAKSFPAGVEMINSKVGNEFSHLCDDSQKQEKEMNGNQQEQEKSLVVRKKRKSQQAGPSYVQNCVKENQGILGLRQHLGTPSDEDNDSSFSDCLSSPSSSLHFGDSDTVTSDEDKEVSVRHSQTILNAKSRSHSARSHKWPRTETESVSGLLMKRPCLHGSSLRRLPCRKRFVKNNSSQRTQKQKERILMQRKKREVLARRKYALLPSSSSSSENDLSSESSSSSSTEGEEDLFVSASENHQNNPAVPSGSIDEDVVVIEASSTPQVTANEEINVTSTDSEVEIVTVGESYRSRSTLGHSRSHWSQGSSSHASRPQEPRNRSRISTVIQPLRQNAAEVVDLTVDEDEPTVVPTTSARMESQATSASINNSNPSTSEQASDTASAVTSSQPSTVSETSATLTSNSTTGTSIGDDSRRTTSSAVTETGPPAMPRLPSCCPQHSPCGGSSQNHHALGHPHTSCFQQHGHHFQHHHHHHHTPHPAVPVSPSFSDPACPVERPPQVQAPCGANSSSGTSYHEQQALPVDLSNSGIRSHGSGSFHGASAFDPCCPVSSSRAAIFGHQAAAAAPSQPLSSIDGYGSSMVAQPQPQPPPQPSLSSCRHYMPPPYASLTRPLHHQASACPHSHGNPPPQTQPPPQVDYVIPHPVHAFHSQISSHATSHPVAPPPPTHLASTAAPIPQHLPPTHQPISHHIPATAPPAQRLHPHEVMQRMEVQRRRMMQHPTRAHERPPPHPHRMHPNYGHGHHIHVPQTMSSHPRQAPERSAWELGIEAGVTAATYTPGALHPHLAHYHAPPRLHHLQLGALPLMVPDMAGYPHIRYISSGLDGTSFRGPFRGNFEELIHLEERLGNVNRGASQGTIERCTYPHKYKKRKLHCKQDGEEGTEEDTEEKCTICLSILEEGEDVRRLPCMHLFHQVCVDQWLITNKKCPICRVDIEAQLPSES

SEQ ID NO: 3103 - protein, 1003 aa, Homo sapiens
MSQWTPEYNELYTLKVDMKSEIPSDAPKTQESLKGILLHPEPIGAAKSFPAGVEMINSKVGNEFSHLCDDSQKQEKEMNGNQQEQEKSLVVRKKRKSQQAGPSYVQNCVKENQGILGLRQHLGTPSDEDNDSSFSDCLSSPSSSLHFGDSDTVTSDEDKEVSVRHSQTILNAKSRSHSARSHKWPRTETESVSGLLMKRPCLHGSSLRRLPCRKRFVKNNSSQRTQKQKERILMQRKKREVLARRKYALLPSSSSSSENDLSSESSSSSSTEGEEDLFVSASENHQNNPAVPSGSIDEDVVVIEASSTPQVTANEEINVTSTDSEVEIVTVGESYRSRSTLGHSRSHWSQGSSSHASRPQEPRNRSRISTVIQPLRQNAAEVVDLTVDEDEPTVVPTTSARMESQATSASINNSNPSTSEQASDTASAVTSSQPSTVSETSATLTSNSTTGTSIGDDSRRTTSSAVTETGPPAMPRLPSCCPQHSPCGGSSQNHHALGHPHTSCFQQHGHHFQHHHHHHHTPHPAVPVSPSFSDPACPVERPPQVQAPCGANSSSGTSYHEQQALPVDLSNSGIRSHGSGSFHGASAFDPCCPVSSSRAAIFGHQAAAAAPSQPLSSIDGYGSSMVAQPQPQPPPQPSLSSCRHYMPPPYASLTRPLHHQASACPHSHGNPPPQTQPPPQVDYVIPHPVHAFHSQISSHATSHPVAPPPPTHLASTAAPIPQHLPPTHQPISHHIPATAPPAQRLHPHEVMQRMEVQRRRMMQHPTGLFVFCVSRRAHERPPPHPHRMHPNYGHGHHIHVPQTMSSHPRQAPERSAWELGIEAGVTAATYTPGALHPHLAHYHAPPRLHHLQLGALPLMVPDMAGYPHIRYISSGLDGTSFRGPFRGNFEELIHLEERLGNVNRGASQGTIERCTYPHKYKKVTTDWFSQRKLHCKQDGEEGTEEDTEEKCTICLSILEEGEDVRRLPCMHLFHQVCVDQWLITNKKCPICRVDIEAQLPSES

SEQ ID NO: 3104 - protein, 995 aa, Homo sapiens
MSQWTPEYNELYTLKVDMKSEIPSDAPKTQESLKGILLHPEPIGAAKSFPAGVEMINSKVGNEFSHLCDDSQKQEKEMNGNQQEQEKSLVVRKKRKSQQAGPSYVQNCVKENQGILGLRQHLGTPSDEDNDSSFSDCLSSPSSSLHFGDSDTVTSDEDKEVSVRHSQTILNAKSRSHSARSHKWPRTETESVSGLLMKRPCLHGSSLRRLPCRKRFVKNNSSQRTQKQKERILMQRKKREVLARRKYALLPSSSSSSENDLSSESSSSSSTEGEEDLFVSASENHQNNPAVPSGSIDEDVVVIEASSTPQVTANEEINVTSTDSEVEIVTVGESYRSRSTLGHSRSHWSQGSSSHASRPQEPRNRSRISTVIQPLRQNAAEVVDLTVDEDEPTVVPTTSARMESQATSASINNSNPSTSEQASDTASAVTSSQPSTVSETSATLTSNSTTGTSIGDDSRRTTSSAVTETGPPAMPRLPSCCPQHSPCGGSSQNHHALGHPHTSCFQQHGHHFQHHHHHHHTPHPAVPVSPSFSDPACPVERPPQVQAPCGANSSSGTSYHEQQALPVDLSNSGIRSHGSGSFHGASAFDPCCPVSSSRAAIFGHQAAAAAPSQPLSSIDGYGSSMVAQPQPQPPPQPSLSSCRHYMPPPYASLTRPLHHQASACPHSHGNPPPQTQPPPQVDYVIPHPVHAFHSQISSHATSHPVAPPPPTHLASTAAPIPQHLPPTHQPISHHIPATAPPAQRLHPHEVMQRMEVQRRRMMQHPTGLFVFCVSRRAHERPPPHPHRMHPNYGHGHHIHVPQTMSSHPRQAPERSAWELGIEAGVTAATYTPGALHPHLAHYHAPPRLHHLQLGALPLMVPDMAGYPHIRYISSGLDGTSFRGPFRGNFEELIHLEERLGNVNRGASQGTIERCTYPHKYKKRKLHCKQDGEEGTEEDTEEKCTICLSILEEGEDVRRLPCMHLFHQVCVDQWLITNKKCPICRVDIEAQLPSES

SEQ ID NO: 3105 - protein, 777 aa, Homo sapiens
MLPRPLRLLLDTSPPGGVVLSSFRSRDPEEGGGPGGLVVGGGQEEEEEEEEEAPVSVWDEEEDGAVFTVTSRQYRPLDPLVPMPPPRSSRRLRAGTLEALVRHLLDTRTSGTDVSFMSAFLATHRAFTSTPALLGLMADRLEALESHPTDELERTTEVAISVLSTWLASHPEDFGSEAKGQLDRLESFLLQTGYAAGKGVGGGSADLIRNLRSRVDPQAPDLPKPLALPGDPPADPTDVLVFLADHLAEQLTLLDAELFLNLIPSQCLGGLWGHRDRPGHSHLCPSVRATVTQFNKVAGAVVSSVLGATSTGEGPGEVTIRPLRPPQRARLLEKWIRVAEECRLLRNFSSVYAVVSALQSSPIHRLRAAWGEATRDSLRVFSSLCQIFSEEDNYSQSRELLVQEVKLQSPLEPHSKKAPRSGSRGGGVVPYLGTFLKDLVMLDAASKDELENGYINFDKRRKEFAVLSELRRLQNECRGYNLQPDHDIQRWLQGLRPLTEAQSHRVSCEVEPPGSSDPPAPRVLRPTLVISQWTEVLGSVGVPTPLVSCDRPSTGGDEAPTTPAPLLTRLAQHMKWPSVSSLDSALESSPSLHSPADPSHLSPPASSPRPSRGHRRSASCGSPLSGGAEEASGGTGYGGEGSGPGASDCRIIRVQMELGEDGSVYKSILVTSQDKAPSVISRVLKKNNRDSAVASEYELVQLLPGERELTIPASANVFYAMDGASHDFLLRQRRRSSTATPGVTSGPSASGTPPSEGGGGSFPRIKATGRKIARALF

SEQ ID NO: 3106 - protein, 460 aa, Homo sapiens
MPPPRSSRRLRAGTLEALVRHLLDTRTSGTDVSFMSAFLATHRAFTSTPALLGLMADRLEALESHPTDELERTTEVAISVLSTWLASHPEDFGSEAKGQLDRLESFLLQTGYAAGKGVGGGSADLIRNLRSRVDPQAPDLPKPLALPGDPPADPTDVLVFLADHLAEQLTLLDAELFLNLIPSQCLGGLWGHRDRPGHSHLCPSVRATVTQFNKVAGAVVSSVLGATSTGEGPGEVTIRPLRPPQRARLLEKWIRVAEECRLLRNFSSVYAVVSALQSSPIHRLRAAWGEATRDSLRVFSSLCQIFSEEDNYSQSRELLVQEVKLQSPLEPHSKKAPRSGSRGGGVVPYLGTFLKDLVMLDAASKDELENGYINFDKRRKVSGVSGLDAGLPYPCSRKGRGKSQGSLSFGSCSLRAPSQEFAVLSELRRLQNECRGYNLQPDHDIQRWLQGLRPLTEAQS

SEQ ID NO: 3107 - protein, 299 aa, Homo sapiens
MSSIKIECVLPENCRCGESPVWEEVSNSLLFVDIPAKKVCRWDSFTKQVQRVTMDAPVSSVALRQSGGYVATIGTKFCALNWKEQSAVVLATVDNDKKNNRFNDGKVDPAGRYFAGTMAEETAPAVLERHQGALYSLFPDHHVKKYFDQVDISNGLDWSLDHKIFYYIDSLSYSVDAFDYDLQTGQISNRRSVYKLEKEEQIPDGMCIDAEGKLWVACYNGGRVIRLDPVTGKRLQTVKLPVDKTTSCCFGGKNYSEMYVTCARDGMDPEGLLRQPEAGGIFKITGLGVKGIAPYSYAG

SEQ ID NO: 3108 - protein, 227 aa, Homo sapiens
MSSIKIECVLPENCRCGESPVWEEVSNSLLFVDIPAKKVCRWDSFTKQVQRVTMDAPVSSVALRQSGGYVATIGTKFCALNWKEQSAVVLATVDNDKKNNRFNDGKVDPAGRYFAANRRSVYKLEKEEQIPDGMCIDAEGKLWVACYNGGRVIRLDPVTGKRLQTVKLPVDKTTSCCFGGKNYSEMYVTCARDGMDPEGLLRQPEAGGIFKITGLGVKGIAPYSYAG

SEQ ID NO: 3109 - protein, 363 aa, Homo sapiens
MQAFLKGTSISTKPPLTKDRGVAASAGSSGENKKAKPVPWVEKYRPKCVDEVAFQEEVVAVLKKSLEGADLPNLLFYGPPGTGKTSTILAAARELFGPELFRLRVLELNASDERGIQVVREKVKNFAQLTVSGSRSDGKPCPPFKIVILDEADSMTSAAQAALRRTMEKESKTTRFCLICNYVSRIIEPLTSRCSKFRFKPLSDKIQQQRLLDIAKKENVKISDEGIAYLVKVSEGDLRKAITFLQSATRLTGGKEITEKVITDIAGVIPAEKIDGVFAACQSGSFDKLEAVVKDLIDEGHAATQLVNQLHDVVVENNLSDKQKSIITEKLAEVDKCLADGADEHLQLISLCATVMQQLSQNC

SEQ ID NO: 3110 - protein, 303 aa, Homo sapiens
MQAFLKGTSISTKPPLTKDRGVAASAGSSGENKKAKPVPWVEKYRPKCVDEVAFQEEVVAVLKKSLEGADLPNLLFYGPPGTGKTSTILAAARELFGPELFRLRVLELNASDERGIQVVREKVKNFAQLTVSGSRSDGKPCPPFKIVILDEADSMTSAAQAALRRTMEKESKTTRFCLICNYVSRIIEPLTSRCSKFRFKPLSDKIQQQRLLDIAKKENVKISDEGIAYLVKVSEGDLRKAITFLQSATRLTGGKEITEKVITDIAGVRVLDILNFFLVGFFVAFRKFSSNKYWVFSKCQVLH

SEQ ID NO: 3111 - protein, 137 aa, Homo sapiens [sequence omitted]

SEQ ID NO: 3112 - protein, 163 aa, Homo sapiens
MSAHLQWMVVRNCSSFLIKRNKQTYSTEPNNLKARNSFRYNGLIHRKTVGVEPAADGKGVVVVIKRRSGQRKPATSYVRTTINKNARATLSSIRHMIRKNKYRPDLRMVSWGLGIRLGETGQCCGEGPPTTGCNMGWRGMDSCFQPTPHTQHWPRGRLVECMG

SEQ ID NO: 3113 - protein, 169 aa, Homo sapiens
MSAHLQWMVVRNCSSFLIKRNKQTYSTEPNNLKARNSFRYNGLIHRKTVGVEPAADGKGVVVVIKRRSGQRKPATSYVRTTINKNARATLSSIRHMIRKNKYRPDLRMDMLASTGSGLCCSVAVQPWASSSTSLCLRTLICNMRVDRPYYSGLMRRLNVQNLLDCAHKS

SEQ ID NO: 3114 - protein, 69 aa, Homo sapiens
MSAHLQWMVVRNCSSFLIKRNKQTYSTEPNNLKARNSFRYNGLIHRKTVGVEPAADGKGVVVVIKRRSE

SEQ ID NO: 3115 - protein, 87 aa, Homo sapiens
MSAHLQWMVVRNCSSFLIKRNKQTYSTEPNNLKARNSFRYNGLIHRKTVGVEPAADGKGVVVVIKRRSGEFCLVWARERPLSRVWEL

SEQ ID NO: 3116 - protein, 764 aa, Homo sapiens
MIEPFGNQYIVARPVYSTNAFEENHKKTGRHHKTFLDHLKVCCSCSPQKAKRIVLSLFPIASWLPAYRLKEWLLSDIVSGISTGIVAVLQGLAFALLVDIPPVYGLYASFFPAIIYLFFGTSRHISVGPFPILSMMVGLAVSGAVSKAVPDRNATTLGLPNNSNNSSLLDDERVRVAAAASVTVLSGIIQLAFGILRIGFVVIYLSESLISGFTTAAAVHVLVSQLKFIFQLTVPSHTDPVSIFKVLYSVFSQIEKTNIADLVTALIVLLVVSIVKEINQRFKDKLPVPIPIEFIMTVIAAGVSYGCDFKNRFKVAVVGDMNPGFQPPITPDVETFQNTVGDCFGIAMVAFAVAFSVASVYSLKYDYPLDGNQELIALGLGNIVCGVFRGFAGSTALSRSAVQESTGGKTQIAGLIGAIIVLIVVLAIGFLLAPLQKSVLAALALGNLKGMLMQFAEIGRLWRKDKYDCLIWIMTFIFTIVLGLGLGLAASVAFQLLTIVFRTQFPKCSTLANIGRTNIYKNKKDYYDMYEPEGVKIFRCPSPIYFANIGFFRRKLIDAVGFSPLRILRKRNKALRKIRKLQKQGLLQVTPKGFICTVDTIKDSDEELDNNQIEVLDQPINTTDLPFHIDWNDDLPLNIEVPKISLHSLILDFSAVSFLDVSSVRGLKSILQEFIRIKVDVYIVGTDDDFIEKLNRYEFFDGEVKSSIFFLTIHDAVLHILMKKDYSTSKFNPSQEKDGKIDFTINTNGGLRNRVYEVPVETKF

SEQ ID NO: 3117 - protein, 406 aa, Homo sapiens
MKQAGFPLGILLLFWVSYVTDFSLVLLIKGGALSGTDTYQSLVNKTFGFPGYLLLSVLQFLYPFIAMISYNIIAGDTLSKVFQRIPGVDPENVFIGRHFIIGLSTVTFTLPLSLYRNIAKLGKVSLISTGLTTLILGIVMARAISLGPHIPKTEDAWVFAKPNAIQAVGVMSFAFICHHNSFLVYSSLEEPTVAKWSRLIHMSIVISVFICIFFATCGYLTFTGFTQGDLFENYCRNDDLVTFGRFCYGVTVILTYPMECFVTREVIANVFFGGNLSSVFHIVVTVMVITVATLVSLLIDCLGIVLELNGVLCATPLIFIIPSACYLKLSEEPRTHSDKIMSCVMLPIGAVVMVFGFVMAITNTQDCTHGQEMFYCFPDNFSLTNTSESHVQQTTQLSTLNISIFQ

SEQ ID NO: 3118 - protein, 384 aa, Homo sapiens
MKQAGFPLGILLLFWVSYVTDFSLVLLIKGGALSGTDTYQSLVNKTFGFPGYLLLSVLQFLYPFIVDPENVFIGRHFIIGLSTVTFTLPLSLYRNIAKLGKVSLISTGLTTLILGIVMARAISLGPHIPKTEDAWVFAKPNAIQAVGVMSFAFICHHNSFLVYSSLEEPTVAKWSRLIHMSIVISVFICIFFATCGYLTFTGFTQGDLFENYCRNDDLVTFGRFCYGVTVILTYPMECFVTREVIANVFFGGNLSSVFHIVVTVMVITVATLVSLLIDCLGIVLELNGVLCATPLIFIIPSACYLKLSEEPRTHSDKIMSCVMLPIGAVVMVFGFVMAITNTQDCTHGQEMFYCFPDNFSLTNTSESHVQQTTQLSTLNISIFQ

SEQ ID NO: 3119 - protein, 744 aa, Homo sapiens
MDHAEENEILAATQRYYVERPIFSHPVLQERLHTKDKVPDSIADKLKQAFTCTPKKIRNIIYMFLPITKWLPAYKFKEYVLGDLVSGISTGVLQLPQGLAFAMLAAVPPIFGLYSSFYPVIMYCFLGTSRHISIGPFAVISLMIGGVAVRLVPDDIVIPGGVNATNGTEARDALRVKVAMSVTLLSGIIQFCLGVCRFGFVAIYLTEPLVRGFTTAAAVHVFTSMLKYLFGVKTKRYSGIFSVVYSTVAVLQNVKNLNVCSLGVGLMVFGLLLGGKEFNERFKEKLPAPIPLEFFAVVMGTGISAGFNLKESYNVDVVGTLPLGLLPPANPDTSLFHLVYVDAIAIAIVGFSVTISMAKTLANKHGYQVDGNQELIALGLCNSIGSLFQTFSISCSLSRSLVQEGTGGKTQLAGCLASLMILLVILATGFLFESLPQAVLSAIVIVNLKGMFMQFSDLPFFWRTSKIELTIWLTTFVSSLFLGLDYGLITAVIIALLTVIYRTQSPSYKVLGKLPETDVYIDIDAYEEVKEIPGIKIFQINAPIYYANSDLYSNALKRKTGVNPAVIMGARRKAMRKYAKEVGNANMANATVVKADAEVDGEDATKPEEEDGEVKYPPIVIKSTFPEEMQRFMPPGDNVHTVILDFTQVNFIDSVGVKTLAGIVKEYGDVGIYVYLAGCSAQVVNDLTRNRFFENPALWELLFHSIHDAVLGSQLREALAEQEASAPPSQEDLEPNATPATPEA

SEQ ID NO: 3120 - protein, 685 aa, Homo sapiens
MDHAEENEILAATQRYYVERPIFSHPVLQERLHTKDKVPDSIADKLKQAFTCTPKKIRNIIYMFLPITKWLPAYKFKEYVLGDLVSGISTGVLQLPQGLAFAMLAAVPPIFGLYSSFYPVIMYCFLGTSRHISIGPFAVISLMIGGVAVRLVPDDIVIPGGVNATNGTEARDALRVKVAMSVTLLSGIIQFCLGVCRFGFVAIYLTEPLVRGFTTAAAVHVFTSMLKYLFGVKTKRYSGIFSVVYSTVAVLQNVKNLNVCSLGVGLMVFGLLLGGKEFNERFKEKLPAPIPLEFFAVVMGTGISAGFNLKESYNVDVVGTLPLGLLPPANPDTSLFHLVYVDAIAIAIVGFSVTISMAKTLANKHGYQVDGNQELIALGLCNSIGSLFQTFSISCSLSRSLVQEGTGGKTQLAGCLASLMILLVILATGFLFESLPQAVLSAIVIVNLKGMFMQFSDLPFFWRTSKIELTIWLTTFVSSLFLGLDYGLITAVIIALLTVIYRTQSPSYKVLGKLPETDVYIDIDAYEEVKEIPGIKIFQINAPIYYANSDLYSNALKRKTGVNPAVIMGARRKAMRKYAKEVGNANMANATVVKADAEVDGEDATKPEEEDGEVKYPPIVIKSTFPEEMQRFMPPGDNVHTVILDFTQVNFIDSVGVKTLAGIVKEYGDVGIYVYLAGCSAFIQR

SEQ ID NO: 3121 - protein, 516 aa, Homo sapiens
MDHAEENEILAATQRYYVERPIFSHPVLQERLHTKDKVPDSIADKLKQAFTCTPKKIRNIIYMFLPITKWLPAYKFKEYVLGDLVSGISTGVLQLPQGLAFAMLAAVPPIFGLYSSFYPVIMYCFLGTSRHISIGPFAVISLMIGGVAVRLVPDDIVIPGGVNATNGTEARDALRVKVAMSVTLLSGIIQFCLGVCRFGFVAIYLTEPLVRGFTTAAAVHVFTSMLKYLFGVKTKRYSGIFSVVYSTVAVLQNVKNLNVCSLGVGLMVFGLLLGGKEFNERFKEKLPAPIPLEFFAVVMGTGISAGFNLKESYNVDVVGTLPLGLLPPANPDTSLFHLVYVDAIAIAIVGFSVTISMAKTLANKHGYQVDGNQELIALGLCNSIGSLFQTFSISCSLSRSLVQEGTGGKTQLAGCLASLMILLVILATGFLFESLPQAVLSAIVIVNLKGMFMQFSDLPFFWRTSKIELTIWLTTFVSSLFLGLDYGLITAVIIALLTVIYRTQSFHTEMTRRWRP

SEQ ID NO: 3122 - protein, 335 aa, Homo sapiens
MDHAEENEILAATQRYYVERPIFSHPVLQERLHTKDKVPDSIADKLKQAFTCTPKKIRNIIYMFLPITKWLPAYKFKEYVLGDLVSGISTGVLQLPQGLAFAMLAAVPPIFGLYSSFYPVIMYCFLGTSRHISIGPFAVISLMIGGVAVRLVPDDIVIPGGVNATNGTEARDALRVKVAMSVTLLSGIIQFCLGVCRFGFVAIYLTEPLVRGFTTAAAVHVFTSMLKYLFGVKTKRYSGIFSVVYSTVAVLQNVKNLNVCSLGVGLMVFGLLLGGKEFNERFKEKLPAPIPLEFFAVVMGTGISAGFNLKESYNVDVVGTLPLGFHTEMTRRWRP

SEQ ID NO: 3123 - protein, 712 aa, Homo sapiens
MDHAEENEILAATQRYYVERPIFSHPVLQERLHTKDKVPDSIADKLKQAFTCTPKKIRNIIYMFLPITKWLPAYKFKEYVLGDLVSGISTGVLQLPQGLAFAMLAAVPPIFGLYSSFYPVIMYCFLGTSRHISIGPFAVISLMIGGVAVRLVPDDIVIPGGVNATNGTEARDALRVKVAMSVTLLSGIIQFCLGVCRFGFVAIYLTEPLVRGFTTAAAVHVFTSMLKYLFGVKTKRYSGIFSVVYSTVAVLQNVKNLNVCSLGVGLMVFGLLLGGKEFNERFKEKLPAPIPLEFFAVVMGTGISAGFNLKESYNVDVVGTLPLGLLPPANPDTSLFHLVYVDAIAIAIVGFSVTISMAKTLANKHGYQVDGNQELIALGLCNSIGSLFQTFSISCSLSRSLVQEGTGGKTQLAGCLASLMILLVILATGFLFESLPQTIWLTTFVSSLFLGLDYGLITAVIIALLTVIYRTQSPSYKVLGKLPETDVYIDIDAYEEVKEIPGIKIFQINAPIYYANSDLYSNALKRKTGVNPAVIMGARRKAMRKYAKEVGNANMANATVVKADAEVDGEDATKPEEEDGEVKYPPIVIKSTFPEEMQRFMPPGDNVHTVILDFTQVNFIDSVGVKTLAGIVKEYGDVGIYVYLAGCSAQVVNDLTRNRFFENPALWELLFHSIHDAVLGSQLREALAEQEASAPPSQEDLEPNATPATPEA

SEQ ID NO: 3124 - protein, 714 aa, Homo sapiens
MDHAEENEILAATQRYYVERPIFSHPVLQERLHTKDKVPDSIADKLKQAFTCTPKKIRNIIYMFLPITKWLPAYKFKEYVLGDLVSGISTGVLQLPQGLAFAMLAAVPPIFGLYSSFYPVIMYCFLGTSRHISIGPFAVISLMIGGVAVRLVPDDIVIPGGVNATNGTEARDALRVKVAMSVTLLSGIIQFCLGVCRFGFVAIYLTEPLVRGFTTAAAVHVFTSMLKYLFGVKTKRYSGIFSVVYSTVAVLQNVKNLNVCSLGVGLMVFGLLLGGKEFNERFKEKLPAPIPLEFFAVVMGTGISAGFNLKESYNVDVVGTLPLGLLPPANPDTSLFHLVYVDAIAIAIVGFSVTISMAKTLANKHGYQVDGNQELIALGLCNSIGSLFQTFSISCSLSRSLVQEGTGGKTQLAGCLASLMILLVILATGFLFESLPQTIWLTTFVSSLFLGLDYGLITAVIIALLTVIYRTQSPSYKVLGKLPETDVYIDIDAYEEVKEIPGIKIFQINAPIYYANSDLYSNALKRKTGVNPAVIMGARRKAMRKYAKEVGNANMANATVVKATQDAEVDGEDATKPEEEDGEVKYPPIVIKSTFPEEMQRFMPPGDNVHTVILDFTQVNFIDSVGVKTLAGIVKEYGDVGIYVYLAGCSAQVVNDLTRNRFFENPALWELLFHSIHDAVLGSQLREALAEQEASAPPSQEDLEPNATPATPEA

SEQ ID NO: 3125 - protein, 103 aa, Homo sapiens
MADDKDSLPKLKDLAFLKNQLESLQRRVEDEVNSGVGQDGSLLSSPFLKGFLAGYVVAKLRASAVLGFAVGTCTGIYAAQAYAVPNVEKTLRDYLQLLRKGPD

SEQ ID NO: 3126 - protein, 517 aa, Homo sapiens
MDFRTACEETKTGICLLQDGNQEPFKVRLHLAKDILMIQEQDVICVSGEPFYSGERTVTIRRQTVGGFGLSIKGGAEHNIPVVVSKISKEQRAELSGLLFIGDAILQINGINVRKCRHEEVVQVLRNAGEEVTLTVSFLKRAPAFLKLPLNEDCACAPSDQSSGTSSPLCDSGLHLNYHPNNTDTLSCSSWPTSPGLRWEKRWCDLRLIPLLHSRFSQYVPGTDLSRQNAFQVIAVDGVCTGIIQCLSAEDCVDWLQAIATNISNLTKHNIKKINRNFPVNQQIVYMGWCEAREQDPLQDRVYSPTFLALRGSCLYKFLAPPVTTWDWTRAEKTFSVYEIMCKILKDSDLLDRRKQCFTVQSESGEDLYFSVELESDLAQWERAFQTATFLEVERIQCKTYACVLESHLMGLTIDFSTGFICFDAATKAVLWRYKFSQLKGSSDDGKSKIKFLFQNPDTKQIEAKELEFSNLFAVLHCIHSFFAAKVACLDPLFLGNQATASTAASSATTSKAKYTT

SEQ ID NO: 3127 - protein, 480 aa, Homo sapiens
MDFRTACEETKTGICLLQDGNQEPFKVRLHLAKDILMIQEQDVICVSGEPFYSGERTVTIRRQTVGGFGLSIKGGAEHNIPVVVSKISKEQRAELSGLLFIGDAILQINGINVRKCRHEEVVQVLRNAGEEVTLTVSFLKRAPAFLKLPLNEDCACAPSDQSSGTSSPLCDSGLHLNYHPNNTDTLSCSSWPTSPGLRWEKRWCDLRLIPLLHSRFSQYVPGTDLSRQNAFQVIAVDGVCTGIIQCLSAEDCVDWLQAIATNISNLTKHNIKKINRNFPVNQQIVYMGWCEAREQDPLQDRVYSPTFLALRGSCLYKFLAPPVTTWDWTRAEKTFSVYEIMCKILKDSDLLDRRKQCFTVQSESGEDLYFSVELESDLAQWERAFQTATFLEVERIQCKTYACVLESHLMGLTIDFSTGFICFDAATKELEFSNLFAVLHCIHSFFAAKVACLDPLFLGNQATASTAASSATTSKAKYTT

SEQ ID NO: 3128 - protein, 549 aa, Homo sapiens
MDVVEVAGSWWAQEREDIIMKYEKGHRAGLPEDKGPKPFRSYNNNVDHLGIVHETELPPLTAREAKQIRREISRKSKWVDMLGDWEKYKSSRKLIDRAYKGMPMNIRGPMWSVLLNIEEMKLKNPGRYQIMKEKGKRSSEHIQRIDRDVSGTLRKHIFFRDRYGTKQRELLHILLAYEEYNPEVGYCRDLSHIAALFLLYLPEEDAFWALVQLLASERHSLQGFHSPNGGTVQGLQDQQEHVVATSQPKTMGHQDKKDLCGQCSPLGCLIRILIDGISLGLTLRLWDVYLVEGEQALMPITRIAFKVQQKRLTKTSRCGPWARFCNRFVDTWARDEDTVLKHLRASMKKLTRKKGDVPPPAKPEQGSSASRPVPASRGGKTLCKGDRQAPPGPPARFPRPIWSASPPRAPRSSTPCPGGAVREDTYPVGTQGVPSPALAQGGPQGSWRFLQWNSMPRLPTDLDVEGPWFRHYDFRQSCWVRAISQEDQLAPCWQAEHPAERVRSAFAAPSTDSDQGTPFRARDEQQCAPTSGPCLCGLHLESSQFPPGF

SEQ ID NO: 3129 - protein, 576 aa, Homo sapiens
MQVPQDGEDLAGQPWYHGLLSRQKAEALLQQNGDFLVRASGSRGGNPVISCRWRGSALHFEVFRVALRPRPGRPTALFQLEDEQFPSIPALVHSYMTGRRPLSQATGAVVSRPVTWQGPLRRSFSEDTLMDGPARIEPLRARKWSNSQPADLAHMGRSREDPAGMEASTMPISALPRTSSDPVLLKAPAPLGTVADSLRASDGQLQAKAPTKPPRTPSFELPDASERPPTYCELVPRVPSVQGTSPSQSCPEPEAPWWEAEEDEEEENRCFTRPQAEISFCPHDAPSCLLGPQNRPLEPQVLHTLRGLFLEHHPGSTALHLLLVDCQATGLLGVTRDQRGNMGVSSGLELLTLPHGHHLRLELLERHQTLALAGALAVLGCSGPLEERAAALRGLVELALALRPGAAGDLPGLAAVMGALLMPQVSRLEHTWRQLRRSHTEAALAFEQELKPLMRALDEGAGPCDPGEVALPHVAPMVRLLEGEEVAGPLDESCERLLRTLHGARHMVRDAPKFRKVAAQRLRGFRPNPELREALTTGFVRRLLWGSRGAGAPRAERFEKFQRVLGVLSQRLEPDR

SEQ ID NO: 3130 - protein, 483 aa, Homo sapiens
MEKTLLANLGTTASCPARARKWSNSQPADLAHMGRSREDPAGMEASTMPISALPRTSSDPVLLKAPAPLGTVADSLRASDGQLQAKAPTKPPRTPSFELPDASERPPTYCELVPRVPSVQGTSPSQSCPEPEAPWWEAEEDEEEENRCFTRPQAEISFCPHDAPSCLLGPQNRPLEPQVLHTLRGLFLEHHPGSTALHLLLVDCQATGLLGVTRDQRGNMGVSSGLELLTLPHGHHLRLELLERHQTLALAGALAVLGCSGPLEERAAALRGLVELALALRPGAAGDLPGLAAVMGALLMPQVRGEQGLEEAGVRVTGKTGEEACSDLFSQVSRLEHTWRQLRRSHTEAALAFEQELKPLMRALDEGAGPCDPGEVALPHVAPMVRLLEGEEVAGPLDESCERLLRTLHGARHMVRDAPKFRKVAAQRLRGFRPNPELREALTTGFVRRLLWGSRGAGAPRAERFEKFQRVLGVLSQRLEPDR

SEQ ID NO: 3131 - protein, 632 aa, Homo sapiens
MNGAGPGPAAAAPVPVPVPVPDWRQFCELHAQAAAVDFAHKFCRFLRDNPAYDTPDAGASFSRHFAANFLDVFGEEVRRVLVAGPTTRGAAVSAEAMEPELADTSALKAAPYGHSRSSEDVSTHAATKARVRKGFSLRNMSLCVVDGVRDMWHRRASPEPDAAAAPRTAEPRDKWTRRLRLSRTLAAKVELVDIQREGALRFMVADDAAAGSGGSAQWQKCRLLLRRAVAEERFRLEFFVPPKASRPKVSIPLSAIIEVRTTMPLEMPEKDNTFVLKVENGAEYILETIDSLQKHSWVADIQGCVDPGDSEEDTELSCTRGGCLASRVASCSCELLTDAVDLPRPPETTAVGAVVTAPHSRGRDAVRESLIHVPLETFLQTLESPGGSGSDSNNTGEQGAETDPEAEPELELSDYPWFHGTLSRVKAAQLVLAGGPRNHGLFVIRQSETRPGEYVLTFNFQGKAKHLRLSLNGHGQCHVQHLWFQSVLDMLRHFHTHPIPLESGGSADITLRSYVRAQDPPPEPGPTPPAAPASPACWSDSPGQHYFSSLAAAACPPASPSDAAGASSSSASSSSAASGPAPPRPVEGQLSARSRSNSAERLLEAVAATAAEEPPEAAPGRARAVENQYSFY

SEQ ID NO: 3132 - protein, 675 aa, Homo sapiens
MDPSYCPAHGFPSQDPLWPLSSQQWSSAHYSEPAAGGCDGTEAMNGAGPGPAAAAPVPVPVPVPDWRQFCELHAQAAAVDFAHKFCRFLRDNPAYDTPDAGASFSRHFAANFLDVFGEEVRRVLVAGPTTRGAAVSAEAMEPELADTSALKAAPYGHSRSSEDVSTHAATKARVRKGFSLRNMSLCVVDGVRDMWHRRASPEPDAAAAPRTAEPRDKWTRRLRLSRTLAAKVELVDIQREGALRFMVADDAAAGSGGSAQWQKCRLLLRRAVAEERFRLEFFVPPKASRPKVSIPLSAIIEVRTTMPLEMPEKDNTFVLKVENGAEYILETIDSLQKHSWVADIQGCVDPGDSEEDTELSCTRGGCLASRVASCSCELLTDAVDLPRPPETTAVGAVVTAPHSRGRDAVRESLIHVPLETFLQTLESPGGSGSDSNNTGEQGAETDPEAEPELELSDYPWFHGTLSRVKAAQLVLAGGPRNHGLFVIRQSETRPGEYVLTFNFQGKAKHLRLSLNGHGQCHVQHLWFQSVLDMLRHFHTHPIPLESGGSADITLRSYVRAQDPPPEPGPTPPAAPASPACWSDSPGQHYFSSLAAAACPPASPSDAAGASSSSASSSSAASGPAPPRPVEGQLSARSRSNSAERLLEAVAATAAEEPPEAAPGRARAVENQYSFY

SEQ ID NO: 3133 - protein, 446 aa, Homo sapiens
MRPVRENSSGARSPRVPADLARSILISLPFPPDSLAHRPPSSAPTESQGLFTVAAPAPGAPSPPATLAHLLPAPAMYSLLETELKNPVGTPTQAAGTGGPAAPGGAGKSSANAAGGANSGGGSSGGASGGGGGTDQDRVKRPMNAFMVWSRGQRRKMALENPKMHNSEISKRLGADWKLLTDAEKRPFIDEAKRLRAVHMKEYPDYKYRPRRKTKTLLKKDKYSLPSGLLPPGAAAAAAAAAAAAAAASSPVGVGQRLDTYTHVNGWANGAYSLVQEQLGYAQPPSMSSPPPPPALPPMHRYDMAGLQYSPMMPPGAQSYMNVAAAAAAASGYGGMAPSATAAAAAAYGQQPATAAAAAAAAAAMSLGPMGSVVKSEPSSPPPAIASHSQRACLGDLRDMISMYLPPGGDAADAASPLPGGRLHGVHQHYQGAGTAVNGTVPLTHI

SEQ ID NO: 3134 - protein, 373 aa, Homo sapiens
MHRGTQEGAMASRLLHRLRHALAGDGPGEAAASPEAEQFPESSELEDDDAEGLSSRLSGTLSFTSAEDDEDDEDEDDEEAGPDQLPLGDGTSGEDAERSPPPDGQWGSQLLARQLQDFWKKSRNTLAPQRLLFEVTSANVVKDPPSKYVLYTLAVIGPGPPDCQPAQISRRYSDFERLHRNLQRQFRGPMAAISFPRKRLRRNFTAETIARRSRAFEQFLGHLQAVPELRHAPDLQDFFVLPELRRAQSLTCTGLYREALALWANAWQLQAQLGTPSGPDRPLLTLAGLAVCHQELEDPGEARACCEKALQLLGDKSLHPLLAPFLEAHVRLSWRLGLDKRQSEARLQALQEAGLTPTPPPSLKELLIKEVLD

SEQ ID NO: 3135 - protein, 199 aa, Homo sapiens
MHRGTQEGAMASRLLHRLRHALAGDGPGEAAASPEAEQFPESSELEDDDAEGLSSRLSGTLSFTSAEDDEDDEDEDDEEAGPDQLPLGDGTSGEDAERSPPPDGQWGSQLLARQLQDFWKKSRNTLAPQRLLFEVTSANVVKDPPSKYVLYTLAVIGPGPPDCQPAQISRRYSDFERLHRNLQRQFRGPMAAISFPQSH

SEQ ID NO: 3136 - protein, 158 aa, Homo sapiens
MHRGTQEGAMASRLLHRLRHALAGDGPGEAAASPEAEQFPESSELEDDDAEGLSSRLSGTLSFTSAEDDEDDEDEDDEEAGPDQLPLGDGTSGEDAERSPPPDGQWGSQLLARQLQDFWKKSRNTLAPQRLLFEVTSANVVKDPPSKYVTNLSSTPSP

SEQ ID NO: 3137 - protein, 536 aa, Homo sapiens; identical to SEQ ID NO: 268

SEQ ID NO: 3138 - protein, 151 aa, Homo sapiens
MSIPFSNTHYRIPQGFGNLLEGLTREILREQPDNIPAFAAAYFESLLEKREKTNFDPAEWGSKVEDRFYNNHAFEEQEPPEKSDPKQEESQISGKEEETSVTILDSSEEDKEKEEVAAVKIQAAFRGHIAREEAKKMKTNSLQNEEKEENK

SEQ ID NO: 3139 - protein, 207 aa, Homo sapiens
MSTQSTHPLKPEAPRLPPGIPESPSCQRRHTLPASEFRCLTPEDAVSAFEIEREAFISVLGVCPLYLDEIRHFLTLCPELSLGWFEEGCLVAFIIGSLWDKERLMQESLTLHRSGGHIAHLHVLAVHRAFRQQGRGPILLWRYLHHLGSQPAVRRAALMCEDALVPFYERFSFHAVGPCAITVGSLTFMELHCSLRGHPFLRRNSGC

SEQ ID NO: 3140 - protein, 252 aa, Homo sapiens
MEPQSMKGQKRPFGGPWRLKVLGGPPWLRRTLPKLGRPKEAPVARMSTQSTHPLKPEAPRLPPGIPESPSCQRRHTLPASEFRCLTPEDAVSAFEIEREAFISVLGVCPLYLDEIRHFLTLCPELSLGWFEEGCLVAFIIGSLWDKERLMQESLTLHRSGGHIAHLHVLAVHRAFRQQGRGPILLWRYLHHLGSQPAVRRAALMCEDALVPFYERFSFHAVGPCAITVGSLTFMELHCSLRGHPFLRRNSGC

SEQ ID NO: 3141 - protein, 817 aa, Homo sapiens
MDRDLEQALDRTENITEIAQQRRPRRRYSPRAGKTLQEKLYDIYVEECGKEPEDPQELRSNVNLLEKLVRRESLPCLLVNLYPGNQGYSVMLQREDGSFAETIRLPYEERALLDYLDAEELPPALGDVLDKASVNIFHSGCVIVEVRDYRQSSNMQPPGYQSRHILLRPTMQTLAPEVKTMTRDGEKWSQEDKFPLESQLILATAEPLCLDPSVAVACTANRLLYNKQKMNTDPMEQCLQRYSWPSVKPQQEQSDCPPPPELRVSTSGQKEERKVGQPCELNITKAGSCVDTWKGRPCDLAVPSEVDVEKLAKGYQSVTAADPQLPVWPAQEVEDPFRHAWEAGCQAWDTKPNIMQSFNDPLLCGKIRPRKKARQKSQKSPWQPFPDDHSACLRPGSETDAGRAVSQAQESVQSKVKGPGKMSHSSSGPASVSQLSSWKTPEQPDPVWVQSSVSGKGEKHPPPRTQLPSSSGKISSGNSFPPQQAGSPLKRPFPAAAPAVAAAAPAPAPAPAAAPALAAAAVAAAAGGAAPSHSQKPSVPLIKASRRRPAAGRPTRFVKIAPAIQVRTGSTGLKATNVEGPVRGAQVLGCSFKPVQAPGSGAPAPAGISGSGLQSSGGPLPDARPGAVQASSPAPLQFFLNTPEGLRPLTLQVPQGWAVLTGPQQQSHQLVSLQQLQQPTAAHPPQPGPQGSTLGLSTQGQAFPAQQLLNVNLTGAGSGLQPQPQAAVLSLLGSAQVPQQGVQLPFVLGQQPQPLLLLQPQPQPQQIQLQTQPLRVLQQPVFLATGAVQIVQPHPGVQAGSQLVGQRKGGKPTPPAP

SEQ ID NO: 3142 - protein, 121 aa, Homo sapiens
MEAEVDKLELMFQKAESDLDYIQYRLEYEIKTNHPDSASEKNPVTLLKELSVIKSRYQTLYARFKPVAVEQKESKSRICATVKKTMNMIQKLQKQTDLELSPLTKEEKTAAEQFKFHMPDL

SEQ ID NO: 3143 - protein, 75 aa, Homo sapiens
MASEVGHNLESPETPGGGGWTRVEFPPPAPKGAATVWCLNRLGSRKLSLIWITFNTGWNMKSRLIILIQQVSCHH

SEQ ID NO: 3144 - protein, 387 aa, Homo sapiens
MAETLFWTPLLVVLLAGLGDTEAQQTTLHPLVGRVFVHTLDHETFLSLPEHVAVPPAVHITYHAHLQGHPDLPRWLRYTQRSPHHPGFLYGSATPEDRGLQVIEVTAYNRDSFDTTRQRLVLEIGDPEGPLLPYQAEFLVRSHDAEEVLPSTPASRFLSALGGLWEPGELQLLNVTSALDRGGRVPLPIEGRKEGVYIKVGSASPFSTCLKMVASPDSHARCAQGQPPLLSCYDTLAPHFRVDWCNVTLVDKSVPEPADEVPTPGDGILEHDPFFCPPTEAPDRDFLVDALVTLLVPLLVALLLTLLLAYVMCCRREGRLKRDLATSDIQMVHHCTIHGNTEELRQMAASREVPRPLSTLPMFNVHTGERLPPRVDSAQVPLILDQH

SEQ ID NO: 3145 - protein, 263 aa, Homo sapiens
MAETLFWTPLLVVLLAGLGDTEAQQTTLHPLVGRVFVHTLDHETFLSLPEHVAVPPAVHITYHAHLQGHPDLPRWLRYTQRSPHHPGFLYGSATPEDRGLQVIEVTAYNRDSFDTTRQRLVLEIGDPEGPLLPYQAEFLVRSHDAEEVLPSTPASRFLSALGGLWEPGELQLLNVTSALDRGGRVPLPIEGRKEGLKRDLATSDIQMVHHCTIHGNTEELRQMAASREVPRPLSTLPMFNVHTGERLPPRVDSAQVPLILDQH

SEQ ID NO: 3146 - protein, 211 aa, Homo sapiens
MISRMEKMTMMMKILIMFALGMNYWSCSGFPVYDYDPSSLRDALSASVVKVNSQSLSPYLFRAFRSSLKRVEVLDENNLVMNLEFSIRETTCRKDSGEDPATCAFQRDYYVSTAVCRSTVKVSAQQVQGVHARCSWSSSTSESYSSEEMIFGDMLGSHKWRNNYLFGLISDESISEQFYDRSLGIMRRVLPPGNRRYPNHRHRARINTDFE

SEQ ID NO: 3147 - protein, 97 aa, Homo sapiens
MDKQSSAGGVKRSVPCDSNEANEMMPETSSGYSDPQPAPKKLKTSESSTILVVRYRRNVKRTSPEELVNDHARENRINPLQMEEEEFMEIMVEIPAK

SEQ ID NO: 3148 - protein, 915 aa, Homo sapiens
MPRGSRARGSKRKRSWNTECPSFPGERPLQVRRAGLRTAGAAASLSEAWLRCGEGFQNTSGNPSLTAEEKTITEKHLELCPRPKQETTTSKSTSGLTDITWSSSGSDLSDEDKTLSQLQRDELQFIDWEIDSDRAEASDCDEFEDDEGAVEISDCASCASNQSLTSDEKLSELPKPSSIEILEYSSDSEKEDDLENVLLIDSESPHKYHVQFASDARQIMERLIDPRTKSTETILHTPQKPTAKFPRTPENSAKKKLLRGGLAERLNGLQNRERSAISLWRHQCISYQKTLSGRKSGVLTVKILELHEECAMQVAMCEQLLGSPATSSSQSVAPRPGAGLKVLFTKETAGYLRGRPQDTVRIFPPWQKLIIPSGSCPVILNTYFCEKVVAKEDSEKTCEVYCPDIPLPRRSISLAQMFVIKGLTNNSPEIQVVCSGVATTGTAWTHGHKEAKQRIPTSTPLRDSLLDVVESQGAASWPGAGVRVVVQRVYSLPSRDSTRGQQGASSGHTDPAGTRACLLVQDACGMFGEVHLEFTMSKARQLEGKSCSLVGMKVLQKVTRGRTAGIFSLIDTLWPPAIPLKTPGRDQPCEEIKTHLPPPALCYILTAHPNLGQIDIIDEDPIYKLYQPPVTRCLRDILQMNDLGTRCSFYATVIYQKPQLKSLLLLEQREIWLLVTDVTLQTKEERDPRLPKTLLVYVAPLCVLGSEVLEALAGAAPHSLFFKDALRDQGRIVCAERTVLLLQKPLLSVVSGASSCELPGPVMLDSLDSATPVNSICSVQGTVVGVDESTAFSWPVCDMCGNGRLEQRPEDRGAFSCGDCSRVVTSPVLKRHLQVFLDCRSRPQCRVKVKLLQRSISSLLRFAAGEDGSYEVKSVLGKEVGLLNCFVQSVTAHPTSCIGLEEIELLSAGGASAEH

SEQ ID NO: 3149 - protein, 845 aa, Homo sapiens
MAQVWRRVSEHFWESETTTSKSTSGLTDITWSSSGSDLSDEDKTLSQLQRDELQFIDWEIDSDRAEASDCDEFEDDEGAVEISDCASCASNQSLTSDEKLSELPKPSSIEILEYSSDSEKEDDLENVLLIDSESPHKYHVQFASDARQIMERLIDPRTKSTETILHTPQKPTAKFPRTPENSAKKKLLRGGLAERLNGLQNRERSAISLWRHQCISYQKTLSGRKSGVLTVKILELHEECAMQVAMCEQLLGSPATSSSQSVAPRPGAGLKVLFTKETAGYLRGRPQDTVRIFPPWQKLIIPSGSCPVILNTYFCEKVVAKEDSEKTCEVYCPDIPLPRRSISLAQMFVIKGLTNNSPEIQVVCSGVATTGTAWTHGHKEAKQRIPTSTPLRDSLLDVVESQGAASWPGAGVRVVVQRVYSLPSRDSTRGQQGASSGHTDPAGTRACLLVQDACGMFGEVHLEFTMSKARQLEGKSCSLVGMKVLQKVTRGRTAGIFSLIDTLWPPAIPLKTPGRDQPCEEIKTHLPPPALCYILTAHPNLGQIDIIDEDPIYKLYQPPVTRCLRDILQMNDLGTRCSFYATVIYQKPQLKSLLLLEQREIWLLVTDVTLQTKEERDPRLPKTLLVYVAPLCVLGSEVLEALAGAAPHSLFFKDALRDQGRIVCAERTVLLLQKPLLSVVSGASSCELPGPVMLDSLDSATPVNSICSVQGTVVGVDESTAFSWPVCDMCGNGRLEQRPEDRGAFSCGDCSRVVTSPVLKRHLQVFLDCRSRPQCRVKVKLLQRSISSLLRFAAGEDGSYEVKSVLGKEVGLLNCFVQSVTAHPTSCIGLEEIELLSAGGASAEH

SEQ ID NO: 3150 - protein, 876 aa, Homo sapiens
MAQSLTAEEKTITEKHLELCPRPKQETTTSKSTSGLTDITWSSSGSDLSDEDKTLSQLQRDELQFIDWEIDSDRAEASDCDEFEDDEGAVEISDCASCASNQSLTSDEKLSELPKPSSIEILEYSSDSEKEDDLENVLLIDSESPHKYHVQFASDARQIMERLIDPRTKSTETILHTPQKPTAKFPRTPENSAKKKLLRGGLAERLNGLQNRERSAISLWRHQCISYQKTLSGRKSGVLTVKILELHEECAMQVAMCEQLLGSPATSSSQSVAPRPGAGLKVLFTKETAGYLRGRPQDTVRIFPPWQKLIIPSGSCPVILNTYFCEKVVAKEDSEKTCEVYCPDIPLPRRSISLAQMFVIKGLTNNSPEIQVVCSGVATTGTAWTHGHKEAKQRIPTSTPLRDSLLDVVESQGAASWPGAGVRVVVQRVYSLPSRDSTRGQQGASSGHTDPAGTRACLLVQDACGMFGEVHLEFTMSKARQLEGKSCSLVGMKVLQKVTRGRTAGIFSLIDTLWPPAIPLKTPGRDQPCEEIKTHLPPPALCYILTAHPNLGQIDIIDEDPIYKLYQPPVTRCLRDILQMNDLGTRCSFYATVIYQKPQLKSLLLLEQREIWLLVTDVTLQTKEERDPRLPKTLLVYVAPLCVLGSEVLEALAGAAPHSLFFKDALRDQGRIVCAERTVLLLQKPLLSVVSGASSCELPGPVMLDSLDSATPVNSICSVQGTVVGVDESTAFSWPVCDMCGNGRLEQRPEDRGAFSCGDCSRVVTSPVLKRHLQVFLDCRSRPQCRVKVKVGARPEHARTPSSLQHSEELRSEECPRKGSGVVKLFCPVRNRPPDQLHWIGGNRASECRRGLCRTLAVAAGSVNFAMWLQGWWWWW

SEQ ID NO: 3151 - protein, 116 aa, Homo sapiens
MKGLRSLAATTLALFLVFVFLGNSSCAPQRLLERRNWTPQAMLYLKGAQGRRFISDQSRRKDLSDRPLPERRSPNPQLLTIPEAATILLASLQKSPEDEEKNFDQTRFLEDSLLNW

SEQ ID NO: 3152 - protein, 855 aa, Homo sapiens
MSFVRVNRCGPRVGVRKTPKVKKKKTSVKQEWDNTVTDLTVHRATPEDLVRRHEIHKSKNRALVHWELQEKALKRKWRKQKPETLNLEKRRLSIMKEILSDQYQMQDVLEKSDHLIAAAKELFPRRRTGFPNVTVAPDSSQGPIVVNQDPITQSIFNESVIEPQALNDVDGEEEGTVNSQSGESENENELDNSLNSQSNTNTDRFLQQLTEENFELISKLWTDIQQKIATQSQITPPGTPSSALSSGEQRAALNATNAVKRLQTRLQPEESTETLDSSYVVGHVLNSRKQKQLLNKVKRKPNLHALSKPKKNISSGSTTSADLPNRTNSNLDVLKHMIHEVEHEMEEYERWTGREVKGLQSSQGLTGFTLSLVSSLCRLVRYLKESEIQLRKEVETRQQLEQVLGDHRELIDALTAEILRLREENAATQARLQQYMVTTDEQLISLTHAIKNCPVINNRQEIQASESGATGRRVMDSPERPVVNANVSVPLMFREEVAEFPQEELPVKLSQVPDPPDNMNLAKNFPAHIFEPAVLLTPPRQKSNLKFSPLQDVLRRTVQTRPAPRLPPTVEIIEKEQNWEEKTLPIDTDIQNSSEENRLFTQRWRVSHMGEDLENKTQAPFVNLSQPLCNSHSNTQQSRSPTFSEELPVLGDGQQLRTNESLIQRKDIMTRIADLTLQNSAIKAHMNNIIEPRGEQGDGLRELNKQESASDMTSTFPVAQSLTPGSMEERIAELNRQSMEARGKLLQLIEQQKLVGLNLSPPMSPVQLPLRAWTEGAKRTIEVSIPGAEAPESSKCSTVSPVSGINTRRSSGATGNSCSPLNATSGSGRFTPLNPRAKIEKQNEEGWFALSTHVS

SEQ ID NO: 3153 - protein, 261 aa, Homo sapiens
MEGGLGRAVCLLTGASRGFGRTLAPLLASLLSPGSVLVLSARNDEALRQLEAELGAERSGLRVVRVPADLGAEAGLQQLLGALRELPRPKGLQRLLLINNAGSLGDVSKGFVDLSDSTQVNNYWALNLTSMLCLTSSVLKAFPDSPGLNRTVVNISSLCALQPFKGWALYCAGKAARDMLFQVLALEEPNVRVLNYAPGPLDTDMQQLARETSVDPDMRKGLQELKAKGKLVDCKVSAQKLLSLLEKDEFKSGAHVDFYDK

SEQ ID NO: 3154 - protein, 503 aa, Homo sapiens
MSEARGEPGSGPEAGARFFCTAGRGLEPFVMREVRARLAATQVEYISGKVFFTTCSDLNMLKKLKSAERLFLLIKKQFPLIISSVSKGKIFNEMQRLINEDPGSWLNAISIWKNLLELDAKKEKLSQRDDNQLKRKVGENEIIAKKLKIEQMQKIEENRDCQLEKQIKEETLEQRDFTTKSEKFQEEEFQNDIEKAIDTHNQNDLTFRVSCRCSGTIGKAFTAQEVGKVIGIAIMKHFGWKADLRNPQLEIFIHLNDIYSVVGIPVFRVSLASRAYIKTAGLRSTIAWAMASLADIKAGAFVLDPMCGLGTILLEAAKEWPDVYYVGADVSDSQLLGTWDNLKAAGLEDKIELLKISVIELPLPSESVDIIISDIPFGKKFKLGKDIKSILQEMERVLHVGGTIVLLLSEDHHRRLTDCKESNIPFNSKDSHTDEPGIKKCLNPEEKTGAFKTASTSFEASNHKFLDRMSPFGSLVPVECYKVSLGKTDAFICKYKKSHSSGL

SEQ ID NO: 3155 - protein, 303 aa, Homo sapiens
MSEARGEPGSGPEAGARFFCTAGRGLEPFVMREVRARLAATQVEYISGKVFFTTCSDLNMLKKLKSAERLFLLIKKQFPLIISSVSKGKIFNEMQRLINEDPGSWLNAISIWKNLLELDAKKEKLSQRDDNQLKRKVGENEIIAKKLKIEQMQKIEENRDCQLEKQIKEETLEQRDFTTKSEKFQEEEFQNDIEKAIDTHNQNDLTFRVSCRCSGTIGKAFTAQEVGKVIGIAIMKHFGWKADLRNPQLEIFIHLNDIYSVVGIPVFRVSLASRAYIKTAGLRSTIAWAMASLADIKVPYGSD

SEQ ID NO: 3156 - protein, 1165 aa, Homo sapiens
MPNSVLWAVDLFGRVYTLSTAGQYWEMCKDSQLEFKRVSATTQCCWGIACDNQVYVYVCASDVPIRRREEAYENQRWNPMGGFCEKLLLSDRWGWSDVSGLQHRPLDRVALPSPHWEWESDWYVDENFGGEPTEKGGWTYAIDFPATYTKDKKWNSCVRRRKWIRYRRYKSRDIWAKIPSKDDPKELPDPFNDLSVGGWEITEEPVGRLSVWAVSLQGKVWYREDVSHSNPEGSSWSLLDTPGEVVQISCGPHDLLWATLWEGQALVREGINRSNPKGSSWSIVEPPGSENGVMHISVGVSVVWAVTKDWKVWFRRGVNSHNPCGTSWIEMVGEMTMVNVGMNDQVWGIGCEDRAVYFRQGVTPSELSGKTWKAIIAARECDRSHSGSSSSLLSAGCFFGDEVRGSGESAPSDTDASSEVERPGPGQILPAEPLDDSKNATGNSASGLGAGRTAEDTVEDACPAEGSREARPNTHPGPAPTPAELPWTNIDLKEAKKVPSHSAAGFPETTSLSSLGLLPLGLEEPYGVDDHPLWAWVSGGGCVVEACAMPRWFTVQAGLSSSVHMLSLSITPAQTAAWRKQIFQQLTERTKRELENFRHYEQAVEQSVWVKTGALQWWCDWKPHKWVDVRLALEQFTGHDGVRDSILFIYYVVHEEKKYIHIFLNEVVALVPVLNETKHSFALYTPERTRQRWPVRLAAATEQDMNDWLALLSLSCCESRKVQGRPSPQAIWSITCKGDIFVSEPSPDLEAHEHPLPCDQMFWRQMGGHLRMVEANSRGVVWGIGYDHTAWVYTGGYGGGCFQGLASSTSNIYTQSDVKCVHIYENQRWNPVTGYTSRGLPTDRYMWSDASGLQECTKAGTKPPSLQWAWVSDWFVDFSVPGGTDQEGWQYASDFPASYHGSKTMKDFVRRRCWARKCKLVTSGPWLEVPPIALRDVSIIPESPGAEGSGHSIALWAVSDKGDVLCRLGVSELNPAGSSWLHVGTDQPFASISIGACYQVWAVARDGSAFYRGSVYPSQPAGDCWYHIPSPPRQRLKQVSAGQTSVYALDENGNLWYRQGITPSYPQGSSWEHVSNNVCRVSVGPLDQVWVIANKVQGSHSLSRGTVCHRTGVQPHEPKGHGWDYGIGGGWDHISVRANATRAPRSSSQEQEPSAPPEAHGPVCC

SEQ ID NO: 3157 - protein, 1166 aa, Homo sapiens
MPNSVLWAVDLFGRVYTLSTAGQYWEMCKDSQLEFKRVSATTQCCWGIACDNQVYVYVCASDVPIRRREEAYENQRWNPMGGFCEKLLLSDRWGWSDVSGLQHRPLDRVALPSPHWEWESDWYVDENFGGEPTEKGGWTYAIDFPATYTKDKKWNSCVRRRKWIRYRRYKSRDIWAKIPSKDDPKELPDPFNDLSVGGWEITEEPVGRLSVWAVSLQGKVWYREDVSHSNPEGSSWSLLDTPGEVVQISCGPHDLLWATLWEGQALVREGINRSNPKGSSWSIVEPPGSENGVMHISVGVSVVWAVTKDWKVWFRRGVNSHNPCGTSWIEMVGEMTMVNVGMNDQVWGIGCEDRAVYFRQGVTPSELSGKTWKAIIAARECDRSHSGSSSSLLSAGCFFGDEVRGSGESAPSDTDASSEVERPGPGQILPAEPLDDSKNATGNSASGLGAGRTAEDTVEDACPAEGSREARPNTHPGPAPTPAELPWTNIDLKEAKKVPSHSAAGFPETTSLSSLGLLPLGLEEPYGVDDHPLWAWVSGGGCVVEACAMPRWFTVQAGGLSSSVHMLSLSITPAQTAAWRKQIFQQLTERTKRELENFRHYEQAVEQSVWVKTGALQWWCDWKPHKWVDVRLALEQFTGHDGVRDSILFIYYVVHEEKKYIHIFLNEVVALVPVLNETKHSFALYTPERTRQRWPVRLAAATEQDMNDWLALLSLSCCESRKVQGRPSPQAIWSITCKGDIFVSEPSPDLEAHEHPLPCDQMFWRQMGGHLRMVEANSRGVVWGIGYDHTAWVYTGGYGGGCFQGLASSTSNIYTQSDVKCVHIYENQRWNPVTGYTSRGLPTDRYMWSDASGLQECTKAGTKPPSLQWAWVSDWFVDFSVPGGTDQEGWQYASDFPASYHGSKTMKDFVRRRCWARKCKLVTSGPWLEVPPIALRDVSIIPESPGAEGSGHSIALWAVSDKGDVLCRLGVSELNPAGSSWLHVGTDQPFASISIGACYQVWAVARDGSAFYRGSVYPSQPAGDCWYHIPSPPRQRLKQVSAGQTSVYALDENGNLWYRQGITPSYPQGSSWEHVSNNVCRVSVGPLDQVWVIANKVQGSHSLSRGTVCHRTGVQPHEPKGHGWDYGIGGGWDHISVRANATRAPRSSSQEQEPSAPPEAHGPVCC

SEQ ID NO: 3158 - protein, 776 aa, Homo sapiens
MGGFCEKLLLSDRWGWSDVSGLQHRPLDRVALPSPHWEWESDWYVDENFGGEPTEKGGWTYAIDFPATYTKDKKWNSCVRRRKWIRYRRYKSRDIWAKIPSKDDPKELPDPFNDLSVGGWEITEEPVGRLSVWAVSLQGKVLCPCLASQVWYREDVSHSNPEGSSWSLLDTPGEVVQISCGPHDLLWATLWEGQALVREGINRSNPKGSSWSIVEPPGSENGVMHISVGVSVVWAVTKDWKVWFRRGVNSHNPCGTSWIEMVGEMTMVNVGMNDQVWGIGCEDRAVYFRQGVTPSELSGKTWKAIIAARECDRSHSGSSSSLLSAGCFFGDEVRGSGESAPSDTDASSEVERPGPGQILPAEPLDDSKNATGNSASGLGAGRTAEDTVEDACPAEGSREARPNTHPGPAPTPAELPWTNIDLKEAKKVPSHSAAGFPETTSLSSLGLLPLGLEEPYGVDDHPLWAWVSGGGCVVEACAMPRWFTVQAGLSSSVHMLSLSITPAQTAAWRKQIFQQLTERTKRELENFRHYEQAVEQSVWVKTGALQWWCDWKPHKWVDVRLALEQFTGHDGVRDSILFIYYVVHEEKKYIHIFLNEVVALVPVLNETKHSFALYTPERTRQRWPVRLAAATEQDMNDWLALLSLSCCESRKVQGRPSPQAIWSITCKGDIFVSEPSPDLEAHEHPLPCDQMFWRQMGGHLRMVEANSRGVVWGIGYDHTAWVYTGGYGGGCFQGLASSTSNIYTQSDVKCVHIYENQRWNPVTGYTSSRDRISPCW

SEQ ID NO: 3159 - protein, 1167 aa, Homo sapiens
MPNSVLWAVDLFGRVYTLSTAGQYWEMCKDSQLEFKRVSATTQCCWGIACDNQVYVYVCASDVPIRRREEAYENQRWNPMGGFCEKLLLSDRWGWSDVSGLQHRPLDRVALPSPHWEWESDWYVDENFGGEPTEKGGWTYAIDFPATYTKDKKWNSCVRRRKWIRYRRYKSRDIWAKIPSKDDPKELPDPFNDLSVGGWEITEEPVGRLSVWAVSLQGKVWYREDVSHSNPEGSSWSLLDTPGEVVQISCGPHDLLWATLWEGQALVREGINRSNPKGSSWSIVEPPGSENGVMHISVGVSVVWAVTKDWKVWFRRGVNSHNPCGTSWIEMVGEMTMVNVGMNDQVWGIGCEDRAVYFRQGVTPSELSGKTWKAIIAARECDRSHSGSSSSLLSAGCFFGDEVRGSGESAPSDTDASSEVERPGPGQILPAEPLDDSKNATGNSASGLGAGRTAEDTVEDACPAEGSREARPNTHPGPAPTPAELPWTNIDLKEAKKVPSHSAAGFPETTSLSSLGLLPLGLEEPYGVDDHPLWAWVSGGGCVVEACAMPRWFTVQAAGLSSSVHMLSLSITPAQTAAWRKQIFQQLTERTKRELENFRHYEQAVEQSVWVKTGALQWWCDWKPHKWVDVRLALEQFTGHDGVRDSILFIYYVVHEEKKYIHIFLNEVVALVPVLNETKHSFALYTPERTRQRWPVRLAAATEQDMNDWLALLSLSCCESRKVQGRPSPQAIWSITCKGDIFVSEPSPDLEAHEHPLPCDQMFWRQMGGHLRMVEANSRGVVWGIGYDHTAWVYTGGYGGGCFQGLASSTSNIYTQSDVKCVHIYENQRWNPVTGYTSSRGLPTDRYMWSDASGLQECTKAGTKPPSLQWAWVSDWFVDFSVPGGTDQEGWQYASDFPASYHGSKTMKDFVRRRCWARKCKLVTSGPWLEVPPIALRDVSIIPESPGAEGSGHSIALWAVSDKGDVLCRLGVSELNPAGSSWLHVGTDQPFASISIGACYQVWAVARDGSAFYRGSVYPSQPAGDCWYHIPSPPRQRLKQVSAGQTSVYALDENGNLWYRQGITPSYPQGSSWEHVSNNVCRVSVGPLDQVWVIANKVQGSHSLSRGTVCHRTGVQPHEPKGHGWDYGIGGGWDHISVRANATRAPRSSSQEQEPSAPPEAHGPVCC

SEQ ID NO: 3160 - protein, 471 aa, Homo sapiens
MELSSKKKLHALSLAEKIQVLELLDESKMSQSEVARRFQVSQPQISRICKNKEKLLADWCSGTANRERKRKRESKYSGIDEALLCWYHIARAKAWDVTGPMLLHKAKELADIMGQDFVPSIGWLVRWKRRNNVGFGARHVLAPSFPPEPPPPGLTSQAQLPLSLKDFSPEDVFGCAELPLLYRAVPGSFGACDQVQVLLCANSRGTEKRRVLLGGLQAAPRCFFGIRSEALPASYHPDLGIPWLEWLAQFDRDMGQQGRQVALLLAARVVEELAGLPGLYHVKLLPLAASSTTPPLPSSVVRAFKAHYRHRLLGKLAAIQSERDGTSLAEAGAGITVLDALHVASAAWAKVPPQLIFSSFIQEGLAPGKTPPSSHKTSEMPPVPGGLSLEEFSRFVDLEGEEPRSGVCKEEIGTEDEKGDREGAFEPLPTKADALRALGTLRRWFECNSTSPELFEKFYDCEEEVERLCCL

SEQ ID NO: 3161 - protein, 289 aa, Homo sapiens
MEQPGPRAPDPSLCHHNLQPTDDPNWDSYATTMRTAFTPKTGAVPALIRQNGIRRLGYTYSLSDPILNQTQYSDEYTWKSHSKEDLIKTETSRGIKSHKSHLNEDIFLWTLPHCQQTGTLKNCLPWKIPASMKEVNKALSNQFISLTKRDFVDRSKAQKIKKSSHLSLEWKKLLPQPPDTEFRRNYQIPAKIPELQDFSFKYGCYSSLPVASQGLVPSVLHSYLRNQEHTKKQTTYQSDYDKTYPDFLMLLNSFTSSQVKEYLQSLSYKDRQIIDRFIRTHCDTNKKKK

SEQ ID NO: 3162 - protein, 591 aa, Homo sapiens
MASKCSSERKSRTSLTLNQKLEMIKLSEEGMSKAEIGRRLGLLRQTVSQVVNAKEKFLKEVKSATPMNTRMIRKRNSLIADMEKVLVVWIEDQTSRNIPLSQSLIQNKALTLFNSMKAERGVEAAEEKFEASRGWFMRFKERSHFHNIKAQGEAASADVEAAASYPEALAKIIDEGGYTKQQIFNVDETAFYWKKMPSRTFIAREEKSVPGFKASKDRLTLLLGANAAGDFKLKPMLIYHSENPRALKNYTKSTLPVLYKWNSKARMTAHLFTAWFTEYFKPTVETYCSEKKIPFKILLLIDNAPSHPRALMEIYEEINVIFMPANTTSILQPMDQGVISTFKSYYLRNTFHKALAAMDSDVSDGSGQSKLKTFWKGFTILDAIKNIRDSWEEVKLSTLTGVWKKLIPTLIDDYEGFKTSVEEVSADVVEIAKELELEVEPEDVTELLQSHDKTLTDEELFLMDAQRKWFLEMESTPGEDAVNIVEMTTKDLEYYINLVDKAAAGFERIDSNFERSSTVGKMLSNSIACYREIFHERKSQLMRKASPMSYFRKLPQPPQPSAATTLTSQQPSTSRQDPPPAKRVRLTEGSD

SEQ ID NO: 3163 - protein, 270 aa, Homo sapiens
MARFALTVVRHGETRFNKEKIIQGQGVDEPLSETGFKQAAAAGIFLNNVKFTHAFSSDLMRTKQTMHGILERSKFCKDMTVKYDSRLRERKYGVVEGKALSELRAMAKAAREECPVFTPPGGETLDQVKMRGIDFFEFLCQLILKEADQKEQFSQGSPSNCLETSLAEIFPLGKNHSSKVNSDSGIPGLAASVLVVSHGAYMRSLFDYFLTDLKCSLPATLSRSELMSVTPNTGMSLFIINFEEGREVKPTVQCICMNLQDHLNGLTETR

SEQ ID NO: 3164 - protein, 548 aa, Homo sapiens
MATSSEEVLLIVKKVRQKKQDGALYLMAERIAWAPEGKDRFTISHMYADIKCQKISPEGKAKIQLQLVLHAGDTTNFHFSNESTAVKERDAVKDLLQQLLPKFKRKANKELEEKNRMLQEDPVLFQLYKDLVVSQVISAEEFWANRLNVNATDSSSTSNHKQDVGISAAFLADVRPQTDGCNGLRYNLTSDIIESIFRTYPAVKMKYAENVPHNMTEKEFWTRFFQSHYFHRDRLNTGSKDLFAECAKIDEKGLKTMVSLGVKNPLLDLTALEDKPLDEGYGISSVPSASNSKSIKENSNAAIIKRFNHHSAMVLAAGLRKQEAQNEQTSEPSNMDGNSGDADCFQPAVKRAKLQESIEYEDLGKNNSVKTIALNLKKSDRYYHGPTPIQSLQYATSQDIINSFQSIRQEMEAYTPKLTQVLSSSAASSTITALSPGGALMQGGTQQAINQMVPNDIQSELKHLYVAVGELLRHFWSCFPVNTPFLEEKVVKMKSNLERFQVTKLCPFQEKIRRQYLSTNLVSHIEEMLQTAYNKLHTWQSRRLMKKT

SEQ ID NO: 3165 - protein, 432 aa, Homo sapiens
MLQEDPVLFQLYKDLVVSQVISAEEFWANRLNVNATDSSSTSNHKQDVGISAAFLADVRPQTDGCNGLRYNLTSDIIESIFRTYPAVKMKYAENVPHNMTEKEFWTRFFQSHYFHRDRLNTGSKDLFAECAKIDEKGLKTMVSLGVKNPLLDLTALEDKPLDEGYGISSVPSASNSKSIKENSNAAIIKRFNHHSAMVLAAGLRKQEAQNEQTSEPSNMDGNSGDADCFQPAVKRAKLQESIEYEDLGKNNSVKTIALNLKKSDRYYHGPTPIQSLQYATSQDIINSFQSIRQEMEAYTPKLTQVLSSSAASSTITALSPGGALMQGGTQQAINQMVPNDIQSELKHLYVAVGELLRHFWSCFPVNTPFLEEKVVKMKSNLERFQVTKLCPFQEKIRRQYLSTNLVSHIEEMLQTAYNKLHTWQSRRLMKKT

SEQ ID NO: 3166 - protein, 305 aa, Homo sapiens
MASNRQRSLRGPSHPSHMEEPFLQMVQASESLPPSQTWAQREFFLPSESWEFPGFTRQAYHQLALKLPPCTDMKSKVRQRLIHPWKGGAQHTWGFHTWLDVCRLPATFPTQPDRPYDSNVWRWLTDSNAHRCPPTEHPIPPPSWMGQNSFLTFIHCYPTFVDMKRKKQVIFRTVKELKEVEKLKLRSEARAPPLDAQGNIQPPASFKKYRHISAGGRFEPQGLQLMPNPFPNNFARSWPCPNPLPHYQEKVLKLALLPSAPLSQDLIRDFQTLIKDRTALPLHHLSKAQASKSPARKRKRRPGHF

SEQ ID NO: 3167 - protein, 426 aa, Homo sapiens
MEPSSWSGSESPAENMERMSDSADKPIDNDAEGVWSPDIEQSFQEALAIYPPCGRRKIILSDEGKMYGRNELIARYIKLRTGKTRTRKQVSSHIQVLARRKSRDFHSKLKDQTAKDKALQHMAAMSSAQIVSATAIHNKLGLPGIPRPTFPGAPGFWPGMIQTGQPGSSQDVKPFVQQAYPIQPAVTAPIPGFEPASAPAPSVPAWQGRSIGTTKLRLVEFSAFLEQQRDPDSYNKHLFVHIGHANHSYSDPLLESVDIRQIYDKFPEKKGGLKELFGKGPQNAFFLVKFWADLNCNIQDDAGAFYGVTSQYESSENMTVTCSTKVCSFGKQVVEKVETEYARFENGRFVYRINRSPMCEYMINFIHKLKHLPEKYMMNSVLENFTILLVVTNRDTQETLLCMACVFEVSNSEHGAQHHIYRLVKD

SEQ ID NO: 3168 - protein, 357 aa, Homo sapiens
MERMSDSADKPIDNDAEGVWSPDIEQSFQEALAIYPPCGRRKIILSDEGKMYGRNELIARYIKLRTGKTRTRKQVSSHIQVLARRKSRDFHSKLKVTSMDQTAKDKALQHMAAMSSAQIVSATAIHNKLGLPGIPRPTFPGAPGFWPGMIQTGQPGSSQDVKPFVQQAYPIQPAVTAPIPGFEPASAPAPSVPAWQGRSIGTTKLRLVEFSAFLEQQRDPDSADLNCNIQDDAGAFYGVTSQYESSENMTVTCSTKVCSFGKQVVEKVETEYARFENGRFVYRINRSPMCEYMINFIHKLKHLPEKYMMNSVLENFTILLVVTNRDTQETLLCMACVFEVSNSEHGAQHHIYRLVKD

SEQ ID NO: 3169 - protein, 414 aa, Homo sapiens
MHYCVLSAFLILHLVTVALSLSTCSTLDMDQFMRKRIEAIRGQILSKLKLTSPPEDYPEPEEVPPEVISIYNSTRDLLQEKASRRAAACERERSDEEYYAKEVYKIDMPPFFPSENAIPPTFYRPYFRIVRFDVSAMEKNASNLVKAEFRVFRLQNPKARVPEQRIELYQILKSKDLTSPTQRYIDSKVVKTRAEGEWLSFDVTDAVHEWLHHKDRNLGFKISLHCPCCTFVPSNNYIIPNKSEELEARFAGIDGTSTYTSGDQKTIKSTRKKNSGKTPHLLLMLLPSYRLESQQTNRRKKRALDAAYCFRNVQDNCCLRPLYIDFKRDLGWKWIHEPKGYNANFCAGACPYLWSSDTQHSRVLSLYNTINPEASASPCCVSQDLEPLTILYYIGKTPKIEQLSNMIVKSCKCS

SEQ ID NO: 3170 - protein, 442 aa, Homo sapiens
MHYCVLSAFLILHLVTVALSLSTCSTLDMDQFMRKRIEAIRGQILSKLKLTSPPEDYPEPEEVPPEVISIYNSTRDLLQEKASRRAAACERERSDEEYYAKEVYKIDMPPFFPSETVCPVVTTPSGSVGSLCSRQSQVLCGYLDAIPPTFYRPYFRIVRFDVSAMEKNASNLVKAEFRVFRLQNPKARVPEQRIELYQILKSKDLTSPTQRYIDSKVVKTRAEGEWLSFDVTDAVHEWLHHKDRNLGFKISLHCPCCTFVPSNNYIIPNKSEELEARFAGIDGTSTYTSGDQKTIKSTRKKNSGKTPHLLLMLLPSYRLESQQTNRRKKRALDAAYCFRNVQDNCCLRPLYIDFKRDLGWKWIHEPKGYNANFCAGACPYLWSSDTQHSRVLSLYNTINPEASASPCCVSQDLEPLTILYYIGKTPKIEQLSNMIVKSCKCS

SEQ ID NO: 3171 - protein, 451 aa, Homo sapiens
MPREIITLQLGQCGNQIGFEFWKQLCAEHGISPEGIVEEFATEGTDRKDVFFYQADDEHYIPRAVLLDLEPRVIHSILNSPYAKLYNPENIYLSEHGGGAGNNWASGFSQGEKIHEDIFDIIDREADGSDSLEGFVLCHSIAGGTGSGLGSYLLERLNDRYPKKLVQTYSVFPYQDEMSDVVVQPYNSLLTLKRLTQNADCVVVLDNTALNRIATDRLHIQNPSFSQINQLVSTIMSASTTTLRYPGYMNNDLIGLIASLIPTPRLHFLMTGYTPLTTDQSVASVRKTTVLDVMRRLLQPKNVMVSTGRDRQTNHCYIAILNIIQGEVDPTQVHKSLQRIRERKLANFIPWGPASIQVALSRKSPYLPSAHRVSGLMMANHTSISSLFESSCQQFDKLRKRDAFLEQFRKEDMFKDNFDEMDRSREVVQELIDEYHAATQPDYISWGTQEQ

SEQ ID NO: 3172 - protein, 481 aa, Homo sapiens
MASAASVTSLADEVNCPICQGTLREPVTIDCGHNFCRACLTRYCEIPGPDLEESPTCPLCKEPFRPGSFRPNWQLANVVENIERLQLVSTLGLGEEDVCQEHGEKIYFFCEDDEMQLCVVCREAGEHATHTMRFLEDAAAPYREQIHKCLKCLRKEREEIQEIQSRENKRMQVLLTQVSTKRQQVISEFAHLRKFLEEQQSILLAQLESQDGDILRQRDEFDLLVAGEICRFSALIEELEEKNERPARELLTDIRSTLIRCETRKCRKPVAVSPELGQRIRDFPQQALPLQREMKMFLEKLCFELDYEPAHISLDPQTSHPKLLLSEDHQRAQFSYKWQNSPDNPQRFDRATCVLAHTGITGGRHTWVVSIDLAHGGSCTVGVVSEDVQRKGELRLRPEEGVWAVRLAWGFVSALGSFPTRLTLKEQPRQVRVSLDYEVGWVTFTNAVTREPIYTFTASFTRKVIPFFGLWGRGSSFSLSS

SEQ ID NO: 3173 - protein, 395 aa, Homo sapiens
MASAASVTSLADEVNCPICQGTLREPVTIDCGHNFCRACLTRYCEIPGPDLEESPTCPLCKEPFRPGSFRPNWQLANVVENIERLQLVSTLGLGEEDVCQEHGEKIYFFCEDDEMQLCVVCREAGEHATHTMRFLEDAAAPYREQIHKCLKCLRKEREEIQEIQSRENKRMQVLLTQVSTKRQQVISEFAHLRKFLEEQQSILLAQLESQDGDILRQRDEFDLLVAGEICRFSALIEELEEKNERPARELLTDIRSTLIRCETRKCRKPVAVSPELGQRIRDFPQQALPLQREMKMFLEKLCFELDYEPAHISLDPQTSHPKLLLSEDHQRAQFSYKWQNSPDNPQRFDRATCVLAHTGITGGRHTWVWMARVPGDSGCCQFCSPPSVLGTEVAA

SEQ ID NO: 3174 - protein, 113 aa, Homo sapiens
MILTVGFSFLFFYRGTLCDKVTQSSPDQTVASGSEVVLLCTYDTVYSNPDLFWYRIRPDYSFQFVFYGDNSRSEGADFTQGRFSVKHILTQKAFHLVISPVRTEDSATYYCAF

SEQ ID NO: 3175 - protein, 1148 aa, Homo sapiens
MSVPDYMQCAEDHQTLLVVVQPVGIVSEENFFRIYKRICSVSQISVRDSQRVLYIRYRHHYPPENNEWGDFQTHRKVVGLITITDCFSAKDWPQTFEKFHVQKEIYGSTLYDSRLFVFGLQGEIVEQPRTDVAFYPNYEDCQTVEKRIEDFIESLFIVLESKRLDRATDKSGDKIPLLCVPFEKKDFVGLDTDSRHYKKRCQGRMRKHVGDLCLQAGMLQDSLVHYHMSVELLRSVNDFLWLGAALEGLCSASVIYHYPGGTGGKSGARRFQGSTLPAEAANRHRPGAQEVLIDPGALTTNGINPDTSTEIGRAKNCLSPEDIIDKYKEAISYYSKYKNAGVIELEACIKAVRVLAIQKRSMEASEFLQNAVYINLRQLSEEEKIQRYSILSELYELIGFHRKSAFFKRVAAMQCVAPSIAEPGWRACYKLLLETLPGYSLSLDPKDFSRGTHRGWAAVQMRLLHELVYASRRMGNPALSVRHLSFLLQTMLDFLSDQEKKDVAQSLENYTSKCPGTMEPIALPGGLTLPPVPFTKLPIVRHVKLLNLPASLRPHKMKSLLGQNVSTKSPFIYSPIIAHNRGEERNKKIDFQWVQGDVCEVQLMVYNPMPFELRVENMGLLTSGVEFESLPAALSLPAESGLYPVTLVGVPQTTGTITVNGYHTTVFGVFSDCLLDNLPGIKTSGSTVEVIPALPRLQISTSLPRSAHSLQPSSGDEISTNVSVQLYNGESQQLIIKLENIGMEPLEKLEVTSKVLTTKEKLYGDFLSWKLEETLAQFPLQPGKVATFTINIKVKLDFSCQENLLQDLSDDGISVSGFPLSSPFRQVVRPRVEGKPVNPPESNKAGDYSHVKTLEAVLNFKYSGGPGHTEGYYRNLSLGLHVEVEPSVFFTRVSTLPATSTRQCHLLLDVFNSTEHELTVSTRSSEALILHAGECQRMAIQVDKFNFESFPESPGEKGQFANPKQLEEERREARGLEIHSKLGICWRIPSLKRSGEASVEGLLNQLVLEHLQLAPLQWDVLVDGQPCDREAVAACQVGDPVRLEVRLTNRSPRSVGPFALTVVPFQDHQNGVHNYDLHDTVSFVGSSTFYLDAVQPSGQSACLGALLFLYTGDFFLHIRFHEDSTSKELPPSWFCLPSVHVCALEAQA

SEQ ID NO: 3176 - protein, 1246 aa, Homo sapiens
MVPAGDQDRAPHRGKPAQAGARTSRASRALRSWRRSQAARATVTHPRGGHDRGSHGGYREGHRGCRRDPQWASAGPPPLSFTEEVKFELRALKDWDFKMSVPDYMQCAEDHQTLLVVVQPVGIVSEENFFRIYKRICSVSQISVRDSQRVLYIRYRHHYPPENNEWGDFQTHRKVVGLITITDCFSAKDWPQTFEKFHVQKEIYGSTLYDSRLFVFGLQGEIVEQPRTDVAFYPNYEDCQTVEKRIEDFIESLFIVLESKRLDRATDKSGDKIPLLCVPFEKKDFVGLDTDSRHYKKRCQGRMRKHVGDLCLQAGMLQDSLVHYHMSVELLRSVNDFLWLGAALEGLCSASVIYHYPGGTGGKSGARRFQGSTLPAEAANRHRPGAQEVLIDPGALTTNGINPDTSTEIGRAKNCLSPEDIIDKYKEAISYYSKYKNAGVIELEACIKAVRVLAIQKRSMEASEFLQNAVYINLRQLSEEEKIQRYSILSELYELIGFHRKSAFFKRVAAMQCVAPSIAEPGWRACYKLLLETLPGYSLSLDPKDFSRGTHRGWAAVQMRLLHELVYASRRMGNPALSVRHLSFLLQTMLDFLSDQEKKDVAQSLENYTSKCPGTMEPIALPGGLTLPPVPFTKLPIVRHVKLLNLPASLRPHKMKSLLGQNVSTKSPFIYSPIIAHNRGEERNKKIDFQWVQGDVCEVQLMVYNPMPFELRVENMGLLTSGVEFESLPAALSLPAESGLYPVTLVGVPQTTGTITVNGYHTTVFGVFSDCLLDNLPGIKTSGSTVEVIPALPRLQISTSLPRSAHSLQPSSGDEISTNVSVQLYNGESQQLIIKLENIGMEPLEKLEVTSKVLTTKEKLYGDFLSWKLEETLAQFPLQPGKVATFTINIKVKLDFSCQENLLQDLSDDGISVSGFPLSSPFRQVVRPRVEGKPVNPPESNKAGDYSHVKTLEAVLNFKYSGGPGHTEGYYRNLSLGLHVEVEPSVFFTRVSTLPATSTRQCHLLLDVFNSTEHELTVSTRSSEALILHAGECQRMAIQVDKFNFESFPESPGEKGQFANPKQLEEERREARGLEIHSKLGICWRIPSLKRSGEASVEGLLNQLVLEHLQLAPLQWDVLVDGQPCDREAVAACQVGDPVRLEVRLTNRSPRSVGPFALTVVPFQDHQNGVHNYDLHDTVSFVGSSTFYLDAVQPSGQSACLGALLFLYTGDFFLHIRFHEDSTSKELPPSWFCLPSVHVCALEAQA

SEQ ID NO: 3177 - protein, 1139 aa, Homo sapiens
MSVPDYMQCAEDHQTLLVVVQPVGIVSEENFFRIYKRICSVSQISVRDSQRVLYIRYRHHYPPENNEWGDFQTHRKVVGLITITDCFSAKDWPQTFEKFHVQKEIYGSTLYDSRLFVFGLQGEIVEQPRTDVAFYPNYEDCQTVEKRIEDFIESLFIVLESKRLDRATDKSGDKIPLLCVPFEKKDFVGLDTDSRHYKKRCQGRMRKHVGDLCLQAGMLQDSLVHYHMSVELLRSVNDFLWLGAALEGLCSASVIYHYPGGTGGKSGARRFQGSTLPAEAANRHRPGALTTNGINPDTSTEIGRAKNCLSPEDIIDKYKEAISYYSKYKNAGVIELEACIKAVRVLAIQKRSMEASEFLQNAVYINLRQLSEEEKIQRYSILSELYELIGFHRKSAFFKRVAAMQCVAPSIAEPGWRACYKLLLETLPGYSLSLDPKDFSRGTHRGWAAVQMRLLHELVYASRRMGNPALSVRHLSFLLQTMLDFLSDQEKKDVAQSLENYTSKCPGTMEPIALPGGLTLPPVPFTKLPIVRHVKLLNLPASLRPHKMKSLLGQNVSTKSPFIYSPIIAHNRGEERNKKIDFQWVQGDVCEVQLMVYNPMPFELRVENMGLLTSGVEFESLPAALSLPAESGLYPVTLVGVPQTTGTITVNGYHTTVFGVFSDCLLDNLPGIKTSGSTVEVIPALPRLQISTSLPRSAHSLQPSSGDEISTNVSVQLYNGESQQLIIKLENIGMEPLEKLEVTSKVLTTKEKLYGDFLSWKLEETLAQFPLQPGKVATFTINIKVKLDFSCQENLLQDLSDDGISVSGFPLSSPFRQVVRPRVEGKPVNPPESNKAGDYSHVKTLEAVLNFKYSGGPGHTEGYYRNLSLGLHVEVEPSVFFTRVSTLPATSTRQCHLLLDVFNSTEHELTVSTRSSEALILHAGECQRMAIQVDKFNFESFPESPGEKGQFANPKQLEEERREARGLEIHSKLGICWRIPSLKRSGEASVEGLLNQLVLEHLQLAPLQWDVLVDGQPCDREAVAACQVGDPVRLEVRLTNRSPRSVGPFALTVVPFQDHQNGVHNYDLHDTVSFVGSSTFYLDAVQPSGQSACLGALLFLYTGDFFLHIRFHEDSTSKELPPSWFCLPSVHVCALEAQA

SEQ ID NO: 3178 - protein, 238 aa, Homo sapiens
MARACLQAVKYLMFAFNLLFWLGGCGVLGVGIWLAATQGSFATLSSSFPSLSAANLLIITGAFVMAIGFVGCLGAIKENKCLLLTFFLLLLLVFLLEATIAILFFAYTDKIDRYAQQDLKKGLHLYGTQGNVGLTNAWSIIQTDFRCCGVSNYTDWFEVYNATRVPDSCCLEFSESCGLHAPGTWWKAPCYETVKVWLQENLLAVGIFGLCTALVQILGLTFAMTMYCQVVKADTYCA

SEQ ID NO: 3179 - protein, 159 aa, Homo sapiens
MFPFALLYVLSVSFRKIFILQLVGLVLTYDFTNCDFEKIKAAYLSTISKDLITYMSGTKSTEFNNTVSCSNRPHCLTEIQSLTFNPTAGCASLAKEMFAMKTKAALAIWCPGYSETQINATQAMKKRRKRKVTTNKCLEQVSQLQGLWRRFNRPLLKQQ

SEQ ID NO: 3180 - protein, 63 aa, Homo sapiens
MFAMKTKAALAIWCPGYSETQINATQAMKKRRKRKVTTNKCLEQVSQLQGLWRRFNRPLLKQQ

SEQ ID NO: 3181 - protein, 582 aa, Homo sapiens
MSSPNPEDVPRRPEPEPSSSNKKKKKRKWLRQEASIQALTRAGHGALQAGQNHEALNNFQRAFLLASKAPQTRDTPVLQACAFNLGAAYVETGDPARGLELLLRAHPEEKAQGRRHGDQCFNVALAYHALGELPQALAWYHRALGHYQPQGDQGEAWAKMGACYQALGQPELAAHCLQEASQAYAQERQLRAAALALGAAAGCMLKSGRHRVGEVVQVLEKSRRLAERSTERRLLGHLYNDLGLGYSQLQLFPLAVEAFLQALPLCWVPGEQATVLRNLGMAHNALGNYQEAREFHQKAADLHGSVGQRWEQGRSFGSLAFALSQLGDHKAARDNYLHALQAARDSGDMKGQWQACEGLGAAAARLGQYDQALKYYKEALAQCQKEPDSVRERLVAKLADTVRTRLAQVGLVQTHTLTSAPGRLQAPGGASQAEGTPAKAGSSTAGVQHRSSSGWEDEEFEEGHQKKKEERSANVPVRAGPGRPELCFLPGTVNHSHHLASSCPTFTKHTPCRGTVLGKASIYSPGPRAHLPFVGPGPPRAEYPSILVPNGPQANRSSRWPRESLSRSRQRRPMESGICTIV

SEQ ID NO: 3182 - protein, 1591 aa, Homo sapiens
MSLLCVRVKRAKFQGSPDKFNTYVTLKVQNVKSTTVAVRGDQPSWEQDFMFEISRLDLGLSVEVWNKGLIWDTMVGTVWIALKTIRQSDEEGPGEWSTLEAETLMKDDEICGTRNPTPHKILLDTRFELPFDIPEEEARYWTYKWEQINALGADNEYSSQEESQRKPLPTAAAQCSFEDPDSAVDDRDSDYRSETSNSFPPPYHTASQPNASVHQFPVPVRSPQQLLLQGSSRDSCNDSMQSYDLDYPERRAISPTSSSRYGSSCNVSQGSSQLSELDQYHEQDDDHRETDSIHSCHSSHSLSRDGQAGFGEQEKPLEVTGQAEKEAACEPKEMKEDATTHPPPDLVLQKDHFLGPQESFPEENASSPFTQARAHWIRAVTKVRLQLQEIPDDGDPSLPQWLPEGPAGGLYGIDSMPDLRRKKPLPLVSDLSLVQSRKAGITSAMATRTSLKDEELKSHVYKKTLQALIYPISCTTPHNFEVWTATTPTYCYECEGLLWGIARQGMRCSECGVKCHEKCQDLLNADCLQRAAEKSCKHGAEDRTQNIIMAMKDRMKIRERNKPEIFEVIRDVFTVNKAAHVQQMKTVKQSVLDGTSKWSAKITITVVCAQGLQAKDKTGSSDPYVTVQVSKTKKRTKTIFGNLNPVWEEKFHFECHNSSDRIKVRVWDEDDDIKSRVKQRLKRESDDFLGQTIIEVRTLSGEMDVWYNLEKRTDKSAVSGAIRLQISVEIKGEEKVAPYHVQYTCLHENLFHYLTDIQGSGGVRIPEARGDDAWKVYFDETAQEIVDEFAMRYGIESIYQAMTHFACLSSKYMCPGVPAVMSTLLANINAYYAHTTASTNVSASDRFAASNFGKERFVKLLDQLHNSLRIDLSTYRNNFPAGSPERLQDLKSTVDLLTSITFFRMKVQELQSPPRASQVVKDCVKACLNSTYEYIFNNCHDLYSRQYQLKQELPPEEQGPSIRNLDFWPKLITLIVSIIEEDKNSYTPVLNQFPQELNVGKVSAEVMWHLFAQDMKYALEEHEKDHLCKSADYMNLHFKVKWLHNEYVRDLPVLQGQVPEYPAWFEQFVLQWLDENEDVSLEFLRGALERDKKDGFQQTSEHALFSCSVVDVFTQLNQSFEIIRKLECPDPSILAHYMRRFAKTIGKVLMQYADILSKDFPAYCTKEKLPCILMNNVQQLRVQLEKMFEAMGGKELDLEAADSLKELQVKLNTVLDELSMVFGNSFQVRIDECVRQMADILGQVRGTGNASPDARASAAQDADSVLRPLMDFLDGNLTLFATVCEKTVLKRVLKELWRVVMNTMERMIVLPPLTDQTGTQLIFTAAKELSHLSKLKDHMVREETRNLTPKQCAVLDLALDTIKQYFHAGGNGLKKTFLEKSPDLQSLRYALSLYTQTTDTLIKTFVRSQTTQGSGVDDPVGEVSIQVDLFTHPGTGEHKVTVKVVAANDLKWQTAGMFRPFVEVTMVGPHQSDKKRKFTTKSKSNNWAPKYNETFHFLLGNEEGPESYELQICVKDYCFAREDRVLGLAVMPLRDVTAKGSCACWCPLGRKIHMDETGLTILRILSQRSNDEVAREFVKLKSESRSTEEGS

SEQ ID NO: 3183 - protein, 1610 aa, Homo sapiens
MSLLCVRVKRAKFQGSPDKFNTYVTLKVQNVKSTTVAVRGDQPSWEQDFMFEISRLDLGLSVEVWNKGLIWDTMVGTVWIALKTIRQSDEEGPGEWSTLEAETLMKDDEICGTRNPTPHKILLDTRFELPFDIPEEEARYWTYKWEQINALGADNEYSSQEESQRKPLPTAAAQCSFEDPDSAVDDRDSDYRSETSNSFPPPYHTASQPNASVHQFPVPVRSPQQLLLQGSSRDSCNDSMQSYDLDYPERRAISPTSSSRYGSSCNVSQGSSQLSELDQYHEQDDDHRETDSIHSCHSSHSLSRDGQAGFGEQEKPLEVTGQAEKEAACEPKEMKEDATTHPPPDLVLQKDHFLGPQESFPEENASSPFTQARAHWIRAVTKVRLQLQEIPDDGDPSLPQWLPEGPAGGLYGIDSMPDLRRKKPLPLVSDLSLVQSRKAGITSAMATRTSLKDEELKSHVYKKTLQALIYPISCTTPHNFEVWTATTPTYCYECEGLLWGIARQGMRCSECGVKCHEKCQDLLNADCLQRAAEKSCKHGAEDRTQNIIMAMKDRMKIRERNKPEIFEVIRDVFTVNKAAHVQQMKTVKQSVLDGTSKWSAKITITVVCAQGLQAKDKTGSSDPYVTVQVSKTKKRTKTIFGNLNPVWEEKFHFECHNSSDRIKVRVWDEDDDIKSRVKQRLKRESDDFLGQTIIEVRTLSGEMDVWYNLEKRTDKSAVSGAIRLQISVEIKGEEKVAPYHVQYTCLHENLFHYLTDIQGSGGVRIPEARGDDAWKVYFDETAQEIVDEFAMRYGIESIYQAMTHFACLSSKYMCPGVPAVMSTLLANINAYYAHTTASTNVSASDRFAASNFGKERFVKLLDQLHNSLRIDLSTYRNNFPAGSPERLQDLKSTVDLLTSITFFRMKVQELQSPPRASQVVKDCVKACLNSTYEYIFNNCHDLYSRQYQLKQELPPEEQGPSIRNLDFWPKLITLIVSIIEEDKNSYTPVLNQFPQELNVGKVSAEVMWHLFAQDMKYALEEHEKDHLCKSADYMNLHFKVKWLHNEYVRDLPVLQGQVPEYPAWFEQFVLQWLDENEDVSLEFLRGALERDKKDGFQQTSEHALFSCSVVDVFTQLNQSFEIIRKLECPDPSILAHYMRRFAKTIGKVLMQYADILSKDFPAYCTKEKLPCILMNNVQQLRVQLEKMFEAMGGKELDLEAADSLKELQVKLNTVLDELSMVFGNSFQVRIDECVRQMADILGQVRGTGNASPDARASAAQDADSVLRPLMDFLDGNLTLFATVCEKTVLKRVLKELWRVVMNTMERMIVLPPLTDQTGTQLIFTAAKELSHLSKLKDHMVREETRNLTPKQCAVLDLALDTIKQYFHAGGNGLKKTFLEKSPDLQSLRYALSLYTQTTDTLIKTFVRSQTTQVHDGKGIRFTANEDIRPEKGSGVDDPVGEVSIQVDLFTHPGTGEHKVTVKVVAANDLKWQTAGMFRPFVEVTMVGPHQSDKKRKFTTKSKSNNWAPKYNETFHFLLGNEEGPESYELQICVKDYCFAREDRVLGLAVMPLRDVTAKGSCACWCPLGRKIHMDETGLTILRILSQRSNDEVAREFVKLKSESRSTEEGS

SEQ ID NO: 3184 - protein, 248 aa, Homo sapiens
MEGDCLSCMKYLMFVFNFFIFLGGACLLAIGIWVMVDPTGFREIVAANPLLLTGAYILLAMGGLLFLLGFLGCCGAVRENKCLLLFFFLFILIIFLAELSAAILAFIFRENLTREFFTKELTKHYQGNNDTDVFSATWNSVMITFGCCGVNGPEDFKFASVFRLLTLDSEEVPEACCRREPQSRDGVLLSREECLLGRSLFLNKQGCYTVILNTFETYVYLAGALAIGVLAIELFAMIFAMCLFRGIQ

SEQ ID NO: 3185 - protein, 102 aa, Homo sapiens
MAPHLLWCPTNGLGLGGSPAGQWGGGSHYRGLVPGEPAGRPPALPLPGLAGLHDHTQLLRMAGQPWLAWGTAAARVSARPTRDCSCTSRCHHACDVVAVTLS

SEQ ID NO: 3186 - protein, 529 aa, Homo sapiens
MALKWTSVLLLIHLGCYFSSGSCGKVLVWTGEYSHWMNMKTILKELVQRGHEVTVLASSASILFDPNDAFTLKLEVYPTSLTKTEFENIIMQQVKRWSDIQKDSFWLYFSQEQEILWEFHDIFRNFCKDVVSNKKVMKKLQESRFDIIFADAFFPCGELLAALLNIPFVYSLCFTPGYTIERHSGGLIFPPSYIPVVMSKLSDQMTFMERVKNMIYVLYFDFWFQMCDMKKWDQFYSEVLGRPTTLFETMGKADIWLMRNSWSFQFPHPFLPNIDFVGGLHCKPAKPLPKEMEEFVQSSGENGVVVFSLGSVISNMTAERANVIATALAKIPQKVLWRFDGNKPDALGLNTRLYKWIPQNDLLGLPKTRAFITHGGANGIYEAIYHGIPMVGIPLFWDQPDNIAHMKAKGAAVRLDFHTMSSTDLLNALKTVINDPSYKENVMKLSIIQHDQPVKPLHRAVFWIEFVMCHKGAKHLRVAARDLTWFQYHSLDVIGFLLACVATVIFVVTKFCLFCFWKFARKGKKGKRD

SEQ ID NO: 3187 - protein, 335 aa, Homo sapiens
MALKWTSVLLLIHLGCYFSSGSCGKVLVWTGEYSHWMNMKTILKELVQRGHEVTVLASSASILFDPNDAFTLKLEVYPTSLTKTEFENIIMQQVKRWSDIQKDSFWLYFSQEQEILWEFHDIFRNFCKDVVSNKKVMKKLQESRFDIIFADAFFPCGELLAALLNIPFVYSLCFTPGYTIERHSGGLIFPPSYIPVVMSKLSDQMTFMERVKNMIYVLYFDFWFQMCDMKKWDQFYSEVLGRPTTLFETMGKADIWLMRNSWSFQFPHPFLPNIDFVGGLHCKPAKPLPKEMEEFVQSSGENGVVVFSLGSVISNMTAERANVIATALAKIPQKI

SEQ ID NO: 3188 - protein, 658 aa, Homo sapiens
MGGHLSPWPTYTSGQTILQNRKPCSDDYRKRVGSCQQHPFRTAKPQYLEELENYLRKELLLLDLGTDSTQELRLQPYREIFEFFIEDFKTYKPLLSSIKNAYEGMLAHQREKIRALEPLKAKLVTVNEDCNERILAMRAEEKYEISLLKKEKMNLLKLIDKKNEEKISLQSEVTKLRKNLAEEYLHYLSERDACKILIADLNELRYQREDMSLAQSPGIWGEDPVKLTLALKMTRQDLTRTQMELNNMKANFGDVVPRRDFEMQEKTNKDLQEQLDTLRASYEEVRKEHEILMQLHMSTLKERDQFFSELQEIQRTSTPRPDWTKCKDVVAGGPERWQMLAEGKNSDQLVDVLLEEIGSGLLREKDFFPGLGYGEAIPAFLRFDGLVENKKPSKKDVVNLLKDAWKERLAEEQKETFPDFFFNFLEHRFGPSDAMAWAYTIFENIKIFHSNEVMSQFYAVLMGKRSENVYVTQKETVAQLLKEMTNADSQNEGLLTMEQFNTVLKSTFPLKTEEQIQELMEAGGWHPSSSNADLLNYRSLFMEDEEGQSEPFVQKLWEQYMDEKDEYLQQLKQELGIELHEEVTLPKLRGGLMTIDPSLDKQTVNTYMSQAFQLPESEMPEEGDEKEEAVVEILQTALERLQVIDIRRVGPREPEPAS

SEQ ID NO: 3189 - protein, 366 aa, Homo sapiens
MQLHMSTLKERDQFFSELQEIQRTSTPRPDWTKCKDVVAGGPERWQMLAEGKNSDQLVDVLLEEIGSGLLREKDFFPGLGYGEAIPAFLRFDGLVENKKPSKKDVVNLLKDAWKERLAEEQKETFPDFFFNFLEHRFGPSDAMAWAYTIFENIKIFHSNEVMSQFYAVLMGKRSENVYVTQKETVAQLLKEMTNADSQNEGLLTMEQFNTVLKSTFPLKTEEQIQELMEAGGWHPSSSNADLLNYRSLFMEDEEGQSEPFVQKLWEQYMDEKDEYLQQLKQELGIELHEEVTLPKLRGGLMTIDPSLDKQTVNTYMSQAFQLPESEMPEEGDEKEEAVVEILQTALERLQVIDIRRVGPREPEPAS

SEQ ID NO: 3190 - protein, 922 aa, Homo sapiens
MISLKVCGFIQIWSQKTGMTKLKEALIETVQRQKEIKLVVTFKSGKFIRIFQLSNNIRSVVLRHCKKRQSHLRLTLKNNVFLFIDKLSYRDAKQLNMFLDIIHQNKSQQPMKSDDDWSVFESRNMLKEIDKTSFYSICNKPSYQKMPLFMSKSPTHVKKGILENQGGKGQNTLSSDVQTNEDILKEDNPVPNKKYKTDSLKYIQSNRKNPSSLEDLEKDRDLKLGPSFNTNCNGNPNLDETVLATQTLNAKNGLTSPLEPEHSQGDPRCNKAQVPLDSHSQQLQQGFPNLGNTCYMNAVLQSLFAIPSFADDLLTQGVPWEYIPFEALIMTLTQLLALKDFCSTKIKRELLGNVKKVISAVAEIFSGNMQNDAHEFLGQCLDQLKEDMEKLNATLNTGKECGDENSSPQMHVGSAATKVFVCPVVANFEFELQLSLICKACGHAVLKVEPNNYLSINLHQETKPLPLSIQNSLDLFFKEEELEYNCQMCKQKSCVARHTFSRLSRVLIIHLKRYSFNNAWLLVKNNEQVYIPKSLSLSSYCNESTKPPLPLSSSAPVGKCEVLEVSQEMISEINSPLTPSMKLTSESSDSLVLPVEPDKNADLQRFQRDCGDASQEQHQRDLENGSALESELVHFRDRAIGEKELPVADSLMDQGDISLPVMYEDGGKLISSPDTRLVEVHLQEVPQHPELQKYEKTNTFVEFNFDSVTESTNGFYDCKENRIPEGSQGMAEQLQQCIEESIIDEFLQQAPPPGVRKLDAQEHTEETLNQSTELRLQKADLNHLGALGSDNPGNKNILDAENTRGEAKELTRNVKMGDPLQAYRLISVVSHIGSSPNSGHYISDVYDFQKQAWFTYNDLCVSEISETKMQEARLHSGYIFFYMHNGIFEELLRKAENSRLPSTQAGVIPQGEYEGDSLYRPA

SEQ ID NO: 3191 - protein, 119 aa, Homo sapiens
MPLVVAVIFFSLWVFALGQLEQPEISISRPANKSAHISWKASIQGFSSKIIHWYWQKPNKGLEYLLHVFLTISAQDCSGGKTKKLEVSKNAHTSTSTLKIKFLEKEDEVVYHCACWIRH

SEQ ID NO: 3192 - protein, 942 aa, Homo sapiens
MTGSNSHITILTLKVLPHFESLGKQEKIPNKMSAFRNHCPHLDSVGEITKEDLIQKSLGTCQDCKVQGPNLWACLENRCSYVGCGESQVDHSTIHSQETKHYLTVNLTTLRVWCYACSKEVFLDRKLGTQPSLPHVRQPHQIQENSVQDFKIPSNTTLKTPLVAVFDDLDIEADEEDELRARGLTGLKNIGNTCYMNAALQALSNCPPLTQFFLDCGGLARTDKKPAICKSYLKLMTELWHKSRPGSVVPTTLFQGIKTVNPTFRGYSQQDAQEFLRCLMDLLHEELKEQVMEVEEDPQTITTEETMEEDKSQSDVDFQSCESCSNSDRAENENGSRCFSEDNNETTMLIQDDENNSEMSKDWQKEKMCNKINKVNSEGEFDKDRDSISETVDLNNQETVKVQIHSRASEYITDVHSNDLSTPQILPSNEGVNPRLSASPPKSGNLWPGLAPPHKKAQSASPKRKKQHKKYRSVISDIFDGTIISSVQCLTCDRVSVTLETFQDLSLPIPGKEDLAKLHSSSHPTSIVKAGSCGEAYAPQGWIAFFMEYVKRFVVSCVPSWFWGPVVTLQDCLAAFFARDELKGDNMYSCEKCKKLRNGVKFCKVQNFPEILCIHLKRFRHELMFSTKISTHVSFPLEGLDLQPFLAKDSPAQIVTYDLLSVICHHGTASSGHYIAYCRNNLNNLWYEFDDQSVTEVSESTVQNAEAYVLFYRKSSEEAQKERRRISNLLNIMEPSLLQFYISRQWLNKFKTFAEPGPISNNDFLCIHGGVPPRKAGYIEDLVLMLPQNIWDNLYSRYGGGPAVNHLYICHTCQIEAEKIEKRRKTELEIFIRLNRAFQKEDSPATFYCISMQWFREWESFVKGKDGDPPGPIDNTKIAVTKCGNVMLRQGADSGQISEETWNFLQSIYGGGPEVILRPPVVHVDPDILQAEEKIEVETRSL

SEQ ID NO: 3193 - protein, 911 aa, Homo sapiens
MSAFRNHCPHLDSVGEITKEDLIQKSLGTCQDCKVQGPNLWACLENRCSYVGCGESQVDHSTIHSQETKHYLTVNLTTLRVWCYACSKEVFLDRKLGTQPSLPHVRQPHQIQENSVQDFKIPSNTTLKTPLVAVFDDLDIEADEEDELRARGLTGLKNIGNTCYMNAALQALSNCPPLTQFFLDCGGLARTDKKPAICKSYLKLMTELWHKSRPGSVVPTTLFQGIKTVNPTFRGYSQQDAQEFLRCLMDLLHEELKEQVMEVEEDPQTITTEETMEEDKSQSDVDFQSCESCSNSDRAENENGSRCFSEDNNETTMLIQDDENNSEMSKDWQKEKMCNKINKVNSEGEFDKDRDSISETVDLNNQETVKVQIHSRASEYITDVHSNDLSTPQILPSNEGVNPRLSASPPKSGNLWPGLAPPHKKAQSASPKRKKQHKKYRSVISDIFDGTIISSVQCLTCDRVSVTLETFQDLSLPIPGKEDLAKLHSSSHPTSIVKAGSCGEAYAPQGWIAFFMEYVKRFVVSCVPSWFWGPVVTLQDCLAAFFARDELKGDNMYSCEKCKKLRNGVKFCKVQNFPEILCIHLKRFRHELMFSTKISTHVSFPLEGLDLQPFLAKDSPAQIVTYDLLSVICHHGTASSGHYIAYCRNNLNNLWYEFDDQSVTEVSESTVQNAEAYVLFYRKSSEEAQKERRRISNLLNIMEPSLLQFYISRQWLNKFKTFAEPGPISNNDFLCIHGGVPPRKAGYIEDLVLMLPQNIWDNLYSRYGGGPAVNHLYICHTCQIEAEKIEKRRKTELEIFIRLNRAFQKEDSPATFYCISMQWFREWESFVKGKDGDPPGPIDNTKIAVTKCGNVMLRQGADSGQISEETWNFLQSIYGGGPEVILRPPVVHVDPDILQAEEKIEVETRSL

SEQ ID NO: 3194 - protein, 828 aa, Homo sapiens
MTGSNSHITILTLKVLPHFESLGKQEKIPNKMSAFRNHCPHLDSVGEITKEDLIQKSLGTCQDCKVQGPNLWACLENRCSYVGCGESQVDHSTIHSQETKHYLTVNLTTLRVWCYACSKEVFLDRKLGTQPSLPHVRQPHQIQENSVQDFKIPSNTTLKTPLVAVFDDLDIEADEEDELRARGLTGLKNIGNTCYMNAALQALSNCPPLTQFFLDCGGLARTDKKPAICKSYLKLMTELWHKSRPGSVVPTTLFQGIKTVNPTFRGYSQQDAQEFLRCLMDLLHEELKEQVMEVEEDPQTITTEETMEEDKSQSDVDFQSCESCSNSDRAENENGSRCFSEDNNETTMLIQDDENNSEMSKDWQKEKMCNKINKVNSEGEFDKDRDSISETVDLNNQETVKVQIHSRASEYITDVHSNDLSTPQILPSNEGVNPRLSASPPKSGNLWPGLAPPHKKAQSASPKRKKQHKKYRSVISDIFDGTIISSVQCLTCDRVSVTLETFQDLSLPIPGKEDLAKLHSSSHPTSIVKAGSCGEAYAPQGWIAFFMEYVKSWFWGPVVTLQDCLAAFFARDELKGDNMYSCEKCKKLRNGVKFCKVQNFPEILCIHLKRFRHELMFSTKISTHVSFPLEGLDLQPFLAKDSPAQIVTYDLLSVICHHGTASSGHYIAYCRNNLNNLWYEFDDQSVTEVSESTVQNAEAYVLFYRKSSEEAQKERRRISNLLNIMEPSLLQFYISRQWLNKFKTFAEPGPISNNDFLCIHGGVPPRKAGYIEDLVLMLPQNIWDNLYSRYGGGPAVNHLYICHTCQIEAEKIEKRRKTELEIFIRVKK

SEQ ID NO: 3195 - protein, 519 aa, Homo sapiens
MSPLWWGFLLSCLGCKILPGAQGQFPRVCMTVDSLVNKECCPRLGAESANVCGSQQGRGQCTEVRADTRPWSGPYILRNQDDRELWPRKFFHRTCKCTGNFAGYNCGDCKFGWTGPNCERKKPPVIRQNIHSLSPQEREQFLGALDLAKKRVHPDYVITTQHWLGLLGPNGTQPQFANCSVYDFFVWLHYYSVRDTLLGPGRPYRAIDFSHQGPAFVTWHRYHLLCLERDLQRLIGNESFALPYWNFATGRNECDVCTDQLFGAARPDDPTLISRNSRFSSWETVCDSLDDYNHLVTLCNGTYEGLLRRNQMGRNSMKLPTLKDIRDCLSLQKFDNPPFFQNSTFSFRNALEGFDKADGTLDSQVMSLHNLVHSFLNGTNALPHSAANDPIFVVLHSFTDAIFDEWMKRFNPPADAWPQELAPIGHNRMYNMVPFFPPVTNEELFLTSDQLGYSYAIDLPVSVEETPGWPTTLLVVMGTLVALVGLFVLLAFLQYRRLRKGYTPLMETHLSSKRYTEEA

SEQ ID NO: 3196 - protein, 552 aa, Homo sapiens
MSPLWWGFLLSCLGCKILPGAQGQFPRVCMTVDSLVNKECCPRLGAESANVCGSQQGRGQCTEVRADTRPWSGPYILRNQDDRELWPRKFFHRTCKCTGNFAGYNCGDCKFGWTGPNCERKKPPVIRQNIHSLSPQEREQFLGALDLAKKRVHPDYVITTQHWLGLLGPNGTQPQFANCSVYDFFVWLHYYSVRDTLLGPGRPYRAIDFSHQGPAFVTWHRYHLLCLERDLQRLIGNESFALPYWNFATGRNECDVCTDQLFGAARPDDPTLISRNSRFSSWETVCDSLDDYNHLVTLCNGTYEGLLRRNQMGRNSMKLPTLKDIRDCLSLQKFDNPPFFQNSTFSFRNALEGFDKADGTLDSQVMSLHNLVHSFLNGTNALPHSAANDPIFVVISNRLLYNATTNILEHVRKEKATKELPSLHVLVLHSFTDAIFDEWMKRFNPPADAWPQELAPIGHNRMYNMVPFFPPVTNEELFLTSDQLGYSYAIDLPVSVEETPGWPTTLLVVMGTLVALVGLFVLLAFLQYRRLRKGYTPLMETHLSSKRYTEEA

SEQ ID NO: 3197 - protein, 116 aa, Homo sapiens
MTRVSLLWAVVVSTCLESGMAQTVTQSQPEMSVQEAETVTLSCTYDTSENNYYLFWYKQPPSRQMILVIRQEAYKQQNATENRFSVNFQKAAKSFSLKISDSQLGDTAMYFCAFMK

SEQ ID NO: 3198 - protein, 100 aa, Homo sapiens
MEEASEGGGNDRVRNLQSEVEGVKNIMTQNVERILARGENLEHLRNKTEDLEATSEHFKTTSQKVARKFWWKNVKMIVLICVIVFIIILFIVLFATGAFS

SEQ ID NO: 3199 - protein, 220 aa, Homo sapiens
MAILFAVVARGTTILAKHAWCGGNFLEVTEQILAKIPSENNKLTYSHGNYLFHYICQDRIVYLCITDDDFERSRAFNFLNEIKKRFQTTYGSRAQTALPYAMNSEFSSVLAAQLKHHSENKGLDKVMETQAQVDELKGIMVRNIDLVAQRGERLELLIDKTENLVDSSVTFKTTSRNLARAMCMKNLKLTIIIIIVSIVFIYIIVSPLCGGFTWPSCVKK

SEQ ID NO: 3200 - protein, 260 aa, Homo sapiens
MAILFAVVARGTTILAKHAWCGGNFLEVTEQILAKIPSENNKLTYSHGNYLFHYICQDRIVYLCITDDDFERSRAFNFLNEIKKRFQTTYGSRAQTALPYAMNSEFSSVLAAQLKHHSENKGLDKVMETQAQVDELKGIMVRNIVCHLQNYQQKSCSSHVYEEPQAHYYHHHRINCVHLYHCFTSLWWIYMAKLCEEIGKKKLPLTKDMREQGVKSNPCDSSLSHTDRWYLPVSSTLFSLFKILFHASRFIFVLSTSLFL

SEQ ID NO: 3201 - protein, 179 aa, Homo sapiens
MAILFAVVARGTTILAKHAWCGGNFLEDFERSRAFNFLNEIKKRFQTTYGSRAQTALPYAMNSEFSSVLAAQLKHHSENKGLDKVMETQAQVDELKGIMVRNIDLVAQRGERLELLIDKTENLVDSSVTFKTTSRNLARAMCMKNLKLTIIIIIVSIVFIYIIVSPLCGGFTWPSCVKK

SEQ ID NO: 3202 - protein, 524 aa, Homo sapiens
MDTESTYSGYSYYSSHSKKSHRQGERTRERHKSPRNKDGRGSEKSVTIQPPTGEPLLGNDSTRTEEVQDDNWGETTTAITGTSEHSISQEDIARISKDMEDSVGLDCKRYLGLTVASFLGLLVFLTPIAFILLPPILWRDELEPCGTICEGLFISMAFKLLILLIGTWALFFRKRRADMPRVFVFRALLLVLIFLFVVSYWLFYGVRILDSRDRNYQGIVQYAVSLVDALLFIHYLAIVLLELRQLQPMFTLQVVRSTDGESRFYSLGHLSIQRAALVVLENYYKDFTIYNPNLLTASKFRAAKHMAGLKVYNVDGPSNNATGQSRAMIAAAARRRDSSHNELYYEEAEHERRVKKRKARLVVAVEEAFIHIQRLQAEEQQKAPGEVMDPREAAQAIFPSMARALQKYLRITRQQNYHSMESILQHLAFCITNGMTPKAFLERYLSAGPTLQYDKDRWLSTQWRLVSDEAVTNGLRDGIVFVLKCLDFSLVVNVKKIPFIILSEEFIDPKSHKFVLRLQSETSV

SEQ ID NO: 3203 - protein, 522 aa, Homo sapiens
MDTESTYSGYSYYSSHSKKSHRQGERTRERHKSPRNKDGRGSEKSVTIQPPTGEPLLGNDSTRTEEDDNWGETTTAITGTSEHSISQEDIARISKDMEDSVGLDCKRYLGLTVASFLGLLVFLTPIAFILLPPILWRDELEPCGTICEGLFISMAFKLLILLIGTWALFFRKRRADMPRVFVFRALLLVLIFLFVVSYWLFYGVRILDSRDRNYQGIVQYAVSLVDALLFIHYLAIVLLELRQLQPMFTLQVVRSTDGESRFYSLGHLSIQRAALVVLENYYKDFTIYNPNLLTASKFRAAKHMAGLKVYNVDGPSNNATGQSRAMIAAAARRRDSSHNELYYEEAEHERRVKKRKARLVVAVEEAFIHIQRLQAEEQQKAPGEVMDPREAAQAIFPSMARALQKYLRITRQQNYHSMESILQHLAFCITNGMTPKAFLERYLSAGPTLQYDKDRWLSTQWRLVSDEAVTNGLRDGIVFVLKCLDFSLVVNVKKIPFIILSEEFIDPKSHKFVLRLQSETSV

SEQ ID NO: 3204 - protein, 420 aa, Homo sapiens
MVSKALLRLVSAVNRRRMKLLLGIALLAYVASVWGNFVNMRSIQENGELKIESKIEEMVEPLREKIRDLEKSFTQKYPPVKFLSEKDRKRILITGGAGFVGSHLTDKLMMDGHEVTVVDNFFTGRKRNVEHWIGHENFELINHDVVEPLYIEVDQIYHLASPASPPNYMYNPIKTLKTNTIGTLNMLGLAKRVGARLLLASTSEVYGDPEVHPQSEDYWGHVNPIGPRACYDEGKRVAETMCYAYMKQEGVEVRVARIFNTFGPRMHMNDGRVVSNFILQALQGEPLTVYGSGSQTRAFQYVSDLVNGLVALMNSNVSSPVNLGNPEEHTILEFAQLIKNLVGSGSEIQFLSEAQDDPQKRKPDIKKAKLMLGWEPVVPLEEGLNKAIHYFRKELEYQANNQYIPKPKPARIKKGRTRHS

SEQ ID NO: 3205 - protein, 425 aa, Homo sapiens
MVSKALLRLVSAVNRRRMKLLLGIALLAYVASVWGNFVNMSFLLNRSIQENGELKIESKIEEMVEPLREKIRDLEKSFTQKYPPVKFLSEKDRKRILITGGAGFVGSHLTDKLMMDGHEVTVVDNFFTGRKRNVEHWIGHENFELINHDVVEPLYIEVDQIYHLASPASPPNYMYNPIKTLKTNTIGTLNMLGLAKRVGARLLLASTSEVYGDPEVHPQSEDYWGHVNPIGPRACYDEGKRVAETMCYAYMKQEGVEVRVARIFNTFGPRMHMNDGRVVSNFILQALQGEPLTVYGSGSQTRAFQYVSDLVNGLVALMNSNVSSPVNLGNPEEHTILEFAQLIKNLVGSGSEIQFLSEAQDDPQKRKPDIKKAKLMLGWEPVVPLEEGLNKAIHYFRKELEYQANNQYIPKPKPARIKKGRTRHS

SEQ ID NO: 3206 - protein, 252 aa, Homo sapiens
MYNPIKTLKTNTIGTLNMLGLAKRVGARLLLASTSEVYGDPEVHPQSEDYWGHVNPIGPRACYDEGKRVAETMCYAYMKQEGVEVRVARIFNTFGPRMHMNDGRVVSNFILQALQGEPLTVYGSGSQTRAFQYVSDLVNGLVALMNSNVSSPVNLGNPEEHTILEFAQLIKNLVGSGSEIQFLSEAQDDPQKRKPDIKKAKLMLGWEPVVPLEEGLNKAIHYFRKELEYQANNQYIPKPKPARIKKGRTRHS

SEQ ID NO: 3207 - protein, 532 aa, Homo sapiens
MESAEPAGQARAAATKLSEAVGAALQEPRRQRRLVLVIVCVALLLDNMLYMVIVPIVPDYIAHMRGGGEGPTRTPEVWEPTLPLPTPANASAYTANTSASPTAAWPAGSALRPRYPTESEDVKIGVLFASKAILQLLVNPLSGPFIDRMSYDVPLLIGLGVMFASTVLFAFAEDYATLFAARSLQGLGSAFADTSGIAMIADKYPEEPERSRALGVALAFISFGSLVAPPFGGILYEFAGKRVPFLVLAAVSLFDALLLLAVAKPFSAAARARANLPVGTPIHRLMLDPYIAVVAGALTTCNIPLAFLEPTIATWMKHTMAASEWEMGMAWLPAFVPHVLGVYLTVRLAARYPHLQWLYGALGLAVIGASSCIVPACRSFAPLVVSLCGLCFGIALVDTALLPTLAFLVDVRHVSVYGSVYAIADISYSVAYALGPIVAGHIVHSLGFEQLSLGMGLANLLYAPVLLLLRNVGLLTRSRSERDVLLDEPPQGLYDAVRLRERPVSGQDGEPRSPPGPFDACEDDYNYYYTRS

SEQ ID NO: 3208 - protein, 106 aa, Homo sapiens
MMTLVPRARTRAGQDHYSHPCPRFSQVLLTEGIMTYCLTKNLSDVNILHRLLKNGNVRNTLLQSKVGLLTYYVKLYPGEVTLLTRPSIQMRLCCITGSVSRPRSQK

SEQ ID NO: 3209 - protein, 131 aa, Homo sapiens
MGLSGLLPILVPFILLGDIQEPGHAEGILGKPCPKIKVECEVEEIDQCTKPRDCPENMKCCPFSRGKKCLDFRKIYAVCHRRLAPAWPPYHTGGTIKKTKICSEFIYGGSQGNNNNFQTEAICLVTCKKYH

SEQ ID NO: 3210 - protein, 86 aa, Homo sapiens
MGLSGLLPILVPFILLGDIQEPGHAEGILGKPCPKIKVECEVEEIDQCTKPRDCPENMKCCPFSRGKKCLDFRKVSLTLYHKEELE

SEQ ID NO: 3211 - protein, 153 aa, Homo sapiens
MMILVFWSNYPYEPVCLASHRNNMEASVPKYKKHLPQLGMQKEMEQDVKRFGQAAWATAIPRLEKLKLMLAQETLQLMRAKELCLNHKRAEIQGKMEDLPEQEKNINVVDELAIQFYEIQLELYEVKFEILKNKEILLTTQLDSLERLIKDEI

SEQ ID NO: 3212 - protein, 131 aa, Homo sapiens
MQKEMEQDVKRFGQAAWATAIPRLEKLKLMLAQETLQLMRAKELCLNHKRAEIQGKMEDLPEQEKNINVVDELAIQFYEIQLELYEVKFEILKNKEILLTTQLDSLERLIKEKQDEVVYYDPCESPEELSH

SEQ ID NO: 3213 - protein, 73 aa, Homo sapiens
MAPQTLLLVLVLCVLLLQAQGGYRDKMRMQRIKVCEKRPSIDLCIHHCSYFQKCETNKICCSAFCGNICMSIL

SEQ ID NO: 3214 - protein, 89 aa, Homo sapiens
MVSCERRASKSVGQILLWDFGYTCRLSHRRRNSTEILSRNLPALYTGIKVCEKRPSIDLCIHHCSYFQKCETNKICCSAFCGNICMSIL

SEQ ID NO: 3215 - protein, 159 aa, Homo sapiens
MFIFNSIADDIFPLISCVGAIHCNILAIRTGNDFAAIKLQVIKLIYLMIWHSLVIISPVVTLAFFPASLKQGSLHFLLIIYFVLLLTPWLEFSKSGTHLPSNTKIIPAWWVSMDAYLNHASICCHQFSCLSAVKLQLSNEELIRDTRWDIQSYTTDFSF

SEQ ID NO: 3216 - protein, 617 aa, Homo sapiens
MAFPHRPDAPELPDFSMLKRLARDQLIYLLEQLPGKKDLFIEADLMSPLDRIANVSILKQHEVDKLYKVENKPALSSNEQLCFLVRPRIKNMRYIASLVNADKLAGRTRKYKVIFSPQKFYACEMVLEEEGIYGDVSCDEWAFSLLPLDVDLLSMELPEFFRDYFLEGDQRWINTVAQALHLLSTLYGPFPNCYGIGRCAKMAYELWRNLEEEEDGETKGRRPEIGHIFLLDRDVDFVTALCSQVVYEGLVDDTFRIKCGSVDFGPEVTSSDKSLKVLLNAEDKVFNEIRNEHFSNVFGFLSQKARNLQAQYDRRRGMDIKQMKNFVSQELKGLKQEHRLLSLHIGACESIMKKKTKQDFQELIKTEHALLEGFNIRESTSYIEEHIDRQVSPIESLRLMCLLSITENGLIPKDYRSLKTQYLQSYGPEHLLTFSNLRRAGLLTEQAPGDTLTAVESKVSKLVTDKAAGKITDAFSSLAKRSNFRAISKKLNLIPRVDGEYDLKVPRDMAYVFGGAYVPLSCRIIEQVLERRSWQGLDEVVRLLNCSDFAFTDMTKEDKASSESLRLILVVFLGGCTFSEISALRFLGREKGYRFIFLTTAVTNSARLMEAMSEVKA

SEQ ID NO: 3217 - protein, 526 aa, Homo sapiens
MRYIASLVNADKLAGRTRKYKVIFSPQKFYACEMVLEEEGIYGDVSCDEWAFSLLPLDVDLLSMELPEFFRDYFLEGDQRWINTVAQALHLLSTLYGPFPNCYGIGRCAKMAYELWRNLEEEEDGETKGRRPEIGHIFLLDRDVDFVTALCSQVVYEGLVDDTFRIKCGSVDFGPEVTSSDKSLKVLLNAEDKVFNEIRNEHFSNVFGFLSQKARNLQAQYDRRRGMDIKQMKNFVSQELKGLKQEHRLLSLHIGACESIMKKKTKQDFQELIKTEHALLEGFNIRESTSYIEEHIDRQVSPIESLRLMCLLSITENGLIPKDYRSLKTQYLQSYGPEHLLTFSNLRRAGLLTEQAPGDTLTAVESKVSKLVTDKAAGKITDAFSSLAKRSNFRAISKKLNLIPRVDGEYDLKVPRDMAYVFGGAYVPLSCRIIEQVLERRSWQGLDEVVRLLNCSDFAFTDMTKEDKASSESLRLILVVFLGGCTFSEISALRFLGREKGYRFIFLTTAVTNSARLMEAMSEVKA

SEQ ID NO: 3218 - protein, 3174 aa, Homo sapiens
MVFESVVVDVLNRFLGDYVVDLDTSQLSLGIWKGAVALKNLQIKENALSQLDVPFKVKVGHIGNLKLIIPWKNLYTQPVEAVLEEIYLLIVPSSRIKYDPLKEEKQLMEAKQQELKRIEEAKQKVVDQEQHLPEKQDTFAEKLVTQIIKNLQVKISSIHIRYEDDITNRDKPLSFGISLQNLSMQTTDQYWVPCLHDETEKLVRKLIRLDNLFAYWNVKSQMFYLSDYDNSLDDLKNGIVNENIVPEGYDFVFRPISANAKLVMNRRSDFDFSAPKINLEIELHNIAIEFNKPQYFSIMELLESVDMMAQNLPYRKFKPDVPLHHHAREWWAYAIHGVLEVNVCPRLWMWSWKHIRKHRQKVKQYKELYKKKLTSKKPPGELLVSLEELEKTLDVFNITIARQTAEVEVKKAGYKIYKEGVKDPEDNKGWFSWLWSWSEQNTNEQQPDVQPETLEEMLTPEEKALLYEAIGYSETAVDPTLLKTFEALKFFVHLKSMSIVLRENHQKPELVDIVIEEFSTLIVQRPGAQAIKFETKIDSFHITGLPDNSEKPRLLSSLDDAMSLFQITFEINPLDETVSQRCIIEAEPLEIIYDARTVNSIVEFFRPPKEVHLAQLTAATLTKLEEFRSKTATGLLYIIETQKVLDLKINLKASYIIVPQDGIFSPTSNLLLLDLGHLKVTSKSRSELPDVKQGEANLKEIMDRAYDSFDIQLTSVQLLYSRVGDNWREARKLSVSTQHILVPMHFNLELSKAMVFMDVRMPKFKIYGKLPLISLRISDKKLQGIMELIESIPKPEPVTEVSAPVKSFQIQTSTSLGTSQISQKIIPLLELPSVSEDDSEEEFFDAPCSPLEEPLQFPTGVKSIRTRKLQKQDCSVNMTTFKIRFEVPKVLIEFYHLVGDCELSVVEILVLGLGAEIEIRTYDLKANAFLKEFCLKCPEYLDENKKPVYLVTTLDNTMEDLLTLEYVKAEKNVPDLKSTYNNVLQLIKVNFSSLDIHLHTEALLNTINYLHNILPQSEEKSAPVSTTETEDKGDVIKKLALKLSTNEDIITLQILAELSCLQIFIQDQKCNISEIKIEGLDSEMIMRPSETEINAKLRNIIVLDSDITAIYKKAVYITGKEVFSFKMVSYMDATAGSAYTDMNVVDIQVNLIVGCIEVVFVTKFLYSILAFIDNFQAAKQALAEATVQAAGMAATGVKELAQRSSRMALDINIKAPVVVIPQSPVSENVFVADFGLITMTNTFHMITESQSSPPPVIDLITIKLSEMRLYRSRFINDAYQEVLDLLLPLNLEVVVERNLCWEWYQEVPCFNVNAQLKPMEFILSQEDITTIFKTLHGNIWYEKDGSASPAVTKDQYSATSGVTTNASHHSGGATVVTAAVVEVHSRALLVKTTLNISFKTDDLTMVLYSPGPKQASFTDVRDPSLKLAEFKLENIISTLKMYTDGSTFSSFSLKNCILDDKRPHVKKATPRMIGLTVGFDKKDMMDIKYRKVRDGCVTDAVFQEMYICASVEFLQTVANVFLEAYTTGTAVETSVQTWTAKEEVPTQESVKWEINVIIKNPEIVFVADMTKNDAPALVITTQCEICYKGNLENSTMTAAIKDLQVRACPFLPVKRKGKITTVLQPCDLFYQTTQKGTDPQVIDMSVKSLTLKVSPVIINTMITITSALYTTKETIPEETASSTAHLWEKKDTKTLKMWFLEESNETEKIAPTTELVPKGEMIKMNIDSIFIVLEAGIGHRTVPMLLAKSRFSGEGKNWSSLINLHCQLELEVHYYNEMFGVWEPLLEPLEIDQTEDFRPWNLGIKMKKKAKMAIVESDPEEENYKVPEYKTVISFHSKDQLNITLSKCGLVMLNNLVKAFTEAATGSSADFVKDLAPFMILNSLGLTISVSPSDSFSVLNIPMAKSYVLKNGESLSMDYIRTKDNDHFNAMTSLSSKLFFILLTPVNHSTADKIPLTKVGRRLYTVRHRESGVERSIVCQIDTVEGSKKVTIRSPVQIRNHFSVPLSVYEGDTLLGTASPENEFNIPLGSYRSFIFLKPEDENYQMCEGIDFEEIIKNDGALLKKKCRSKNPSKESFLINIVPEKDNLTSLSVYSEDGWDLPYIMHLWPPILLRNLLPYKIAYYIEGIENSVFTLSEGHSAQICTAQLGKARLHLKLLDYLNHDWKSEYHIKPNQQDISFVSFTCVTEMEKTDLDIAVHMTYNTGQTVVAFHSPYWMVNKTGRMLQYKADGIHRKHPPNYKKPVLFSFQPNHFFNNNKVQLMVTDSELSNQFSIDTVGSHGAVKCKGLKMDYQVGVTIDLSSFNITRIVTFTPFYMIKNKSKYHISVAEEGNDKWLSLDLEQCIPFWPEYASSKLLIQVERSEDPPKRIYFNKQENCILLRLDNELGGIIAEVNLAEHSTVITFLDYHDGAATFLLINHTKNELVQYNQSSLSEIEDSLPPGKAVFYTWADPVGSRRLKWRCRKSHGEVTQKDDMMMPIDLGEKTIYLVSFFEGLQRIILFTEDPRVFKVTYESEKAELAEQEIAVALQDVGISLVNNYTKQEVAYIGITSSDVVWETKPKKKARWKPMSVKHTEKLEREFKEYTESSPSEDKVIQLDTNVPVRLTPTGHNMKILQPHVIALRRNYLPALKVEYNTSAHQSSFRIQIYRIQIQNQIHGAVFPFVFYPVKPPKSVTMDSAPKPFTDVSIVMRSAGHSQISRIKYFKVLIQEMDLRLDLGFIYALTDLMTEAEVTENTEVELFHKDIEAFKEEYKTASLVDQSQVSLYEYFHISPIKLHLSVSLSSGREEAKDSKQNGGLIPVHSLNLLLKSIGATLTDVQDVVFKLAFFELNYQFHTTSDLQSEVIRHYSKQAIKQMYVLILGLDVLGNPFGLIREFSEGVEAFFYEPYQGAIQGPEEFVEGMALGLKALVGGAVGGLAGAASKITGAMAKGVAAMTMDEDYQQKRREAMNKQPAGFREGITRGGKGLVSGFVSGITGIVTKPIKGAQKGGAAGFFKGVGKGLVGAVARPTGGIIDMASSTFQGIKRATETSEVESLRPPRFFNEDGVIRPYRLRDGTGNQMLQVMENGRFAKYKYFTHVMINKTDMLMITRRGVLFVTKGTFGQLTCEWQYSFDEFTKEPFIVHGRRLRIEAKERVKSVFHAREFGKIINFKTPEDARWILTKLQEAREPSPSL

SEQ ID NO: 3219 - protein, 3095 aa, Homo sapiens
MVFESVVVDVLNRFLGDYVVDLDTSQLSLGIWKGAVALKNLQIKENALSQLDVPFKVKVGHIGNLKLIIPWKNLYTQPVEAVLEEIYLLIVPSSRIKYDPLKEEKQLMEAKQQELKRIEEAKQKVVDQEQHLPEKQDTFAEKLVTQIIKNLQVKISSIHIRYEDDITNRDKPLSFGISLQNLSMQTTDQYWVPCLHDETEKLVRKLIRLDNLFAYWNVKSQMFYLSDYDNSLDDLKNGIVNENIVPEGYDFVFRPISANAKLVMNRRSDFDFSAPKINLEIELHNIAIEFNKPQYFSIMELLESVDMMAQNLPYRKFKPDVPLHHHAREWWAYAIHGVLEVNVCPRLWMWSWKHIRKHRQKVKQYKELYKKKLTSKKPPGELLVSLEELEKTLDVFNITIARQTAEVEVKKAGYKIYKEGVKDPEDNKGWFSWLWSWSEQNTNEQQPDVQPETLEEMLTPEEKALLYEAIGYSETAVDPTLLKTFEALKFFVHLKSMSIVLRENHQKPELVDIVIEEFSTLIVQRPGAQAIKFETKIDSFHITGLPDNSEKPRLLSSLDDAMSLFQITFEINPLDETVSQRCIIEAEPLEIIYDARTVNSIVEFFRPPKEVHLAQLTAATLTKLEEFRSKTATGLLYIIETQKVLDLKINLKASYIIVPQDGIFSPTSNLLLLDLGHLKVTSKSRSELPDVKQGEANLKEIMDRAYDSFDIQLTSVQLLYSRVGDNWREARKLSVSTQHILVPMHFNLELSKAMVFMDVRMPKFKIYGKLPLISLRISDKKLQGIMELIESIPKPEPVTEVSAPVKSFQIQTSTSLGTSQISQKIIPLLELPSVSEDDSEEEFFDAPCSPLEEPLQFPTGVKSIRTRKLQKQDCSVNMTTFKIRFEVPKVLIEFYHLVGDCELSVVEILVLGLGAEIEIRTYDLKANAFLKEFCLKCPEYLDENKKPVYLVTTLDNTMEDLLTLEYVKAEKNVPDLKSTYNNVLQLIKVNFSSLDIHLHTEALLNTINYLHNILPQSEEKSAPVSTTETEDKGDVIKKLALKLSTNEDIITLQILAELSCLQIFIQDQKCNISEIKIEGLDSEMIMRPSETEINAKLRNIIVLDSDITAIYKKAVYITGKEVFSFKMVSYMDATAGSAYTDMNVVDIQVNLIVGCIEVVFVTKFLYSILAFIDNFQAAKQALAEATVQAAGMAATGVKELAQRSSRMALDINIKAPVVVIPQSPVSENVFVADFGLITMTNTFHMITESQSSPPPVIDLITIKLSEMRLYRSRFINDAYQEVLDLLLPLNLEVVVERNLCWEWYQEVPCFNVNAQLKPMEFILSQEDITTIFKTLHGNIWYEKDGSASPAVTKDQYSATSGVTTNASHHSGGATVVTAAVVEVHSRALLVKTTLNISFKTDDLTMVLYSPGPKQASFTDVRDPSLKLAEFKLENIISTLKMYTDGSTFSSFSLKNCILDDKRPHVKKATPRMIGLTVGFDKKDMMDIKYRKVRDGCVTDAVFQEMYICASVEFLQTVANVFLEAYTTGTAVETSVQTWTAKEEVPTQESVKWEINVIIKNPEIVFVADMTKNDAPALVITTQCEICYKGNLENSTMTAAIKDLQVRACPFLPVKRKGKITTVLQPCDLFYQTTQKGTDPQVIDMSVKSLTLKVSPVIINTMITITSALYTTKETIPEETASSTAHLWEKKDTKTLKMWFLEESNETEKIAPTTELVPKGEMIKMNIDSIFIVLEAGIGHRTVPMLLAKSRFSGEGKNWSSLINLHCQLELEVHYYNEMFGVWEPLLEPLEIDQTEDFRPWNLGIKMKKKAKMAIVESDPEEENYKVPEYKTVISFHSKDQLNITLSKCGLVMLNNLVKAFTEAATGSSADFVKDLAPFMILNSLGLTISVSPSDSFSVLNIPMAKSYVLKNGESLSMDYIRTKDNDHFNAMTSLSSKLFFILLTPVNHSTADKIPLTKVGRRLYTVRHRESGVERSIVCQIDTVEGSKKVTIRSPVQIRNHFSVPLSVYEGDTLLGTASPENEFNIPLGSYRSFIFLKPEDENYQMCEGIDFEEIIKNDGALLKKKCRSKNPSKESFLINIVPEKDNLTSLSVYSEDGWDLPYIMHLWPPILLRNLLPYKIAYYIEGIENSVFTLSEGHSAQICTAQLGKARLHLKLLDYLNHDWKSEYHIKPNQQDISFVSFTCVTEMEKTDLDIAVHMTYNTGQTVVAFHSPYWMVNKTGRMLQYKADGIHRKHPPNYKKPVLFSFQPNHFFNNNKVQLMVTDSELSNQFSIDTVGSHGAVKCKGLKMDYQVGVTIDLSSFNITRIVTFTPFYMIKNKSKYHISVAEEGNDKWLSLDLEQCIPFWPEYASSKLLIQVERSEDPPKRIYFNKQENCILLRLDNELGGIIAEVNLAEHSTVITFLDYHDGAATFLLINHTKNELVQYNQSSLSEIEDSLPPGKAVFYTWADPVGSRRLKWRCRKSHGEVTQKDDMMMPIDLGEKTIYLVSFFEGLQRIILFTEDPRVFKVTYESEKAELAEQEIAVALQDVGISLVNNYTKQEVAYIGITSSDVVWETKPKKKARWKPMSVKHTEKLEREFKEYTESSPSEDKVIQLDTNVPVRLTPTGHNMKILQPHVIALRRNYLPALKVEYNTSAHQSSFRIQIYRIQIQNQIHGAVFPFVFYPVKPPKSVTMDSAPKPFTDVSIVMRSAGHSQISRIKYFKVLIQEMDLRLDLGFIYALTDLMTEAEVTENTEVELFHKDIEAFKEEYKTASLVDQSQVSLYEYFHISPIKLHLSVSLSSGREEAKDSKQNGGLIPVHSLNLLLKSIGATLTDVQDVVFKLAFFELNYQFHTTSDLQSEVIRHYSKQAIKQMYVLILGLDVLGNPFGLIREFSEGVEAFFYEPYQGAIQGPEEFVEGMALGLKALVGGAVGGLAGAASKITGAMAKGVAAMTMDEDYQQKRREAMNKQPAGFREGITRGGKGLVSGFVSGITGIVTKPIKGAQKGGAAGFFKGVGKGLVGAVARPTGGIIDMASSTFQGIKRATETSEVESLRPPRFFNEDGVIRPYRLRDGTGNQMLQKIQFYREWIMTHSSSSDDDDDDDDDDESDLNH

SEQ ID NO: 3220 - protein, 3135 aa, Homo sapiens
MVFESVVVDVLNRFLGDYVVDLDTSQLSLGIWKGAVALKNLQIKENALSQLDVPFKVKVGHIGNLKLIIPWKNLYTQPVEAVLEEIYLLIVPSSRIKYDPLKEEKQLMEAKQQELKRIEEAKQKVVDQEQHLPEKQDTFAEKLVTQIIKNLQVKISSIHIRYEDDITNRDKPLSFGISLQNLSMQTTDQYWVPCLHDETEKLVRKLIRLDNLFAYWNVKSQMFYLSDYDNSLDDLKNGIVNENIVPEGYDFVFRPISANAKLVMNRRSDFDFSAPKINLEIELHNIAIEFNKPQYFSIMELLESVDMMAQNLPYRKFKPDVPLHHHAREWWAYAIHGVLEVNVCPRLWMWSWKHIRKHRQKVKQYKELYKKKLTSKKPPGELLVSLEELEKTLDVFNITIARQTAEVEVKKAGYKIYKEGVKDPEDNKGWFSWLWSWSEQNTNEQQPDVQPETLEEMLTPEEKALLYEAIGYSETAVDPTLLKTFEALKFFVHLKSMSIVLRENHQKPELVDIVIEEFSTLIVQRPGAQAIKFETKIDSFHITGLPDNSEKPRLLSSLDDAMSLFQITFEINPLDETVSQRCIIEAEPLEIIYDARTVNSIVEFFRPPKEVHLAQLTAATLTKLEEFRSKTATGLLYIIETQKVLDLKINLKASYIIVPQDGIFSPTSNLLLLDLGHLKVTSKSRSELPDVKQGEANLKEIMDRAYDSFDIQLTSVQLLYSRVGDNWREARKLSVSTQHILVPMHFNLELSKAMVFMDVRMPKFKIYGKLPLISLRISDKKLQGIMELIESIPKPEPVTEVSAPVKSFQIQTSTSLGTSQISQKIIPLLELPSVSEDDSEEEFFDAPCSPLEEPLQFPTGVKSIRTRKLQKQDCSVNMTTFKIRFEVPKVLIEFYHLVGDCELSVVEILVLGLGAEIEIRTYDLKANAFLKEFCLKCPEYLDENKKPVYLVTTLDNTMEDLLTLEYVKAEKNVPDLKSTYNNVLQLIKVNFSSLDIHLHTEALLNTINYLHNILPQSEEKSAPVSTTETEDKGDVIKKLGLDSEMIMRPSETEINAKLRNIIVLDSDITAIYKKAVYITGKEVFSFKMVSYMDATAGSAYTDMNVVDIQVNLIVGCIEVVFVTKFLYSILAFIDNFQAAKQALAEATVQAAGMAATGVKELAQRSSRMALDINIKAPVVVIPQSPVSENVFVADFGLITMTNTFHMITESQSSPPPVIDLITIKLSEMRLYRSRFINDAYQEVLDLLLPLNLEVVVERNLCWEWYQEVPCFNVNAQLKPMEFILSQEDITTIFKTLHGNIWYEKDGSASPAVTKDQYSATSGVTTNASHHSGGATVVTAAVVEVHSRALLVKTTLNISFKTDDLTMVLYSPGPKQASFTDVRDPSLKLAEFKLENIISTLKMYTDGSTFSSFSLKNCILDDKRPHVKKATPRMIGLTVGFDKKDMMDIKYRKVRDGCVTDAVFQEMYICASVEFLQTVANVFLEAYTTGTAVETSVQTWTAKEEVPTQESVKWEINVIIKNPEIVFVADMTKNDAPALVITTQCEICYKGNLENSTMTAAIKDLQVRACPFLPVKRKGKITTVLQPCDLFYQTTQKGTDPQVIDMSVKSLTLKVSPVIINTMITITSALYTTKETIPEETASSTAHLWEKKDTKTLKMWFLEESNETEKIAPTTELVPKGEMIKMNIDSIFIVLEAGIGHRTVPMLLAKSRFSGEGKNWSSLINLHCQLELEVHYYNEMFGVWEPLLEPLEIDQTEDFRPWNLGIKMKKKAKMAIVESDPEEENYKVPEYKTVISFHSKDQLNITLSKCGLVMLNNLVKAFTEAATGSSADFVKDLAPFMILNSLGLTISVSPSDSFSVLNIPMAKSYVLKNGESLSMDYIRTKDNDHFNAMTSLSSKLFFILLTPVNHSTADKIPLTKVGRRLYTVRHRESGVERSIVCQIDTVEGSKKVTIRSPVQIRNHFSVPLSVYEGDTLLGTASPENEFNIPLGSYRSFIFLKPEDENYQMCEGIDFEEIIKNDGALLKKKCRSKNPSKESFLINIVPEKDNLTSLSVYSEDGWDLPYIMHLWPPILLRNLLPYKIAYYIEGIENSVFTLSEGHSAQICTAQLGKARLHLKLLDYLNHDWKSEYHIKPNQQDISFVSFTCVTEMEKTDLDIAVHMTYNTGQTVVAFHSPYWMVNKTGRMLQYKADGIHRKHPPNYKKPVLFSFQPNHFFNNNKVQLMVTDSELSNQFSIDTVGSHGAVKCKGLKMDYQVGVTIDLSSFNITRIVTFTPFYMIKNKSKYHISVAEEGNDKWLSLDLEQCIPFWPEYASSKLLIQVERSEDPPKRIYFNKQENCILLRLDNELGGIIAEVNLAEHSTVITFLDYHDGAATFLLINHTKNELVQYNQSSLSEIEDSLPPGKAVFYTWADPVGSRRLKWRCRKSHGEVTQKDDMMMPIDLGEKTIYLVSFFEGLQRIILFTEDPRVFKVTYESEKAELAEQEIAVALQDVGISLVNNYTKQEVAYIGITSSDVVWETKPKKKARWKPMSVKHTEKLEREFKEYTESSPSEDKVIQLDTNVPVRLTPTGHNMKILQPHVIALRRNYLPALKVEYNTSAHQSSFRIQIYRIQIQNQIHGAVFPFVFYPVKPPKSVTMDSAPKPFTDVSIVMRSAGHSQISRIKYFKVLIQEMDLRLDLGFIYALTDLMTEAEVTENTEVELFHKDIEAFKEEYKTASLVDQSQVSLYEYFHISPIKLHLSVSLSSGREEAKDSKQNGGLIPVHSLNLLLKSIGATLTDVQDVVFKLAFFELNYQFHTTSDLQSEVIRHYSKQAIKQMYVLILGLDVLGNPFGLIREFSEGVEAFFYEPYQGAIQGPEEFVEGMALGLKALVGGAVGGLAGAASKITGAMAKGVAAMTMDEDYQQKRREAMNKQPAGFREGITRGGKGLVSGFVSGITGIVTKPIKGAQKGGAAGFFKGVGKGLVGAVARPTGGIIDMASSTFQGIKRATETSEVESLRPPRFFNEDGVIRPYRLRDGTGNQMLQVMENGRFAKYKYFTHVMINKTDMLMITRRGVLFVTKGTFGQLTCEWQYSFDEFTKEPFIVHGRRLRIEAKERVKSVFHAREFGKIINFKTPEDARWILTKLQEAREPSPSL

SEQ ID NO: 3221 - protein, 3069 aa, Homo sapiens
MVFESVVVDVLNRFLGDYVVDLDTSQLSLGIWKGAVALKNLQIKENALSQLDVPFKVKVGHIGNLKLIIPWKNLYTQPVEAVLEEIYLLIVPSSRIKYDPLKEEKQLMEAKQQELKRIEEAKQKVVDQEQHLPEKQDTFAEKLVTQIIKNLQVKISSIHIRYEDDITNRDKPLSFGISLQNLSMQTTDQYWVPCLHDETEKLVRKLIRLDNLFAYWNVKSQMFYLSDYDNSLDDLKNGIVNENIVPEGYDFVFRPISANAKLVMNRRSDFDFSAPKINLEIELHNIAIEFNKPQYFSIMELLESVDMMAQNLPYRKFKPDVPLHHHAREWWAYAIHGVLEVNVCPRLWMWSWKHIRKHRQKVKQYKELYKKKLTSKKPPGELLVSLEELEKTLDVFNITIARQTAEVEVKKAGYKIYKEGVKDPEDNKGWFSWLWSWSEQNTNEQQPDVQPETLEEMLTPEEKALLYEAIGYSETAVDPTLLKTFEALKFFVHLKSMSIVLRENHQKPELVDIVIEEFSTLIVQRPGAQAIKFETKIDSFHITGLPDNSEKPRLLSSLDDAMSLFQITFEINPLDETVSQRCIIEAEPLEIIYDARTVNSIVEFFRPPKEVHLAQLTAATLTKLEEFRSKTATGLLYIIETQKVLDLKINLKASYIIVPQDGIFSPTSNLLLLDLGHLKVTSKSRSELPDVKQGEANLKEIMDRAYDSFDIQLTSVQLLYSRVGDNWREARKLSVSTQHILVPMHFNLELSKAMVFMDVRMPKFKIYGKLPLISLRISDKKLQGIMELIESIPKPEPVTEVSAPVKSFQIQTSTSLGTSQISQKIIPLLELPSVSEDDSEEEFFDAPCSPLEEPLQFPTGVKSIRTRKLQKQDCSVNMTTFKIRFEVPKVLIEFYHLVGDCELSVVEILVLGLGAEIEIRTYDLKANAFLKEFCLKCPEYLDENKKPVYLVTTLDNTMEDLLTLEYVKAEKNVPDLKSTYNNVLQLIKVNFSSLDIHLHTEALLNTINYLHNILPQSEEKSAPVSTTETEDKGDVIKKLALKLSTNEDIITLQILAELSCLQIFIQDQKCNISEIKIEGLDSEMIMRPSETEINAKLRNIIVLDSDITAIYKKAVYITGKEVFSFKMVSYMDATAGSAYTDMNVVDIQVNLIVGCIEVVFVTKFLYSILAFIDNFQAAKQALAEATVQAAGMAATGVKELAQRSSRMALDINIKAPVVVIPQSPVSENVFVADFGLITMTNTFHMITESQSSPPPVIDLITIKLSEMRLYRSRFINDAYQEVLDLLLPLNLEVVVERNLCWEWYQEVPCFNVNAQLKPMEFILSQEDITTIFKTLHGNIWYEKDGSASPAVTKDQYSATSGVTTNASHHSGGATVVTAAVVEVHSRALLVKTTLNISFKTDDLTMVLYSPGPKQASFTDVRDPSLKLAEFKLENIISTLKMYTDGSTFSSFSLKNCILDDKRPHVKKATPRMIGLTVGFDKKDMMDIKYRKVRDGCVTDAVFQEMYICASVEFLQTVANVFLEAYTTGTAVETSVQTWTAKEEVPTQESVKWEINVIIKNPEIVFVADMTKNDAPALVITTQCEICYKGNLENSTMTAAIKDLQVRACPFLPVKRKGKITTVLQPCDLFYQTTQKGTDPQVIDMSVKSLTLKVSPVIINTMITITSALYTTKETIPEETASSTAHLWEKKDTKTLKMWFLEESNETEKIAPTTELVPKGEMIKMNIDSIFIVLEAGIGHRTVPMLLAKSRFSGEGKNWSSLINLHCQLELEVHYYNEMFGVWEPLLEPLEIDQTEDFRPWNLGIKMKKKAKMAIVESDPEEENYKVPEYKTVISFHSKDQLNITLSKCGLVMLNNLVKAFTEAATGSSADFVKDLAPFMILNSLGLTISVSPSDSFSVLNIPMAKSYVLKNGESLSMDYIRTKDNDHFNAMTSLSSKLFFILLTPVNHSTADKIPLTKVGRRLYTVRHRESGVERSIVCQIDTVEGSKKVTIRSPVQIRNHFSVPLSVYEGDTLLGTASPENEFNIPLGSYRSFIFLKPEDENYQMCEGIDFEEIIKNDGALLKKKCRSKNPSKESFLINIVPEKDNLTSLSVYSEDGWDLPYIMHLWPPILLRNLLPYKIAYYIEGIENSVFTLSEGHSAQICTAQLGKARLHLKLLDYLNHDWKSEYHIKPNQQDISFVSFTCVTEMEKTDLDIAVHMTYNTGQTVVAFHSPYWMVNKTGRMLQYKADGIHRKHPPNYKKPVLFSFQPNHFFNNNKVQLMVTDSELSNQFSIDTVGSHGAVKCKGLKMDYQVGVTIDLSSFNITRIVTFTPFYMIKNKSKYHISVAEEGNDKWLSLDLEQCIPFWPEYASSKLLIQVERSEDPPKRIYFNKQENCILLRLDNELGGIIAEVNLAEHSTVITFLDYHDGAATFLLINHTKNELVQYNQSSLSEIEDSLPPGKAVFYTWADPVGSRRLKWRCRKSHGEVTQKDDMMMPIDLGEKTIYLVSFFEGLQRIILFTEDPRVFKVTYESEKAELAEQEIAVALQDVGISLVNNYTKQEVAYIGITSSDVVWETKPKKKARWKPMSVKHTEKLEREFKEYTESSPSEDKVIQLDTNVPVRLTPTGHNMKILQPHVIALRRNYLPALKVEYNTSAHQSSFRIQIYRIQIQNQIHGAVFPFVFYPVKPPKSVTMDSAPKPFTDVSIVMRSAGHSQISRIKYFKVLIQEMDLRLDLGFIYALTDLMTEAEVTENTEVELFHKDIEAFKEEYKTASLVDQSQVSLYEYFHISPIKLHLSVSLSSGREEAKDSKQNGGLIPVHSLNLLLKSIGATLTDVQDVVFKLAFFELNYQFHTTSDLQSEVIRHYSKQAIKQMYVLILGLDVLGNPFGLIREFSEGVEAFFYEPYQGAIQGPEEFVEGMALGLKALVGGAVGGLAGAASKITGAMAKGVAAMTMDEDYQQKRREAMNKQPAGFREGITRGGKGLVSGFVSGITGIVTKPIKGAQKGGAAGFFKGVGKGLVGAVARPTGGIIDMASSTFQGIKRATETSEVESLRPPRFFNEDGVIRPYRLRDGTGNQMLQASKSLI

SEQ ID NO: 3222 - protein, 309 aa, Homo sapiens
MAVNQSHTENRRGALIPNGESLLKRSPNVELSFPQRSEGSNVFSGRKTGTLFLTSYRVIFITSCSISDPMLSFMMPFDLMTNLTVEQPVFAANFIKGTIQAAPYGGWEGQATFKLVFRNGDAIEFAQLMVKAASAAARGFPLRTLNDWFSSMGIYVITGEGNMCTPQMPCSVIVYGAPPAGYGAPPPGYGAPPAGYGAQPVGNEGPPVGYRASPVRYGAPPLGYGAPPAGYGAPPLGYGAPPLGYGTPPLGYGAPPLGYGAPPAGNEGPPAGYRASPAGSGARPQESTAAQAPENEASLPSASSSQVHS

SEQ ID NO: 3223 - protein, 231 aa, Homo sapiens
MAKWVPALLLRRVPLFSLRFRPASSTFLPVLAATEPAVSVPSGDLSMPVKTRAEGEDDGFGEAGDPRRLLERPWRFRGCLPGKGNRDVGFEGTEGPTSTRPEWVWSCRCCLGCRASTRERVTSPVRAAGPQPRFTDRETEAAAGTLAHMGFAPPTSFSHFTDQELRDCSSLECLGVVEGDPHVLCSTLSLSRPSPSATLTLLLASSCLLAPAPPSFILLLFTLIAPDLPHS

SEQ ID NO: 3224 - protein, 227 aa, Homo sapiens
MFKRMAEFGPDSGGRVKGVTIVKPIVYGNVARYFGKKREEDGHTHQWTVYVKPYRNEDMSAYVKKIQFKLHESYGNPLRVVTKPPYEITETGWGEFEIIIKIFFIDPNERPVTLYHLLKLFQSDTNAMLGKKTVVSEFYDEMIFQDPTAMMQQLLTTSRQLTLGAYKHETEFAELEVKTREKLEAAKKKTSFEIAELKERLKASRETINCLKNEIRKLEEDDQAKDI

SEQ ID NO: 3225 - protein, 699 aa, Homo sapiens
MNTFQASVSFQDVTVEFSQEEWQHMGPVERTLYRDVMLENYSHLVSVGYCFTKPELIFTLEQGEDPWLLEKEKGFLSRNSPEDSQPDEISEKSPENQGKHLLQVLFTNKLLTTEQEISGKPHNRDINIFRARMMPCKCDIAGSACQGLSLMAPHCQYSKEKAHERNVCDKWLISIKDGRTNTQEKSFAYSKIVKTLHHKEEVIQHQTIQTLGQDFEYNESRKAFLEKAALVTSNSTHPKGKSYNFNKFGENKYDKSTFIIPQNMNPEKSHYEFNDTGNCFCRITHKTLTGGKSFSQKSHIREHHRVHIGVKPFEYGKSFNRNSTLPVHQRTHATDKYSDYHPCTETFSYQSTFSVHQKVHIRAKPYEYNECGKSCSMNSHLIWPQKSHTGEKPYECPECGKAFSEKSRLRKHQRTHTGEKPYKCDGCDKAFSAKSGLRIHQRTHTGEKPFECHECGKSFNYKSILIVHQRTHTGEKPFECNECGKSFSHMSGLRNHRRTHTGERPYKCDECGKAFKLKSGLRKHHRTHTGEKPYKCNQCGKAFGQKSQLRGHHRIHTGEKPYKCNHCGEAFSQKSNLRVHHRTHTGEKPYQCEECGKTFRQKSNLRGHQRTHTGEKPYECNECGKAFSEKSVLRKHQRTHTGEKPYNCNQCGEAFSQKSNLRVHQRTHTGEKPYKCDKCGRTFSQKSSLREHQKAHPGD

SEQ ID NO: 3226 - protein, 603 aa, Homo sapiens
MSPGLLTTRKEALMAFRDVAVAFTQKEWKLLSSAQRTLYREVMLENYSHLVSLGIAFSKPKLIEQLEQGDEPWREENEHLLDLCPEPRTEFQPSFPHLVAFSSSQLLRQYALSGHPTQIFPSSSAGGDFQLEAPRCSSEKGESGETEGPDSSLRKRPSRISRTFFSPHQGDPVEWVEGNREGGTDLRLAQRMSLGGSDTMLKGADTSESGAVIRGNYRLGLSKKSSLFSHQKHHVCPECGRGFCQRSDLIKHQRTHTGEKPYLCPECGRRFSQKASLSIHQRKHSGEKPYVCRECGRHFRYTSSLTNHKRIHSGERPFVCQECGRGFRQKIALLLHQRTHLEEKPFVCPECGRGFCQKASLLQHQSSHTGERPFLCLECGRSFRQQSLLLSHQVTHSGEKPYVCAECGHSFRQKVTLIRHQRTHTGEKPYLCPQCGRGFSQKVTLIGHQRTHTGEKPYLCPDCGRGFGQKVTLIRHQRTHTGEKPYLCPKCGRAFGFKSLLTRHQRTHSEEELYVDRVCGQGLGQKSHLISDQRTHSGEKPCICDECGRGFGFKSALIRHQRTHSGEKPYVCRECGRGFSQKSHLHRHRRTKSGHQLLPQEVF

SEQ ID NO: 3227 - protein, 344 aa, Homo sapiens
MDFLVLFLFYLASVLMGLVLICVCSKTHSLKGLARGGAQIFSCIIPECLQRAVHGLLHYLFHTRNHTFIVLHLVLQGMVYTEYTWEVFGYCQELELSLHYLLLPYLLLGVNLFFFTLTCGTNPGIITKANELLFLHVYEFDEVMFPKNVRCSTCDLRKPARSKHCSVCNWCVHRFDHHCVWVNNCIGAWNIRYFLIYVLTLTASAATVAIVSTTFLVHLVVMSDLYQETYIDDLGHLHVMDTVFLIQYLFLTFPRIVFMLGFVVVLSFLLGGYLLFVLYLAATNQTTNEWYRGDWAWCQRCPLVAWPPSAEPQVHRNIHSHGLRSNLQEIFLPAFPCHERKKQE

SEQ ID NO: 3228 - protein, 1430 aa, Homo sapiens
MSRPSSVSPRQPAPGGGGGGGPSPCGPGGGGRAKGLKDIRIDEEVKIAVNIALERFRYGDQREMEFPSSLTSTERAFIHRLSQSLGLVSKSKGKGANRYLTVKKKDGSETAHAMMTCNLTHNTKHAVRSLIQRFPVTNKERTELLPKTERGNVFAVEAENREMSKTSGRLNNGIPQIPVKRGESEFDSFRQSLPVFEKQEEIVKIIKENKVVLIVGETGSGKTTQIPQFLLDDCFKNGIPCRIFCTQPRRLAAIAVAERVAAERRERIGQTIGYQIRLESRVSPKTLLTFCTNGVLLRTLMAGDSTLSTVTHVIVDEVHERDRFSDFLLTKLRDLLQKHPTLKLILSSAALDVNLFIRYFGSCPVIYIQGRPFEVKEMFLEDILRTTGYTNKEMLKYKKEKQQEEKQQTTLTEWYSAQENSFKPESQRQRTVLNVTDEYDLLDDGGDAVFSQLTEKDVNCLEPWLIKEMDACLSDIWLHKDIDAFAQVFHLILTENVSVDYRHSETSATALMVAAGRGFASQVEQLISMGANVHSKASNGWMALDWAKHFGQTEIVDLLESYSATLEFGNLDESSLVQTNGSDLSAEDRELLKAYHHSFDDEKVDLDLIMHLLYNICHSCDAGAVLIFLPGYDEIVGLRDRILFDDKRFADSTHRYQVFMLHSNMQTSDQKKVLKNPPAGVRKIILSTNIAETSITVNDVVFVIDSGKVKEKSFDALNFVTMLKMVWISKASAIQRKGRAGRCRPGICFRLFSRLRFQNMLEFQTPELLRMPLQELCLHTKLLAPVNCPIADFLMKAPEPPPALIVRNAVQMLKTIDAMDTWEDLTELGYHLADLPVEPHLGKMVLCAVVLKCLDPILTIACTLAYRDPFVLPTQASQKRAAMLCRKRFTAGAFSDHMALLRAFQAWQKARSDGWERAFCEKNFLSQATMEIIIGMRTQLLGQLRASGFVRARGGGDIRDVNTNSENWAVVKAALVAGMYPNLVHVDRENLVLTGPKEKKVRFHPASVLSQPQYKKIPPANGQAAAIKALPTDWLIYDEMTRAHRIANIRCCSAVTPVTILVFCGPARLASNALQEPSSFRVDGIPNDSSDSEMEDKTTANLAALKLDEWLHFTLEPEAASLLLQLRQKWHSLFLRRMRAPSKPWSQVDEATIRAIIAVLSTEEQSAGLQQPSGIGQRPRPMSSEELPLASSWRSNNSRKSSADTEFSDECTTAERVLMKSPSPALHPPQKYKDRGILHPKRGTEDRSDQSSLKSTDSSSYPSPCASPSPPSSGKGSKSPSPRPNMPVRYFIMKSSNLRNLEISQQKGIWSTTPSNERKLNRAFWESSIVYLVFSVQGSGHFQGFSRMSSEIGREKSQDWGSAGLGGVFKVEWIRKESLPFQFAHHLLNPWNDNKKVQISRDGQELEPLVGEQLLQLWERLPLGEKNTTD

SEQ ID NO: 3229 - protein, 542 aa, Homo sapiens
MGDIFLCKKVESPKKNLRESKQREEDDEDPDLIYVGVEHVHRDAEVLFVGMISNSKPVVSNILNRVTPGSKSRRKKGHFRQYPAHVSQPANHVTSMAKAIMPVSLSEGRSTDSPVTMKSSSEPGYKMSSPQVVSPNYSDSLPPGTQCLVGAMVSGGGRNESSPDSKRLSTSDINSRDSKRVKLRDGIPGVPSLAVVPSDMSSTISTNTPSQGICNSSNHVQNGVTFPWPDANGKAHFNLTDPERANESGLAMTDISSLASQNKTFDPKKENPIVLLSNFYYGQHKGDGQPEQKTHTTFKCLSCVKVLKNIKFMNHMKHHLEFEKQRNDSWEDHTTCQHCHRQFPTPFQLQCHIDSVHIAMGPSAVCKICELSFETDQVLLQHMKDHHKPGEMPYVCQVCHYRSSVFADVETHFRTCHENTKNLLCLFCLKLFKTAIPYMNHCWRHSRRRVLQCSKCRLQFLTLKEEIEHKTKDHQTFKKPEQLQGFPRETKVIIQTSVQPGSSGMASVIVSNTDPQSSPVKTKKKTAMNTRDSRLPCSKDSS

SEQ ID NO: 3230 - protein, 229 aa, Homo sapiens
MKSSDIDQDLFTDSYCKVCSAQLISESQRVAHYESRKHASKVRLYYMLHPRDGGCPAKRLRSENGSDADMVDKNKCCTLCNMSFTSAVVADSHYQGKIHAKRLKLLLGEKTPLKTTATPLSPLKPPRMDTAPVVASPYQRRDSDRYCGLCAAWFNNPLMAQQHYDGKKHKKNAARVALLEQLGTTLDMGELRGLRRNYRCTICSVSLNSIEQYHAHLKGSKHQTNLKNK

SEQ ID NO: 3231 - protein, 153 aa, Homo sapiens
MKSSDIDQDLFTDSYCKVCSAQLISESQRVAHYESRKHASKVRLYYMLHPRDGGCPAKRLRSENGSDADMVDKNKCCTLCNMSFTSAVVADSHYQGKIHAKRLKLLLGEKTPLKTTGLRRNYRCTICSVSLNSIEQYHAHLKGSKHQTNLKNK

SEQ ID NO: 3232 - protein, 665 aa, Homo sapiens
MESVTFEDVAVEFIQEWALLDSARRSLCKYRMLDQCRTLASRGTPPCKPSCVSQLGQRAEPKATERGILRATGVAWESQLKPEELPSMQDLLEEASSRDMQMGPGLFLRMQLVPSIEERETPLTREDRPALQEPPWSLGCTGLKAAMQIQRVVIPVPTLGHRNPWVARDSAVPARDPAWLQEDKVEEEAMAPGLPTACSQEPVTFADVAVVFTPEEWVFLDSTQRSLYRDVMLENYRNLASVADQLCKPNALSYLEERGEQWTTDRGVLSDTCAEPQCQPQEAIPSQDTFTEILSIDVKGEQPQPGEKLYKYNELEKPFNSIEPLFQYQRIHAGEASCECQEIRNSFFQSAHLIVPEKIRSGDKSYACNKCEKSFRYSSDLIRHEKTHTAEKCFDCQECGQAFKYSSNLRRHMRTHTGEKPFECSQCGKTFTRNFNLILHQRNHTGEKPYECKDCGKAFNQPSSLRSHVRTHTGEKPFECSQCGKAFREHSSLKTHLRTHTREKPYECNQCGKPFRTSTHLNVHKRIHTGEKLYECATCGQVLSRLSTLKSHMRTHTGEKPYVCQECGRAFSEPSSLRKHARTHSGKKPYACQECGRAFGQSSHLIVHVRTHSAGRPYQCNQCEKAFRHSSSLTVHKRTHVGRETIRNGSLPLSMSHPYCGPLAN

SEQ ID NO: 3233 - protein, 182 aa, Homo sapiens
MESVTFEDVAVEFIQEWALLDSARRSLCKYRMLDQCRTLASRGTPPCKPSCVSQLGQRAEPKATERGILRATGVAWESQLKPEELPSMQDLLEEASSRDMQMGPGLFLRMQLVPSIEERETPLTREDRPALQEPPWSLGCTLPLLSLLLPSCPEPPLVLLDSSSAPDRHLGSTLDTEARGIP

SEQ ID NO: 3234 - protein, 303 aa, Homo sapiens
MESVTFEDVAVEFIQEWALLDSARRSLCKYRMLDQCRTLASRGTPPCKPSCVSQLGQRAEPKATERGILRATGVAWESQLKPEELPSMQDLLEEASSRDMQMGPGLFLRMQLVPSIEERETPLTREDRPALQEPPWSLGCTGLKAAMQIQRVVIPVPTLGHRNPWVARDSAVPARDPAWLQEDKVEEEAMAPGLPTACSQEPVTFADVAVVFTPEEWVFLDSTQRSLYRDVMLENYRNLASVADQLCKPNALSYLEERGEQWTTDRGVLSDTCAEPQCQPQEAIPSQDTFTEILSIDVKGPPN

SEQ ID NO: 3235 - protein, 173 aa, Homo sapiens
MGDLPWAPPEAQAPSTAGAGDVAEHQVAPARFLQGAWRQAAGWLCRETGAAPGSAQAGPPETAHAADPQPRGPQAPPRLPPSLSPERVHPGQPAAPAEPAPGAPALRSGPSQPRGLRLPVPVPACAGSSAPGSPAALPDSYPWPPPARNRPATLPPTSRVSPLAAFLASAPQR

SEQ ID NO: 3236 - protein, 742 aa, Homo sapiens
MEFVSGYRDEFLDFTALLFGWFRKFVAERGAVGTSLEGRCRQLEAQIRRLPQDPALWVLHVLPNHSVGISLGQGAEPGPGPGLGTAWLLGDNPPLHLRDLSPYISFVSLEDGEEGEEEEEEDEEEEKREDGGAGSTEKVEPEEDRELAPTSRESPQETNPPGESEEAAREAGGGKDGCREDRVENETRPQKRKGQRSEAAPLHVSCLLLVTDEHGTILGIDLLVDGAQGTASWGSGTKDLAPWAYALLCHSMACPMGSGDPRKPRQLTVGDARLHRELESLVPRLGVKLAKTPMRTWGPRPGFTFASLRARTCHVCHRHSFEAKLTPCPQCSAVLYCGEACLRADWQRCPDDVSHRFWCPRLAAFMERAGELATLPFTYTAEVTSETFNKEAFLASRGLTRGYWTQLSMLIPGPGFSRHPRGNTPSLSLLRGGDPYQLLQGDGTALMPPVPPHPPRGVFGSWQDYYTWRGLSLDSPIAVLLTYPLTVYYVITHLVPQSFPELNIQNKQSLKIHVVEAGKEFDLVMVFWELLVLLPHVALELQFVGDGLPPESDEQHFTLQRDSLEVSVRPGSGISARPSSGTKEKGGRRDLQIKVSARPYHLFQGPKPDLVIGFNSGFALKDTWLRSLPRLQSLRVPAFFTESSEYSCVMDGQTMAVATGGGTSPPQPNPFRSPFRLRAADNCMSWYCNAFIFHLVYKPAQGSGARPAPGPPPPSPTPSAPPAPTRRRRGEKKPGRGARRRK

SEQ ID NO: 3237 - protein, 703 aa, Homo sapiens
MEFVSGYRDEFLDFTALLFGWFRKFVAERGAVGTSLEGRCRQLEAQIRRLPQDPALWVLHVLPNHSVGISLGQGAEPGPGPGLGTAWLLGDNPPLHLRDLSPYISFVSLEDGEEGEEEEEEDEEEEKREDGGAGSTEKVEPEEDRELAPTSRESPQETNPPGESEEAAREAGGGKDGCREDRVENETRPQKRKGQRSEAAPLHVSCLLLVTDEHGTILGIDLLVDGAQGTASWGSGTKDLAPWAYALLCHSMACPMGSGDPRKPRQLTVGDARLHRELESLVPRLGVKLAKTPMRTWGPRPGFTFASLRARTCHVCHRHSFEAKLTPCPQCSAVLYCGEACLRADWQRCPDDVSHRFWCPRLAAFMERAGELATLPFTYTAEVTSETFNKEAFLASRGLTRGYWTQLSMLIPGPGFSRHPRGNTPSLSLLRGGDPYQLLQGDGTALMPPVPPHPPRGVFVPELNIQNKQSLKIHVVEAGKEFDLVMVFWELLVLLPHVALELQFVGDGLPPESDEQHFTLQRDSLEVSVRPGSGISARPSSGTKEKGGRRDLQIKVSARPYHLFQGPKPDLVIGFNSGFALKDTWLRSLPRLQSLRVPAFFTESSEYSCVMDGQTMAVATGGGTSPPQPNPFRSPFRLRAADNCMSWYCNAFIFHLVYKPAQGSGARPAPGPPPPSPTPSAPPAPTRRRRGEKKPGRGARRRK

SEQ ID NO: 3238 - protein, 750 aa, Homo sapiens
MEFVSGYRDEFLDFTALLFGWFRKFVAERGAVGTSLEGRCRQLEAQIRRLPQDPALWVLHVLPNHSVGISLGQGAEPGPGPGLGTAWLLGDNPPLHLRDLSPYISFVSLEDGEEGEEEEEEDEEEEKREDGGAGSTEKVEPEEDRELAPTSRESPQETNPPGESEEAAREAGGGKDGCREDRVENETRPQKRKGQRSEAAPLHVSCLLLVTDEHGTILGIDLLVDGAQGTASWGSGTKDLAPWAYALLCHSMACPMGSGDPRKPRQLTVGDARLHRELESLVPRLGVKLAKTPMRTWGPRPGFTFASLRARTCHVCHRHSFEAKLTPCPQCSAVLYCGEACLRADWQRCPDDVSHRFWCPRLAAFMERAGELATLPFTYTAEVTSETFNKEAFLASRGLTRGYWTQLSMLIPGPGFSRHPRGNTPSLSLLRGGDPYQLLQGDGTALMPPVPPHPPRGVFGSWQDYYTWRGLSLDSPIAVLLTYPLTVYYVITHLVPQSFPELNIQNKQSLKIHVVEAGKEFDLVMVFWELLVLLPHVALELQFVGDGLPPESDEQHFTLQRDSLEVSVRPGSGISARPSSGTKEKGGRRDLQIKVSARPYHLFQGPKPDLVIASPSSLSAGFNSGFALKDTWLRSLPRLQSLRVPAFFTESSEYSCVMDGQTMAVATGGGTSPPQPNPFRSPFRLRAADNCMSWYCNAFIFHLVYKPAQGSGARPAPGPPPPSPTPSAPPAPTRRRRGEKKPGRGARRRK

SEQ ID NO: 3239 - protein, 377 aa, Homo sapiens
MLRLVPTGARAIVDMSYARHFLDFQGSAIPQAMQKLVVTRLSPNFREAVTLSRDCPVPLPGDGDLLVRNRFVGVNASDINYSAGRYDPSVKPPFDIGFEGIGEVVALGLSASARYTVGQAVAYMAPGSFAEYTVVPASIATPVPSVKPEYLTLLVSGTTAYISLKELGGLSEGKKVLVTAAAGGTGQFAMQLSKKAKCHVIGTCSSDEKSAFLKSLGCDRPINYKTEPVGTVLKQEYPEGVDVVYESVGGAMFDLAVDALATKGRLIVIGFISGYQTPTGLSPVKAGTLPAKLLKKSASVQGFFLNHYLSKYQAAMSHLLEMCVSGDLVCEVDLGDLSPEGRFTGLESIFRAVNYMYMGKNTGKIVVELPHSVNSKL

SEQ ID NO: 3240 - protein, 254 aa, Homo sapiens
MAPGSFAEYTVVPASIATPVPSVKPEYLTLLVSGTTAYISLKELGGLSEGKKVLVTAAAGGTGQFAMQLSKKAKCHVIGTCSSDEKSAFLKSLGCDRPINYKTEPVGTVLKQEYPEGVDVVYESVGGAMFDLAVDALATKGRLIVIGFISGYQTPTGLSPVKAGTLPAKLLKKSASVQGFFLNHYLSKYQAAMSHLLEMCVSGDLVCEVDLGDLSPEGRFTGLESIFRAVNYMYMGKNTGKIVVELPHSVNSKL

SEQ ID NO: 3241 - protein, 590 aa, Homo sapiens
MEPRAGCRLPVRVEQVVNGALVVTVSCGERSFAGILLDCTKKSGLFGLPPLAPLPQVDESPVNDSHGRAPEEGDAEVMQLGSSSPPPARGVQPPETTRPEPPPPLVPPLPAGSLPPYPPYFEGAPFPHPLWLRDTYKLWVPQPPPRTIKRTRRRLSRNRDPGRLILSTIRLRPRQVLCEKCKSTLSPPEASPGPPAAPRARRRLGSGPDRELRKPEEPENGEPTAAATARRSKRERREEDRAPAEQVPRSPVIKISYSTPQGKGEVVKIPSRVHGSLEPFRPQQAPQDDGSQDPEVLDRESRDRPSCAPSASIPKLKLTRPVPAGADLPPPKIRLKPHRLGDSEHEPVYRAELVGELNGYLRDSSPAPCADGPAGGLADLSSGSSGEDDDFKSCPQGPQGREGLAFLVSCPEGRADCASESACSSDSLDEARSSGSEGTPADTGDLSPGHGASAPSVSREARQTVPPLTVRLHTQSVSECITEDGRTVAVGDIVWGKIHGFPWWPARVLDISLGQKEDGEPSWREAKVSWFGSPTTSFLSISKLSPFSEFFKLRFNRKKKGMYRKAITEAANAARHVAPEIRELLTQFET

SEQ ID NO: 3242 - protein, 499 aa, Homo sapiens
MEPRAGCRLPVRVEQVVNGALVVTVSCGERSFAGILLDCTKKSGLFGLPPLAPLPQVDESPVNDSHGRAPEEGDAEVMQLGSSSPPPARGVQPPETTRPEPPPPLVPPLPAGSLPPYPPYFEGAPFPHPLWLRDTYKLWVPQPPPRTIKRTRRRLSRNRDPGRLILSTIRLRPRQVLCEKCKSTLSPPEASPGPPAAPRARRRLGSGPDRELRKPEEPENGEPTAAATARRSKRERREEDRAPAEQVPRSPVIKISYSTPQGKGEVVKIPSRVHGSLEPFRPQQAPQDDGSQDPEVLDRESRDRPSCAPSASIPKLKLTRPVPAGADLPPPKIRLKPHRLGDSEHEPVYRAELVGELNGYLRDSSPAPCADGPAGGLADLSSGSSGEDDDFKSCPQGPQGREGLAFLVSCPEGRADCASESACSSDSLDEARSSGSEGTPADTGDLSPGHGASAPSVSREARQTVPPLTVRLHTQSVSECITEDGRTVAVGDIVWGHRR

SEQ ID NO: 3243 - protein, 458 aa, Homo sapiens
MWSEGRYEYERIPRERAPPRSHPSDGYNRLVNIVPKKPPLLDRPGEGSYNRYYSHVDYRDYDEGRSFSHDRRSGPPHRGDESGYRWTRDDHSASRQPEYRDMRDGFRRKSFYSSHYARERSPYKRDNTFFRESPVGRKDSPHSRSGSSVSSRSYSPERSKSYSFHQSQHRKSVRPGASYKRQNEGNPERDKERPVQSLKTSRDTSPSSGSAVSSSKVLDKPSRLTEKELAEAASKWAAEKLEKSDESNLPEISEYEAGSTAPLFTDQPEEPESNTTHGIELFEDSQLTTRSKAIASKTKEIEQVYRQDCETFGMVVKMLIEKDPSLEKSIQFALRQNLHEIESAGQTWQQVPPVRNTEMDHDGTPENEGEETAQSAPQPPQAPQPLQPRKKRVRRTTQLRRTTGAPDITWGMLKKTTQEAERILLRTQTPFTPENLFLAMLSVVHCNSRKDVKPENKQ

SEQ ID NO: 3244 - protein, 374 aa, Homo sapiens
MAYRRDEMWSEGRYEYERIPRERAPPRSHPSDGYNRLVNIVPKKPPLLDRPGEGSYNRYYSHVDYRDYDEGRSFSHDRRSGPPHRGDESGYRWTRDDHSASRQPEYRDMRDGFRRKSFYSSHYARERSPYKRDNTFFRESPVGRKDSPHSRSGSSVSSRSYSPERSKSYSFHQSQHRKSVRPGASYKRQNEGNPERDKERPVQSLKTSRDTSPSSGSAVSSSKVLDKPSRLTEKELAEAASKWAAEKLEKSDESNLPEISEYEAGSTAPLFTDQPEEPESNTTHGIELFEDSQLTTRSKAIASKTKEIEQVYRQDCETFGMVVKMLIEKDPSLEKSIQFALRQNLHEIGERCVEELKHFIAEYDTSTQDFGEPF

SEQ ID NO: 3245 - protein, 434 aa, Homo sapiens
MWSEGRYEYERIPRERAPPRSHPSDESGYRWTRDDHSASRQPEYRDMRDGFRRKSFYSSHYARERSPYKRDNTFFRESPVGRKDSPHSRSGSSVSSRSYSPERSKSYSFHQSQHRKSVRPGASYKRQNEGNPERDKERPVQSLKTSRDTSPSSGSAVSSSKVLDKPSRLTEKELAEAASKWAAEKLEKSDESNLPEISEYEAGSTAPLFTDQPEEPESNTTHGIELFEDSQLTTRSKAIASKTKEIEQVYRQDCETFGMVVKMLIEKDPSLEKSIQFALRQNLHEIESAGQTWQQVPPVRNTEMDHDGTPENEGEETAQSALFGFQHDASNHTIVGLGPNQVPEMKETTLQAPQPPQAPQPLQPRKKRVRRTTQLRRTTGAPDITWGMLKKTTQEAERILLRTQTPFTPENLFLAMLSVVHCNSRKDVKPENKQ

SEQ ID NO: 3246 - protein, 258 aa, Homo sapiens
MAYRRDEMWSEGRYEYERIPRERAPPRSHPSDESGYRWTRDDHSASRQPEYRDMRDGFRRKSFYSSHYARERSPYKRDNTFFRESPVGRKDSPHSRSGSSVSSRSYSPERSKSYSFHQSQHRKSVRPGASYKRQNEGNPERDKERPVQSLKTSRDTSPSSGSAVSSSKVLDKPSRLTEKELAEAASKWAAEKLEKSDESNLPEISEYEAGSTAPLFTDQPEEPESNTTHGIELFEDSQLTTRSKAIASKTKEIEQVRV

SEQ ID NO: 3247 - protein, 319 aa, Homo sapiens
MAYRRDEMWSEGRYEYERIPRERAPPRSHPSDESGYRWTRDDHSASRQPEYRDMRDGFRRKSFYSSHYARERSPYKRDNTFFRESPVGRKDSPHSRSGSSVSSRSYSPERSKSYSFHQSQHRKSVRPGASYKRQNEGNPERDKERPVQSLKTSRDTSPSSGSAVSSSKVLDKPSRLTEKELAEAASKWAAEKLEKSDESNLPEISEYEAGSTAPLFTDQPEEPESNTTHGIELFEDSQLTTRSKAIASKTKEIEQVYRQDCETFGMVVKMLIEKDPSLEKSIQFALRQNLHEIGERCVEELKHFIAEYDTSTQDFGEPF

SEQ ID NO: 3248 - protein, 122 aa, Homo sapiens
MFSYIDKERPVQSLKTSRDTSPSSGSAVSSSKVLDKPSRLTEKELAEAASKWAAEKLEKSDESNLPEISEYEAGSTAPLFTDQPEEPESNTTHGIELFEDSQLTTRSKAIASKTKEIEQVRV

SEQ ID NO: 3249 - protein, 367 aa, Homo sapiens
MWSEGRYEYERIPRERAPPRSHPSDGYNRLVNIVPKKPPLLDRPGEGSYNRYYSHVDYRDYDEGRSFSHDRRSGPPHRGDESGYRWTRDDHSASRQPEYRDMRDGFRRKSFYSSHYARERSPYKRDNTFFRESPVGRKDSPHSRSGSSVSSRSYSPERSKSYSFHQSQHRKSVRPGASYKRQNEGNPERDKERPVQSLKTSRDTSPSSGSAVSSSKVLDKPSRLTEKELAEAASKWAAEKLEKSDESNLPEISEYEAGSTAPLFTDQPEEPESNTTHGIELFEDSQLTTRSKAIASKTKEIEQVYRQDCETFGMVVKMLIEKDPSLEKSIQFALRQNLHEIGERCVEELKHFIAEYDTSTQDFGEPF

SEQ ID NO: 3250 - protein, 348 aa, Homo sapiens
MWSEGRYEYERIPRERAPPRSHPSDGYNRLVNIVPKKPPLLDRPGEGSYNRYYSHVDYRDYDEGRSFSHDRRSGPPHRGDESGYRWTRDDHSASRQPEYRDMRDGFRRKSFYSSHYARERSPYKRDNTFFRESPVGRKDSPHSRSGSSVSSRSYSPERSKSYSFHQSQHRNKERPVQSLKTSRDTSPSSGSAVSSSKVLDKPSRLTEKELAEAASKWAAEKLEKSDESNLPEISEYEAGSTAPLFTDQPEEPESNTTHGIELFEDSQLTTRSKAIASKTKEIEQVYRQDCETFGMVVKMLIEKDPSLEKSIQFALRQNLHEIGERCVEELKHFIAEYDTSTQDFGEPF

SEQ ID NO: 3251 - protein, 189 aa, Homo sapiens
MTEYKLVVVGAGGVGKSALTIQLIQNHFVDEYDPTIEDSYRKQVVIDGETCLLDILDTAGQEEYSAMRDQYMRTGEGFLCVFAINNSKSFADINLYREQIKRVKDSDDVPMVLVGNKCDLPTRTVDTKQAHELAKSYGIPFIETSAKTRQGVEDAFYTLVREIRQYRMKKLNSSDDGTQGCMGLPCVVM

(The sequence listing continues in the following parts.)

1. A fusion protein comprising a DNA binding domain operably-linked to a dimerization domain, wherein the DNA binding domain specifically binds to a response element.

2.-41. (canceled)

42. A nucleic acid encoding the fusion protein of claim 1.

43.-49. (canceled)

50. A vector comprising the nucleic acid of claim 42.

51.-55. (canceled)

56. A cell comprising a fusion protein of claim 1.

57.-63. (canceled)

64. A composition comprising a cell of claim 56.

65. A pharmaceutical composition comprising a composition of claim 64 and a pharmaceutically acceptable carrier.

66. A fusion protein comprising a regulation domain operably-linked to a dimerization domain, wherein the regulation domain is capable of modulating a transcriptional activity or an epigenetic activity of one or more target sequences.

67.-95. (canceled)

96. A nucleic acid encoding a fusion protein of claim 66.

97.-103. (canceled)

104. A vector comprising a nucleic acid of claim 96.

105.-110. (canceled)

111. A cell comprising a fusion protein of claim 66.

112.-118. (canceled)

119. A composition comprising a cell of claim 111.

120. A pharmaceutical composition comprising a composition of claim 119 and a pharmaceutically-acceptable carrier.

121. A composition comprising:
(a) a first fusion protein comprising a DNA binding domain operably-linked to a dimerization domain, wherein the DNA binding domain specifically binds to a response element; and
(b) a second fusion protein comprising a regulation domain operably-linked to a dimerization domain, wherein the regulation domain is capable of modulating a transcriptional activity or an epigenetic activity of one or more target sequences.

122.-135. (canceled)

136. A cell comprising a composition of claim 121.

137.-143. (canceled)

144. A composition comprising the cell of claim 136.

145. A pharmaceutical composition comprising a composition of claim 121 and a pharmaceutically-acceptable carrier.

146.-151. (canceled)

152. A method of treating a disease or a disorder, comprising administering to a subject an effective amount of a fusion protein of claim 1, wherein a severity of a sign or symptom of the disease or disorder is decreased, thereby treating the disease or disorder.

153. (canceled)

154. The method of claim 152, wherein the disease or disorder comprises one or more of an autoimmune disease or disorder; an inflammatory disease or disorder; an immunodeficiency disease or disorder; an ischemic disease or disorder; a blood disease or disorder; a bone disease or disorder; a neurological disease or disorder; a cardiac disease or disorder; a vascular disease or disorder; a metabolic disease or disorder; a dermatological disease or disorder; a digestive disease or disorder; a mitochondrial disease or disorder; a muscle disease or disorder; a liver disease or disorder; a kidney disease or disorder; a hearing disease or disorder; an ophthalmic disease or disorder; and a proliferative disease or disorder.

155.-157. (canceled)

158. A cell comprising the nucleic acid of claim 42.

159. A cell comprising the vector of claim 50.

160. A composition comprising the fusion protein of claim 1.

161. A composition comprising the nucleic acid of claim 42.

162. A composition comprising the vector of claim 50.

163. A cell comprising the nucleic acid of claim 96.

164. A cell comprising the vector of claim 104.

165. A composition comprising the fusion protein of claim 66.

166. A composition comprising the nucleic acid of claim 96.

167. A composition comprising the vector of claim 104.

168. A method of treating a disease or a disorder, comprising administering to a subject an effective amount of the nucleic acid of claim 42, wherein a severity of a sign or symptom of the disease or disorder is decreased, thereby treating the disease or disorder.

169. A method of treating a disease or a disorder, comprising administering to a subject an effective amount of the vector of claim 50, wherein a severity of a sign or symptom of the disease or disorder is decreased, thereby treating the disease or disorder.

170. A method of treating a disease or a disorder, comprising administering to a subject an effective amount of the cell of claim 56, wherein a severity of a sign or symptom of the disease or disorder is decreased, thereby treating the disease or disorder.

171. A method of treating a disease or a disorder, comprising administering to a subject an effective amount of the composition of claim 64, wherein a severity of a sign or symptom of the disease or disorder is decreased, thereby treating the disease or disorder.

172. A method of treating a disease or a disorder, comprising administering to a subject an effective amount of the pharmaceutical composition of claim 145, wherein a severity of a sign or symptom of the disease or disorder is decreased, thereby treating the disease or disorder.

173. A pharmaceutical composition comprising a composition of claim 144 and a pharmaceutically-acceptable carrier.
